United States Patent Application Publication US 2024/0327476 A1 - sequence listing, part 27

SEQ ID NO: 30201 - DNA, 10978 bp, Homo sapiens
  source 1..10978: mol_type = unassigned DNA
atggtggagccagggcaagatttactgcttgctgctttgagtgagagtggaattagtccgaatgacctctttgatattgatggtggagatgcagggcttgcaactccaatgcctaccccgtcagttcagcagtcagtgccacttagtgcattagaactaggtttggagaccgaagcagcagttcctgttaaacaagaaccagagactgtacctactccagcactattaaatgtgaggcagcctccatctactacaacatttgtgctgaatcaaataaatcatcttccacccttgggatctacaattgtaatgactaaaacaccacctgtaacaaccaacaggcaaaccatcactttaactaagtttatccagactactgcaagcacacgcccgtcagtctcagcaccaacagtacgaaatgccatgacctctgcaccttcaaaagaccaagttcagcttaaagatctactgaaaaataatagtcttaatgaactgatgaaactaaagccacctgctaatattgctcagccagtagcaacagcagctactgatgtaagcaatggtacagtaaagaaagagtcttctaataaagaaggagctagaatgtggataaacgacatgaagatgaggagtttttccccaaccatgaaggttcctgttgtaaaagaagatgatgaaccagaggaagaagatgaagaagaaatgggtcatgcagaaacctatgcagaatacatgccaataaaattaaaaattggcctacgtcatccagatgctgtagtggaaaccagctctttatccagtgttactcctcctgatgtttggtacaaaacatccatttctgaggaaaccattgataatggctggttatcagcattgcagcttgaggcaattacatatgcagcccagcaacatgaaactttcctacctaatggagatcgtgctggcttcttaataggtgatggtgccggtgtaggaaaaggaaggacgatagcaggaatcatctatgaaaattatttgttgagtagaaaacgagcattgtggtttagtgtttcaaatgacttaaagtatgatgctgaaagagatttaagggatattggagcaaaaaacattttggttcattcgttaaataagtttaaatacggaaaaatttcttccaaacataatgggagtgtgaaaaagggtgttatttttgctacttactcttcacttattggtgaaagccagtctggcggcaagtataaaactaggttaaaacaacttctgcattggtgcggtgatgacttcgatggagtgatagtgtttgatgagtgtcataaagccaaaaacttatgtcctgttggttcttcaaagccaaccaagacaggcttagcagttttagagcttcagaacaaattgccaaaagccagagttgtttatgctagtgcaactggtgcttctgaaccacgcaacatggcctatatgaaccgtcttggcatatggggtgagggtactccatttagagaattcagtgattttattcaagcagtagaacggagaggagttggtgccatggaaatagttgctatggatatgaagcttagaggaatgtacattgctcgacaactgagctttactggagtgaccttcaaaattgaggaagttcttctttctcagagctacgttaaaatgtataacaaagctgtcaagctgtgggtcatcgccagagagcggtttcagcaagctgcagatctgattgatgctgagcaacgaatgaagaagtccatgtggggtcagttctggtctgctcaccagaggttcttcaaatacttatgcatagcatccaaagttaaaagggttgtgcaactagctcgagaggaaatcaagaatggaaaatgtgttgtaattggtctgcagtctacaggagaagctagaacattagaagctttggaagagggcgggggagaattgaatgattttgtttcaactgccaaaggtgtgttgcagtcactcattgaaaaacattttcctgctccagacaggaaaaaactttatagtttactaggaatcgatttgacagctccaagtaacaacagttcgccaagagatagtccttgtaaagaaaataaaataaagaagcggaaaggtgaagaaataactcgagaagccaaaaaagcacgaaaagtaggtggccttactggtagcagttctgacgacagtggaagtgaatctgatgcctctgataatgaagaaagtgactatgagagctctaaaaacatgagttctggagatgatgacgatttcaacccatttttagatgagtctaatgaggatgatgaaaatgatccctggttaattagaaaagaccacaagaaaaacaaagagaaaaaaaagaagaaaagtatagatccagattctattcaaagtgccttattagcatcaggtcttggatcaaaacgacctagtttttcatctacaccagttatctcacctgctcctaacagtacaccagctaacagtaacaccaacagtaacagtagccttataacaagtcaggatgctgtggaaagggctcagcagatgaagaaagacctgcttgataagctagaaaaattagctgaagacctcccccctaataccctggatgaacttatcgatgaacttggtggccctgagaacgttgctgagatgactggccgcaagggacgggttgtgagcaatgatgatggaagcatatcttatgagtcaagatctgaacttgatgtgcctgtggaaatactaaacatcacagaaaaacaacgatttatggatggagataagaatattgctatcatctcagaagctgccagctcgggtatttcattacaagcagataggagagctaaaaatcaaaggcgaagagttcatatgactttagaattaccttggagcgctgatagagcaattcaacagttcggacgtactcatagatcaaaccaagttactgctcctgagtatgtctttctgatatctgaactggcaggagaacaaagatttgcatctattgttgctaaaagacttgagagtttgggggcacttacacatggtgatagaagggcaacagaatctagagatctgagcaggttcaactttgataataagtatggaagaaatgctttagaaattgtcatgaaatccattgtaaacttggattctcctatggtatcaccacctccagactatcctggagaattttttaaagatgttcgacaaggactgataggcgttggcctgataaatgtagaagatcgctcgggaattcttactctcgataaagattataacaacataggaaaattcttaaatagaattttaggcatggaggtgcatcagcagaatgcgttatttcagtattttgcggacacacttactgcagttgttcaaaatgccaaaaaaaatggaagatatgatatgggaatcttagatcttggttctggagatgaaaaagtgcggaaaagtgatgttaaaaagtttctgactccaggatattcaacctctggccacgtagaattatacacaattagtgtagagaggggaatgtcatgggaggaagctaccaagatttgggctgagctgacaggaccagacgatggcttttacttgtcattgcaaataaggaacaacaagaaaactgccatcttagttaaagaagtgaatcctaaaaagaaacttttcttagtttatcgaccaaatactgggaagcagctcaaattagaaatttatgctgatctaaaaaagaaatataagaaggtcgtctcagatgatgccctgatgcactggttagatcagtataattcatctgcagatacttgtactcatgcttattggcgcggcaattgcaaaaaagcaagcttggggctagtttgtgaaataggtcttcgttgccgtacatattatgtattatgtggttcagtgctgagtgtctggacaaaagttgagggtgttctagcatctgtcagtggcacaaacgtgaagatgcagatcgtgcggctaagaacggaagatgggcaacggattgtaggtttgatcattccggcaaattgtgtgtctcctcttgtaaatctcctatcaacttcagaccagtctcaacagcttgcggtccaacagaaacagctatggcaacagcatcaccctcagagcatcaccaacttgagcaacgcatgaagaacagacaggtttcaacatggatggatctgaaatgctgttgaagcatatcatttgcataaaaatcagggacagtttccaaagaattatatatttttttcagttgtgctctctagttagtttttttgggagtaaggacaaacctggaatagatagcaaaactgaaaatcagcagtgctgatggtggtacatatgtctttcctttagcttctcccctgataattcccatctgcttttacttcgggtgagcagagggggatgtgtgtgtgcgtgtgtgtcagtctgtttgtgagtgtgttaaaggctacagaccacagttggtttaaaatgcttggaacttcccaaactggctttactttatgtttatacagtgctcagggttaacgcagtacatccatgccattgctgtgggaggtatccccggatgcatgtgttttgagtctataaatatagaaaatatatattggtttctttttccaacttaataggtttattaaagcatgaaatgaaaggttgcatatcatgcattcaggttattttctaatttttgttctgacagtgcatgtctttggaagcatgctgaaacaagattaacacaggagtcgagtaacagagagaaacatttgttagatgtacagcattggttattgcatttttatagtgtttatacctgggtattgcttcaaaccctgcagacccctccttccccttctccctgccctgggtttctggtcaaggtaatgaatacatacatttttctgtgataaaactcttaaaagttaattttaatgtattaatagtattcctaatgtgtgctgcagaaatggctatgagcctcttaaatttacatttgcaacttaaaggtagttttagaaggaagtacaaattggctttcatcttgcaaacaatcgttttttacttcattatcttaatttgctttgtcactcataaaaaggaaaccatacctgagttgtagacaatgaggaaacacttgaggcttctgctgtgtgttcttttgttattgttgttattgttgttactcagtaacttgaatattgtttaatgtgttgtaagacgtagagtttatctcaagctgttaaaaatggtaatgtacaaatgtgaatagacacttatctatataatatgggtaagttttgtttcgcctataatagatgtttataaaaacaagtgaggggacagttggtctttttatcttttctttctttttctttcttttctttttttctttttttttttttttttttttttttttgcttccacaggttgcactattgaaaaatcgagattgtataaacctggtaaaaagctgcaagatgccaaaatcttgtagatgtcaaataaaaagttattatactaacaagaagtggactcttgtttaggccctcactggtgaccttcagaagtagtctgtgacggggactcagcagaatttgtgtgttgtctcagcattccaggtagccttatagtttggcttaaaacttatccctaaaatgtaagatggcattgagggaaagggtataatgatagtacttctgaatgttttttaagttgaattgtttgtaaacttcttgcagaattgggtgagatgtgtgttaaaactgacaaacctggctgaaagcttagggcgttcatcctcttgtgtctcctttagcctgagtttggttatgtcaagcttaccgtaagttttcttaggatttatttattcttggtgcctaaaagaataaattgaaagtactttctgttctttggcacattttgcccagcggatgcaacttctatcctcagtccagttcatatatctcaggcagtgatccattttgtatcagccagtttcccttgttagggccgctagacccggctggcagccaagagcagcactctccccaccttcagcagaacttctcagctcatgtgtgtgtttttaaaagcagtaggcagcttccatcagcaatggaagtgtcccccactccagtggtggaggtgcagtcgctggacctgaggaagtggggaagcattacaaaccctcctgcagtaagaatggcagagttgggaaggatcttctctcgcaggctgttggcccaactcctcttttctgtgtatgagggcatcttagttttttatggcgttttcaaagcagcatatgaggattcttagcatgcagctaagtgacaacccccatggcctatgatgtaatgtttgctctggactagccatcttgataaataggagtgtatgtatcttaggttctttgtagaacagctatttttttttctcattaaaaaggcctctgaaagccctctcaaaatggacctcacaaaggcaaccagtgtgaatggatgggagctggggtgctgcatgcccaggctggtcatggtgtgtgcagcacccagagagttgcacccaccccttcttcaggtggacatccgacctttacactgtggtcttgcaaaaatcagcgagttagtttggccgccctgtgaagcttcagcattcaaggtcctcttctgttaaaacccaactcgtagccgggcgtggtggctcactcctataatcccagcacttcgggaggccaaggcaggtgcatcacttgaggccaggagttcgagaccagcctggtccacatggcaaaaccccatctgtaccaaaaaatacaaaaaatttgccgctgacttctgtaaaataggtccattcattgcaggatctaaatgccacacctgaattcagaggccttgtttaattaaccccatgtccactttgcctctgcaatgcctttttctttttagcaatatggctctgagcacaaagatttggttggaaatcatgttcgtgttttcagagtttacagcgtcaattgtactgaaaaccacttccagagtctaaagcagctcagatgttatctctgggggaattagtgttcccctcatttagcaacctccataccacaaggtctctgtctgtagttactgggattatccagatacactatcaatgatacaaattcataggagtattaatgcatttctttaaacacaacttgattaagaagcaaatatgttaagcagttttctttttctgctgctaaattacagttagacacttcagtatcttctctttacatgtgtatataaattagtaagaacctgcatccaaagcaatgtagtgtgtgtatgtatctatatatatttattctaactcagcacttcagaagcctttttgagttacaacaatattttagtttgcctcatctgtagaggtaaaatttctatattaccaagctccagaggaatatgatattttacaggcacaattttctggctgtagtccctggggcattcatttgctggcctccatgggatgctgttagaacaattgttagccggcaagagaagaaaggctaccaggacagcatttataattgtagaatgggagccttcttccctctcccctccactttcattttagcatgagataaaaaaatagattggaaatgattgttgcatctcacttcatggaagtaggggcagaagttccctctggatccttttcttgacaagcagtcaagaggaaggtccccatacacatgtacctgtgtgatacttggtagtttctaagaatggtgctacataagcgttgctgttaggctgggatcctattaatgaacgtttgattagttcaggcctcccaatggcaaaggcagacaccgtggagatggacatttactgactccccttctgtgtggcttcggtctccctggctaacaccacacctgtgcgtactgcgctcggcccactttgctgcagaaacgtagcaagcgtttcatgtcagggctacagctgagagcaaaaactgcaaaaaaaaaaaaaaatgtctcattgaatgccagttgtctgatacaaatgcagtgtcttttaagtgacagaaacacacctaaatacctgcaactcaagctcgctagcattttttttttgagtacttgagataaaatccaaaacccaccctctaattttgtgctgtatttatatatatgtacataaatgtatatatagagaaatgttgagttcttctggattctgaatgtaaataattcttgtaaattgggactctgcccacctgtttctcccttttccctcttcccttcagctctatttattcttttcttgactttcccatatggggcatcttatgacttttttttttttttttttttaagaaaagtatggaaaacttttcatttagaaaagtatttgttcctgtattttagaattcagttttgcatctttgctgtagaattcctgttttgtgttaatgttttttactatgtcttattgtgttgtgtgcaatgcattgtactggggggatgcacttgagtgccatttctgatactgtcattgtatgactgctgatgctcgtttatgttgttctttggaagctatagtgagcctgatgttttcacattttaaaaaatgcttcctgagacttctttaagctcctctaacttcttcagtgcatttgggatcaaacttagctcttagatcagcaaacctgacttgcttctacttttgcaatttttcaggccttaccatatttcttatctctgtcttcccacctgataggaaaatcttgcagatttgaaacagtggtttctggcctgctgctgcagcaaattccctatgtttatttaagaagtcgggcctatgcttttaacctacaaatgatgagtaatttacttgcaatgaacacaggtagcctgctgctgtttataacctgttgaggatatttatagcaggcaggaggcaggcctagtgtgttattgacaggtgactttagagaatgtacattggccgggtgcggtggctcacgcctgtaatcccagcactttgggaggccgaggcgggcggatcatgaggtcaggagattgagaccatctcctggctaacacggtgaaaccccgtctctactaaaaatacaaaaaaaaaaaaaacttagccaggcgtggtggcgggtgcctgtagtcccagctactcaggaggctgaggcaggagaatggcatgaacctgggaggcagagcttgcagtgagcccagatcgcgccactgcactccagcctgggcaacagaccgagactccgtctcgaaaaaaaaaaaagagagagaatgtacattaaggaacaattgtcctccaaaagagagccaagcaactgctctggagcctcctaggctgactctgctggagggtgagacaagcagattcccattgcagcactggtccctggggtaccctgaacggctgtgctctccacccttgtatcggtgagtggatcttgtctacatcagccgtaagcctagaagcagagcgggatcgaggcgtttttaataattcgagttgggaagacccggatggttcatcaaaatgatggtgttgagcacccgggaggcagacattgggtatttgttcacaattttgcacctgtaagaaaatgttcctttataactttcaaggattgccgtgagcgtctttggggccttttcattcatgtacaagtttcattcattactattcaacttggtagacttggtgaaaaatgtaaaagcattctgtatttggatcagtcttgggaactaaatttgtcgtgaattggggcctgtcacagattgcctccagtgtgcatcctccacgcagaccctccttgctcagtctccctctggcgcccatggggaagccgtgctgtggttggcagtgcggccatctgggctgccgcaacgtggcagggcaccgtccagcaagactgccccttagtgcagggctaagcaaggaaaagaagaagcccaaaaaggcgggttctttttgatacttgtaattcaggcgtcctccagagtgaaggccactctgcaggcccctggtgagaacctgtctggcttttccactgcgggcccctaaccagtaccctgcccttgtggcccatttgtgcctgggcagatgtttctggccagcagacactgaaggcctttttgctgtgacagtatttatggcactgaagaggataaagaagcttgagccctctttctgactcccactttatggggcagagagagctttttttctacatagcacattgcagtctcaccgctatcagaaaaatatcctgttcatggtttatactgaatttgcaaactactgatatgatttttcaataaccacttgtatcttccatcatccatgagaggtgggaagaggtacactgtatctctgcaataaaactttggccaggttctacctcctctgagcaaaggatacttttctatgtaggtgtagatggttctcctttactaatctgacatggtgcatctggagacaacatctgatgggatccaaagacaacttgaaacaaaggtggatgtcagctcttggtgtgttttcatttggttctcttttttaaatctcccttttgttatcgctcctgttgtagcgtgtccatcagtgtgtgaagggtgcgccctgttccaatgatactgcattgctgcatccagcctttcgtgggagcacggtaccaagcgtccggaattgattatcccaatcatttttgatatgtaactgaaaaatttggtctcatgcaataaaaatgtactggctgcattttagcaaggtttatttactcttgcaagtaaaaacgatcaaccgtgaagcgtaacaaattctgtatttagtttttttttctgttgtggtggtttttgttttgttttttgtttttgtaagattctaaataaattaaatacgagtca

SEQ ID NO: 30202 - DNA, 10981 bp, Homo sapiens
  source 1..10981: mol_type = unassigned DNA
atggtggagccagggcaagatttactgcttgctgctttgagtgagagtggaattagtccgaatgacctctttgatattgatggtggagatgcagggcttgcaactccaatgcctaccccgtcagttcagcagtcagtgccacttagtgcattagaactaggtttggagaccgaagcagcagttcctgttaaacaagaaccagagactgtacctactccagcactattaaatgtgaggcagcagcctccatctactacaacatttgtgctgaatcaaataaatcatcttccacccttgggatctacaattgtaatgactaaaacaccacctgtaacaaccaacaggcaaaccatcactttaactaagtttatccagactactgcaagcacacgcccgtcagtctcagcaccaacagtacgaaatgccatgacctctgcaccttcaaaagaccaagttcagcttaaagatctactgaaaaataatagtcttaatgaactgatgaaactaaagccacctgctaatattgctcagccagtagcaacagcagctactgatgtaagcaatggtacagtaaagaaagagtcttctaataaagaaggagctagaatgtggataaacgacatgaagatgaggagtttttccccaaccatgaaggttcctgttgtaaaagaagatgatgaaccagaggaagaagatgaagaagaaatgggtcatgcagaaacctatgcagaatacatgccaataaaattaaaaattggcctacgtcatccagatgctgtagtggaaaccagctctttatccagtgttactcctcctgatgtttggtacaaaacatccatttctgaggaaaccattgataatggctggttatcagcattgcagcttgaggcaattacatatgcagcccagcaacatgaaactttcctacctaatggagatcgtgctggcttcttaataggtgatggtgccggtgtaggaaaaggaaggacgatagcaggaatcatctatgaaaattatttgttgagtagaaaacgagcattgtggtttagtgtttcaaatgacttaaagtatgatgctgaaagagatttaagggatattggagcaaaaaacattttggttcattcgttaaataagtttaaatacggaaaaatttcttccaaacataatgggagtgtgaaaaagggtgttatttttgctacttactcttcacttattggtgaaagccagtctggcggcaagtataaaactaggttaaaacaacttctgcattggtgcggtgatgacttcgatggagtgatagtgtttgatgagtgtcataaagccaaaaacttatgtcctgttggttcttcaaagccaaccaagacaggcttagcagttttagagcttcagaacaaattgccaaaagccagagttgtttatgctagtgcaactggtgcttctgaaccacgcaacatggcctatatgaaccgtcttggcatatggggtgagggtactccatttagagaattcagtgattttattcaagcagtagaacggagaggagttggtgccatggaaatagttgctatggatatgaagcttagaggaatgtacattgctcgacaactgagctttactggagtgaccttcaaaattgaggaagttcttctttctcagagctacgttaaaatgtataacaaagctgtcaagctgtgggtcatcgccagagagcggtttcagcaagctgcagatctgattgatgctgagcaacgaatgaagaagtccatgtggggtcagttctggtctgctcaccagaggttcttcaaatacttatgcatagcatccaaagttaaaagggttgtgcaactagctcgagaggaaatcaagaatggaaaatgtgttgtaattggtctgcagtctacaggagaagctagaacattagaagctttggaagagggcgggggagaattgaatgattttgtttcaactgccaaaggtgtgttgcagtcactcattgaaaaacattttcctgctccagacaggaaaaaactttatagtttactaggaatcgatttgacagctccaagtaacaacagttcgccaagagatagtccttgtaaagaaaataaaataaagaagcggaaaggtgaagaaataactcgagaagccaaaaaagcacgaaaagtaggtggccttactggtagcagttctgacgacagtggaagtgaatctgatgcctctgataatgaagaaagtgactatgagagctctaaaaacatgagttctggagatgatgacgatttcaacccatttttagatgagtctaatgaggatgatgaaaatgatccctggttaattagaaaagaccacaagaaaaacaaagagaaaaaaaagaagaaaagtatagatccagattctattcaaagtgccttattagcatcaggtcttggatcaaaacgacctagtttttcatctacaccagttatctcacctgctcctaacagtacaccagctaacagtaacaccaacagtaacagtagccttataacaagtcaggatgctgtggaaagggctcagcagatgaagaaagacctgcttgataagctagaaaaattagctgaagacctcccccctaataccctggatgaacttatcgatgaacttggtggccctgagaacgttgctgagatgactggccgcaagggacgggttgtgagcaatgatgatggaagcatatcttatgagtcaagatctgaacttgatgtgcctgtggaaatactaaacatcacagaaaaacaacgatttatggatggagataagaatattgctatcatctcagaagctgccagctcgggtatttcattacaagcagataggagagctaaaaatcaaaggcgaagagttcatatgactttagaattaccttggagcgctgatagagcaattcaacagttcggacgtactcatagatcaaaccaagttactgctcctgagtatgtctttctgatatctgaactggcaggagaacaaagatttgcatctattgttgctaaaagacttgagagtttgggggcacttacacatggtgatagaagggcaacagaatctagagatctgagcaggttcaactttgataataagtatggaagaaatgctttagaaattgtcatgaaatccattgtaaacttggattctcctatggtatcaccacctccagactatcctggagaattttttaaagatgttcgacaaggactgataggcgttggcctgataaatgtagaagatcgctcgggaattcttactctcgataaagattataacaacataggaaaattcttaaatagaattttaggcatggaggtgcatcagcagaatgcgttatttcagtattttgcggacacacttactgcagttgttcaaaatgccaaaaaaaatggaagatatgatatgggaatcttagatcttggttctggagatgaaaaagtgcggaaaagtgatgttaaaaagtttctgactccaggatattcaacctctggccacgtagaattatacacaattagtgtagagaggggaatgtcatgggaggaagctaccaagatttgggctgagctgacaggaccagacgatggcttttacttgtcattgcaaataaggaacaacaagaaaactgccatcttagttaaagaagtgaatcctaaaaagaaacttttcttagtttatcgaccaaatactgggaagcagctcaaattagaaatttatgctgatctaaaaaagaaatataagaaggtcgtctcagatgatgccctgatgcactggttagatcagtataattcatctgcagatacttgtactcatgcttattggcgcggcaattgcaaaaaagcaagcttggggctagtttgtgaaataggtcttcgttgccgtacatattatgtattatgtggttcagtgctgagtgtctggacaaaagttgagggtgttctagcatctgtcagtggcacaaacgtgaagatgcagatcgtgcggctaagaacggaagatgggcaacggattgtaggtttgatcattccggcaaattgtgtgtctcctcttgtaaatctcctatcaacttcagaccagtctcaacagcttgcggtccaacagaaacagctatggcaacagcatcaccctcagagcatcaccaacttgagcaacgcatgaagaacagacaggtttcaacatggatggatctgaaatgctgttgaagcatatcatttgcataaaaatcagggacagtttccaaagaattatatatttttttcagttgtgctctctagttagtttttttgggagtaaggacaaacctggaatagatagcaaaactgaaaatcagcagtgctgatggtggtacatatgtctttcctttagcttctcccctgataattcccatctgcttttacttcgggtgagcagagggggatgtgtgtgtgcgtgtgtgtcagtctgtttgtgagtgtgttaaaggctacagaccacagttggtttaaaatgcttggaacttcccaaactggctttactttatgtttatacagtgctcagggttaacgcagtacatccatgccattgctgtgggaggtatccccggatgcatgtgttttgagtctataaatatagaaaatatatattggtttctttttccaacttaataggtttattaaagcatgaaatgaaaggttgcatatcatgcattcaggttattttctaatttttgttctgacagtgcatgtctttggaagcatgctgaaacaagattaacacaggagtcgagtaacagagagaaacatttgttagatgtacagcattggttattgcatttttatagtgtttatacctgggtattgcttcaaaccctgcagacccctccttccccttctccctgccctgggtttctggtcaaggtaatgaatacatacatttttctgtgataaaactcttaaaagttaattttaatgtattaatagtattcctaatgtgtgctgcagaaatggctatgagcctcttaaatttacatttgcaacttaaaggtagttttagaaggaagtacaaattggctttcatcttgcaaacaatcgttttttacttcattatcttaatttgctttgtcactcataaaaaggaaaccatacctgagttgtagacaatgaggaaacacttgaggcttctgctgtgtgttcttttgttattgttgttattgttgttactcagtaacttgaatattgtttaatgtgttgtaagacgtagagtttatctcaagctgttaaaaatggtaatgtacaaatgtgaatagacacttatctatataatatgggtaagttttgtttcgcctataatagatgtttataaaaacaagtgaggggacagttggtctttttatcttttctttctttttctttcttttctttttttctttttttttttttttttttttttttttgcttccacaggttgcactattgaaaaatcgagattgtataaacctggtaaaaagctgcaagatgccaaaatcttgtagatgtcaaataaaaagttattatactaacaagaagtggactcttgtttaggccctcactggtgaccttcagaagtagtctgtgacggggactcagcagaatttgtgtgttgtctcagcattccaggtagccttatagtttggcttaaaacttatccctaaaatgtaagatggcattgagggaaagggtataatgatagtacttctgaatgttttttaagttgaattgtttgtaaacttcttgcagaattgggtgagatgtgtgttaaaactgacaaacctggctgaaagcttagggcgttcatcctcttgtgtctcctttagcctgagtttggttatgtcaagcttaccgtaagttttcttaggatttatttattcttggtgcctaaaagaataaattgaaagtactttctgttctttggcacattttgcccagcggatgcaacttctatcctcagtccagttcatatatctcaggcagtgatccattttgtatcagccagtttcccttgttagggccgctagacccggctggcagccaagagcagcactctccccaccttcagcagaacttctcagctcatgtgtgtgtttttaaaagcagtaggcagcttccatcagcaatggaagtgtcccccactccagtggtggaggtgcagtcgctggacctgaggaagtggggaagcattacaaaccctcctgcagtaagaatggcagagttgggaaggatcttctctcgcaggctgttggcccaactcctcttttctgtgtatgagggcatcttagttttttatggcgttttcaaagcagcatatgaggattcttagcatgcagctaagtgacaacccccatggcctatgatgtaatgtttgctctggactagccatcttgataaataggagtgtatgtatcttaggttctttgtagaacagctatttttttttctcattaaaaaggcctctgaaagccctctcaaaatggacctcacaaaggcaaccagtgtgaatggatgggagctggggtgctgcatgcccaggctggtcatggtgtgtgcagcacccagagagttgcacccaccccttcttcaggtggacatccgacctttacactgtggtcttgcaaaaatcagcgagttagtttggccgccctgtgaagcttcagcattcaaggtcctcttctgttaaaacccaactcgtagccgggcgtggtggctcactcctataatcccagcacttcgggaggccaaggcaggtgcatcacttgaggccaggagttcgagaccagcctggtccacatggcaaaaccccatctgtaccaaaaaatacaaaaaatttgccgctgacttctgtaaaataggtccattcattgcaggatctaaatgccacacctgaattcagaggccttgtttaattaaccccatgtccactttgcctctgcaatgcctttttctttttagcaatatggctctgagcacaaagatttggttggaaatcatgttcgtgttttcagagtttacagcgtcaattgtactgaaaaccacttccagagtctaaagcagctcagatgttatctctgggggaattagtgttcccctcatttagcaacctccataccacaaggtctctgtctgtagttactgggattatccagatacactatcaatgatacaaattcataggagtattaatgcatttctttaaacacaacttgattaagaagcaaatatgttaagcagttttctttttctgctgctaaattacagttagacacttcagtatcttctctttacatgtgtatataaattagtaagaacctgcatccaaagcaatgtagtgtgtgtatgtatctatatatatttattctaactcagcacttcagaagcctttttgagttacaacaatattttagtttgcctcatctgtagaggtaaaatttctatattaccaagctccagaggaatatgatattttacaggcacaattttctggctgtagtccctggggcattcatttgctggcctccatgggatgctgttagaacaattgttagccggcaagagaagaaaggctaccaggacagcatttataattgtagaatgggagccttcttccctctcccctccactttcattttagcatgagataaaaaaatagattggaaatgattgttgcatctcacttcatggaagtaggggcagaagttccctctggatccttttcttgacaagcagtcaagaggaaggtccccatacacatgtacctgtgtgatacttggtagtttctaagaatggtgctacataagcgttgctgttaggctgggatcctattaatgaacgtttgattagttcaggcctcccaatggcaaaggcagacaccgtggagatggacatttactgactccccttctgtgtggcttcggtctccctggctaacaccacacctgtgcgtactgcgctcggcccactttgctgcagaaacgtagcaagcgtttcatgtcagggctacagctgagagcaaaaactgcaaaaaaaaaaaaaaatgtctcattgaatgccagttgtctgatacaaatgcagtgtcttttaagtgacagaaacacacctaaatacctgcaactcaagctcgctagcattttttttttgagtacttgagataaaatccaaaacccaccctctaattttgtgctgtatttatatatatgtacataaatgtatatatagagaaatgttgagttcttctggattctgaatgtaaataattcttgtaaattgggactctgcccacctgtttctcccttttccctcttcccttcagctctatttattcttttcttgactttcccatatggggcatcttatgacttttttttttttttttttttaagaaaagtatggaaaacttttcatttagaaaagtatttgttcctgtattttagaattcagttttgcatctttgctgtagaattcctgttttgtgttaatgttttttactatgtcttattgtgttgtgtgcaatgcattgtactggggggatgcacttgagtgccatttctgatactgtcattgtatgactgctgatgctcgtttatgttgttctttggaagctatagtgagcctgatgttttcacattttaaaaaatgcttcctgagacttctttaagctcctctaacttcttcagtgcatttgggatcaaacttagctcttagatcagcaaacctgacttgcttctacttttgcaatttttcaggccttaccatatttcttatctctgtcttcccacctgataggaaaatcttgcagatttgaaacagtggtttctggcctgctgctgcagcaaattccctatgtttatttaagaagtcgggcctatgcttttaacctacaaatgatgagtaatttacttgcaatgaacacaggtagcctgctgctgtttataacctgttgaggatatttatagcaggcaggaggcaggcctagtgtgttattgacaggtgactttagagaatgtacattggccgggtgcggtggctcacgcctgtaatcccagcactttgggaggccgaggcgggcggatcatgaggtcaggagattgagaccatctcctggctaacacggtgaaaccccgtctctactaaaaatacaaaaaaaaaaaaaacttagccaggcgtggtggcgggtgcctgtagtcccagctactcaggaggctgaggcaggagaatggcatgaacctgggaggcagagcttgcagtgagcccagatcgcgccactgcactccagcctgggcaacagaccgagactccgtctcgaaaaaaaaaaaagagagagaatgtacattaaggaacaattgtcctccaaaagagagccaagcaactgctctggagcctcctaggctgactctgctggagggtgagacaagcagattcccattgcagcactggtccctggggtaccctgaacggctgtgctctccacccttgtatcggtgagtggatcttgtctacatcagccgtaagcctagaagcagagcgggatcgaggcgtttttaataattcgagttgggaagacccggatggttcatcaaaatgatggtgttgagcacccgggaggcagacattgggtatttgttcacaattttgcacctgtaagaaaatgttcctttataactttcaaggattgccgtgagcgtctttggggccttttcattcatgtacaagtttcattcattactattcaacttggtagacttggtgaaaaatgtaaaagcattctgtatttggatcagtcttgggaactaaatttgtcgtgaattggggcctgtcacagattgcctccagtgtgcatcctccacgcagaccctccttgctcagtctccctctggcgcccatggggaagccgtgctgtggttggcagtgcggccatctgggctgccgcaacgtggcagggcaccgtccagcaagactgccccttagtgcagggctaagcaaggaaaagaagaagcccaaaaaggcgggttctttttgatacttgtaattcaggcgtcctccagagtgaaggccactctgcaggcccctggtgagaacctgtctggcttttccactgcgggcccctaaccagtaccctgcccttgtggcccatttgtgcctgggcagatgtttctggccagcagacactgaaggcctttttgctgtgacagtatttatggcactgaagaggataaagaagcttgagccctctttctgactcccactttatggggcagagagagctttttttctacatagcacattgcagtctcaccgctatcagaaaaatatcctgttcatggtttatactgaatttgcaaactactgatatgatttttcaataaccacttgtatcttccatcatccatgagaggtgggaagaggtacactgtatctctgcaataaaactttggccaggttctacctcctctgagcaaaggatacttttctatgtaggtgtagatggttctcctttactaatctgacatggtgcatctggagacaacatctgatgggatccaaagacaacttgaaacaaaggtggatgtcagctcttggtgtgttttcatttggttctcttttttaaatctcccttttgttatcgctcctgttgtagcgtgtccatcagtgtgtgaagggtgcgccctgttccaatgatactgcattgctgcatccagcctttcgtgggagcacggtaccaagcgtccggaattgattatcccaatcatttttgatatgtaactgaaaaatttggtctcatgcaataaaaatgtactggctgcattttagcaaggtttatttactcttgcaagtaaaaacgatcaaccgtgaagcgtaacaaattctgtatttagtttttttttctgttgtggtggtttttgttttgttttttgtttttgtaagattctaaataaattaaatacgagtca

SEQ ID NO: 30203 - DNA, 2196 bp, Homo sapiens
  source 1..2196: mol_type = unassigned DNA
atggtggagccagggcaagatttactgcttgctgctttgagtgagagtggaattagtccgaatgacctctttgatattgatggtggagatgcagggcttgcaactccaatgcctaccccgtcagttcagcagtcagtgccacttagtgcattagaactaggtttggagaccgaagcagcagttcctgttaaacaagaaccagagactgtacctactccagcactattaaatgtgaggcagcctccatctactacaacatttgtgctgaatcaaataaatcatcttccacccttgggatctacaattgtaatgactaaaacaccacctgtaacaaccaacaggcaaaccatcactttaactaagtttatccagactactgcaagcacacgcccgtcagtctcagcaccaacagtacgaaatgccatgacctctgcaccttcaaaagaccaagttcagcttaaagatctactgaaaaataatagtcttaatgaactgatgaaactaaagccacctgctaatattgctcagccagtagcaacagcagctactgatgtaagcaatggtacagtaaagaaagagtcttctaataaagaaggagctagaatgtggataaacgacatgaagatgaggagtttttccccaaccatgaaggttcctgttgtaaaagaagatgatgaaccagaggaagaagatgaagaagaaatgggtcatgcagaaacctatgcagaatacatgccaataaaattaaaaattggcctacgtcatccagatgctgtagtggaaaccagctctttatccagtgttactcctcctgatgtttggtacaaaacatccatttctgaggaaaccattgataatggctggttatcagcattgcagcttgaggcaattacatatgcagcccagcaacatgaaactttcctacctaatggagatcgtgctggcttcttaataggtgatggtgccggtgtaggaaaaggaaggacgatagcaggaatcatctatgaaaattatttgttgagtagaaaacgagcattgtggtttagtgtttcaaatgacttaaagtatgatgctgaaagagatttaagggatattggagcaaaaaacattttggttcattcgttaaataagtttaaatacggaaaaatttcttccaaacataatgggagtgtgaaaaagggtgttatttttgctacttactcttcacttattggtgaaagccagtctggcggcaagtataaaactaggttaaaacaacttctgcattggtgcggtgatgacttcgatggagtgatagtgtttgatgagtgtcataaagccaaaaacttatgtcctgttggttcttcaaagccaaccaagacaggcttagcagttttagagcttcagaacaaattgccaaaagccagagttgtttatgctagtgcaactggtgcttctgaaccacgcaacatggcctatatgaaccgtcttggcatatggggtgagggtactccatttagagaattcagtgattttattcaagcagtagaacggagaggagttggtgccatggaaatagttgctatggatatgaagcttagaggaatgtacattgctcgacaactgagctttactggagtgaccttcaaaattgaggaagttcttctttctcagagctacgttaaaatgtataacaaagctgtcaagctgtgggtcatcgccagagagcggtttcagcaagctgcagatctgattgatgctgagcaacgaatgaagaagtccatgtggggtcagttctggtctgctcaccagaggttcttcaaatacttatgcatagcatccaaagttaaaagggttgtgcaactagctcgagaggaaatcaagaatggaaaatgtgttgtaattggtctgcagtctacaggagaagctagaacattagaagctttggaagagggcgggggagaattgaatgattttgtttcaactgccaaaggtgtgttgcagtcactcattgaaaaacattttcctgctccagacaggaaaaaactttatagtttactaggaatcgatttgacagctccaagtaacaacagttcgccaagagatagtccttgtaaagaaaataaaataaagaagcggaaaggtgaagaaataactcgagaagccaaaaaagcacgaaaaatgagtctaatgaggatgatgaaaatggtaagttca

SEQ ID NO: 30204 - DNA, 2196 bp, Homo sapiens
  source 1..2196: mol_type = unassigned DNA
ctagaagaactcgaccagtgagcaggcgaggaaggggcgggagccggggtcccggtagcttctagtaggttccagaaggcggcgcgtgcggttgggaacgcggagcggacggattcgattcaacggggttccggaccgcgctgcgctatggagcaggtcaatgagctgaaggagaaaggcaacaaggccctgagcgtgggtaacatcgatgatgccttacagtgctactccgaagctattaagctggatccccacaaccacgtgctgtacagcaaccgttctgctgcctatgccaagaaaggagactaccagaaggcttatgaggatggctgcaagactgtcgacctaaagcctgactggggcaagggctattcacgaaaagcagcagctctagagttcttaaaccgctttgaagaagccaagcgaacctatgaggagggcttaaaacacgaggcaaataaccctcaactgaaagagggtttacagaatatggaggccaggttggcagagagaaaattcatgaaccctttcaacatgcctaatctgtatcagaagttggagagtgatcccaggacaaggacactactcagtgatcctacctaccgggagctgatagagcagctacgaaacaagccttctgacctgggcacgaaactacaagatccccggatcatgaccactctcagcgtcctccttggggtcgatctgggcagtatggatgaggaggaagagattgcaacacctccaccaccaccccctcccaaaaaggagaccaagccagagccaatggaagaagatcttccagagaataagaagcaggcactgaaagaaaaagagctggggaacgatgcctacaagaagaaagactttgacacagccttgaagcattacgacaaagccaaggagctggaccccactaacatgacttacattaccaatcaagcagcggtatactttgaaaagggcgactacaataagtgccgggagctttgtgagaaggccattgaagtggggagagaaaaccgagaagactatcgacagattgccaaagcatatgctcgaattggcaactcctacttcaaagaagaaaagtacaaggatgccatccatttctataacaagtctctggcagagcaccgaaccccagatgtgctcaagaaatgccagcaggcagagaaaatcctgaaggagcaagagcggctggcctacataaaccccgacctggctttggaggagaagaacaaaggcaacgagtgttttcagaaaggggactatccccaggccatgaagcattatacagaagccatcaaaaggaacccgaaagatgccaaattatacagcaatcgagctgcctgctacaccaaactcctggagttccagctggcactcaaggactgtgaggaatgtatccagctggagccgaccttcatcaagggttatacacggaaagccgctgcgctggaagcgatgaaggactacaccaaagccatggatgtgtaccagaaggcgctagacctggactccagctgtaaggaggcggcagacggctaccagcgctgtatgatggcgcagtacaaccggcacgacagccccgaagatgtgaagcgacgagccatggccgaccctgaggtgcagcagatcatgagtgacccagccatgcgccttatcctggaacagatgcagaaggacccccaggcactcagcgaacacttaaagaatcctgtaatagcacagaagatccagaagctgatggatgtgggtctgattgcaattcggtgatgacttgttcatccccccttcccttcgccctcatgtggaaagaggagctgggaccgcggcgagcagcacggagcggaagggagagcaggggagagaaggcctcatctctctatatttatacataaccccggggaagacacagagactcgtacctgcgctgtttgtgccgccgctgcctctgggccctcccagcacacgcatggtctcttcaccgctgccctcgagttccatgtctctttcccctgcccctagttgctgtctcggctgctctcccatagttggttttttttttatttggggcagtgggcatgttatggggaggggagggggttcttccagcctcaggtcccagctgtctcacgttgtttattctgcgtccccttctccaataaaacaagccagttgggcgtggttata

SEQ ID NO: 30205 - DNA, 5218 bp, Homo sapiens
  source 1..5218: mol_type = unassigned DNA
gtggccgacagatggcgcctgcgcgttccattcgcctccaagtcgccgaagagcgaacaccccaaacaatcccgaagcgccaccaaaaaaaaaaaaaaaaaaaaaaaaaaaaaaaaaaaaaaaaagaaaaaaaaccccgccggatccgaccgccactttcaaaaccccccaccgctctagaaccgcgggagcttccgtccctgagtagaattcgagggtgtaaagaagaggaaggggaaaaatatcttgtaccagcccaggggtgaagaagcccccggcctgagaaagaaggaggagtgggggaggcgaacagtctcgttgctgcctctgtgtacgctgaggggggaggtggccaccgagtactaaattcacttgggaataaaagaaaaacataagaaaattataagagaaaggaattgtcttagaagaaagaaggcaagccaccattttacccacgtaaatatatgaatatatttctgacattgaggtgttccagaagatgataaagaaatgatagcagctccagaaataccaactgattttaatctactacaggagtcagaaacacatttttcttctgacacagattttgaagatatcgaaggaaaaaaccaaaagcaaggcaaaggcaaaacttgtaaaaaaggcaaaaagggcccagcagaaaagggcaaaggtggaaatggaggaggaaaacctccttctggtccaaaccgaatgaatggtcatcaccaacagaatggagtggaaaacatgatgttgtttgaagttgttaaaatgggcaagagtgctatgcagtcggtggtagatgattggatagaatcatacaagcatgaccgagatatagcacttcttgaccttatcaacttttttattcagtgttcaggctgtaaaggagttgtcacagcagaaatgtttagacatatgcagaactctgagataattcgaaaaatgactgaagaattcgatgaggatagtggagattatccacttaccatggctggtcctcagtggaagaagttcaaatccagtttttgtgaattcattggcgtgttagtacggcaatgtcaatatagtatcatatatgatgagtatatgatggatacagtcatttcacttcttacaggattgtctgactcacaagtcagagcatttcgacatacaagcaccctggcagctatgaagttgatgacagctttggtgaatgtggcactaaatcttagcattaatatggataatacacaaagacaatatgaagcagaacggaataaaatgattggaaaacgagccaatgagaggctagaactcctgctacaaaagcggaaagagcttcaggaaaatcaagatgaaatagaaaatatgatgaatgcaatatttaaaggagtgtttgtacatagataccgtgatgcgatagctgaaattcgagctatttgcattgaagagattggcatttggatgaagatgtatagtgatgcctttcttaatgacagttatttaaaatatgttggttggactatgcatgataagcaaggtgaagtaagactcaaatgtcttactgctctacaagggctttattataacaaagagcttaattccaaactggaactttttaccagtcggttcaaggatagaattgtgtctatgacccttgacaaagaatatgatgttgcagtacaagcaataaaattactcactcttgttttacagagtagtgaagaagttctcactgcagaagattgtgaaaatgtctatcatctggtttattcagctcaccggccagtagcagtagcagctggagaatttctctacaaaaagctcttcagtcgtagagatccagaggaggatggaatgatgaaaagaagaggaagacaaggtccaaatgccaaccttgttaagacattggtttttttctttctagaaagtgagttacatgagcatgcagcataccttgtggatagcatgtgggactgtgctactgagctgctgaaagactgggaatgtatgaatagcttgttactggaagagccacttagtggagaggaagcactaacagataggcaagagagtgctctgattgaaataatgctttgtaccattagacaagcggctgaatgtcatcctcccgtgggaagagggacaggaaaaagggtgcttacagcaaaggagaagaagacacagttggatgataggacaaaaatcactgagctttttgccgtggcccttcctcagttattagcaaaatactctgtagatgcagaaaaggtgactaacttgttgcagttgcctcagtactttgatttggaaatatataccactggacgattagaaaagcatttggatgccttattgcgacagatccggaatattgtagagaagcacacagatacagatgttttggaagcatgttctaaaacttaccatgcactctgtaatgaagagttcacaatcttcaacagagtagatatttcaagaagtcaactgatagatgaattggcagataaatttaaccggcttcttgaagattttctgcaagagggtgaagaacctgatgaagatgatgcatatcaggtattgtcaacattgaagaggatcactgcttttcataatgcccatgacctttcaaagtgggatttatttgcttgtaattacaaactcttgaaaactggaatcgaaaatggagacatgcctgagcagattgttattcacgcactgcagtgtactcactatgtaatcctttggcaacttgctaagataactgaaagcagctctacaaaggaggacttgctgcgtttaaagaaacaaatgagagtattttgtcagatatgtcaacattacctgaccaacgtgaatactactgttaaggaacaggccttcactattctgtgtgatattttgatgatcttcagccatcagattatgtcaggagggcgtgacatgttagagccattagtgtatacccctgattcttcattgcagtctgagttgctcagctttattttggatcatgtcttcattgaacaggatgatgataataatagtgcagatggtcagcaagaggatgaagccagtaaaattgaagctctgcacaagagaagaaatttacttgcagcattttgtaagctaattgtatatactgtggtggagatgaatacagctgcagatatcttcaaacagtatatgaagtattataatgactatggagatatcatcaaagaaacaatgagtaaaacaaggcagatagacaaaattcagtgtgctaagacccttattctcagtctgcaacagctttttaatgaaatgatacaagaaaatggctataattttgatagatcatcctctacatttagtggcataaaagaacttgctcgacgttttgctttaacttttggacttgatcagttgaaaacaagagaagccattgccatgctacacaaagatggcatagaatttgcttttaaagagcctaatccgcaaggggagagccatccacctttaaatttggcatttcttgatattctgagtgaattttcttctaaactacttcgacaagacaaaagaacagtgtatgtttacttggaaaagttcatgacctttcagatgtcactccgaagagaggatgtgtggcttccactgatgtcttaccgaaattctttgctagctggtggtgatgatgacaccatgtcagtcattagtggaatcagcagccgggggtcaacagtacggagtaaaaaatcaaaaccatctacaggaaaacggaaagtggttgagggcatgcagctttcactcactgaagaaagtagtagtagtgacagtatgtggttaagcagagaacaaacactgcacacccctgttatgatgcagacaccacaactcacctccactattatgagagagcccaaaagattacggcctgaggatagcttcatgagtgtttatccaatgcagactgaacatcatcaaacacctcttgattataacacgcaggtaacatggatgttagctcaaagacaacaagaggaagcaaggcaacagcaggagagagcagcaatgagctatgttaaactgcgaactaatcttcagcatgccattcggcgtggcacaagcctaatggaagatgatgaagagccaattgtggaagatgttatgatgtcctcagaagggaggattgaggatcttaatgagggaatggattttgacaccatggatatagatttgccaccatcaaagaacagacgagagagaacagaactgaagcctgatttctttgatccagcttcaattatggatgaatcagttcttggagtgtcaatgttttaataccagtacacaattaaatctgtggtgaagtcattttctaagtggaagaggaaattttaaagtgtggtagatacagtgaaattctgtacagatttttctctaaggagaatatgacatgcttatgcttaccaagatcaagtgcattgaggggcagttttgtttgcctgaataaacgtaaaggacaagtaaacaatttgatgataagctacagtttttcttagaaagtaaatattttatttatgcgctgttagttggcttttgaatcgattatttcatgcttttttttaaaaaaaaaaaaaaacaaaataacaatctgaagaggcatttggtacagatatgaattctcttacatttatttactggttgtactaaataatgatgacctctgctggatttctgtttacatccagaaaacaatgttaaggatgtatttattcccctaccctgaagaaagtgtaggatagaattgtttttagcattctaaatttaaatgcttaaaacgtcaatcaacaaaactttgttttaaatattgtaattgtggagaaaagtaaacttataagcagaacttttacaattttttcatctaaaagtattttaagatatttttaaaatccaagagcttctctatacttttcagaaatatccagatgcagtgaactgccagaaggtaaccagtctcaaacatgcttatcccattatcaaccctgaaagtttgcttgtcctttaagataaaaatgtaatgttgtgatattccttccagtaatgccactgtattttgtctccaaataaaagaagcttattgtagtatgtttgcagaaaaattctaaacaaaaattatacagcttattagagtgtgggaatagggatctaaattttaaataaaattatatatatatataaa

SEQ ID NO: 30206 - DNA, 3838 bp, Homo sapiens
  source 1..3838: mol_type = unassigned DNA
aggcgaacagtctcgttgctgcctctgtgtacgctgaggggggaggaattgtcttagaagaaagaaggcaagccaccattttacccacgtaaatatatgaatatatttctgacattgaggtgttccagaagatgataaagaaatgatagcagctccagaaataccaactgattttaatctactacaggagtcagaaacacatttttcttctgacacagattttgaagatatcgaaggaaaaaaccaaaagcaaggcaaaggcaaaacttgtaaaaaaggcaaaaagggcccagcagaaaagggcaaaggtggaaatggaggaggaaaacctccttctggtccaaaccgaatgaatggtcatcaccaacagaatggagtggaaaacatgatgttgtttgaagttgttaaaatgggcaagagtgctatgcagtcggtggtagatgattggatagaatcatacaagcatgaccgagatatagcacttcttgaccttatcaacttttttattcagtgttcaggctgtaaaggagttgtcacagcagaaatgtttagacatatgcagaactctgagataattcgaaaaatgactgaagaattcgatgaggatagtggagattatccacttaccatggctggtcctcagtggaagaagttcaaatccagtttttgtgaattcattggcgtgttagtacggcaatgtcaatatagtatcatatatgatgagtatatgatggatacagtcatttcacttcttacaggattgtctgactcacaagtcagagcatttcgacatacaagcaccctggcagctatgaagttgatgacagctttggtgaatgtggcactaaatcttagcattaatatggataatacacaaagacaatatgaagcagaacggaataaaatgattggaaaacgagccaatgagaggctagaactcctgctacaaaagcggaaagagcttcaggaaaatcaagatgaaatagaaaatatgatgaatgcaatatttaaaggagtgtttgtacatagataccgtgatgcgatagctgaaattcgagctatttgcattgaagagattggcatttggatgaagatgtatagtgatgcctttcttaatgacagttatttaaaatatgttggttggactatgcatgataagcaaggtgaagtaagactcaaatgtcttactgctctacaagggctttattataacaaagagcttaattccaaactggaactttttaccagtcggttcaaggatagaattgtgtctatgacccttgacaaagaatatgatgttgcagtacaagcaataaaattactcactcttgttttacagagtagtgaagaagttctcactgcagaagattgtgaaaatgtctatcatctggtttattcagctcaccggccagtagcagtagcagctggagaatttctctacaaaaagctcttcagtcgtagagatccagaggaggatggaatgatgaaaagaagaggaagacaaggtccaaatgccaaccttgttaagacattggtttttttctttctagaaagtgagttacatgagcatgcagcataccttgtggatagcatgtgggactgtgctactgagctgctgaaagactgggaatgtatgaatagcttgttactggaagagccacttagtggagaggaagcactaacagataggcaagagagtgctctgattgaaataatgctttgtaccattagacaagcggctgaatgtcatcctcccgtgggaagagggacaggaaaaagggtgcttacagcaaaggagaagaagacacagttggatgataggacaaaaatcactgagctttttgccgtggcccttcctcagttattagcaaaatactctgtagatgcagaaaaggtgactaacttgttgcagttgcctcagtactttgatttggaaatatataccactggacgattagaaaagcatttggatgccttattgcgacagatccggaatattgtagagaagcacacagatacagatgttttggaagcatgttctaaaacttaccatgcactctgtaatgaagagttcacaatcttcaacagagtagatatttcaagaagtcaactgatagatgaattggcagataaatttaaccggcttcttgaagattttctgcaagagggtgaagaacctgatgaagatgatgcatatcaggtattgtcaacattgaagaggatcactgcttttcataatgcccatgacctttcaaagtgggatttatttgcttgtaattacaaactcttgaaaactggaatcgaaaatggagacatgcctgagcagattgttattcacgcactgcagtgtactcactatgtaatcctttggcaacttgctaagataactgaaagcagctctacaaaggaggacttgctgcgtttaaagaaacaaatgagagtattttgtcagatatgtcaacattacctgaccaacgtgaatactactgttaaggaacaggccttcactattctgtgtgatattttgatgatcttcagccatcagattatgtcaggagggcgtgacatgttagagccattagtgtatacccctgattcttcattgcagtctgagttgctcagctttattttggatcatgtcttcattgaacaggatgatgataataatagtgcagatggtcagcaagaggatgaagccagtaaaattgaagctctgcacaagagaagaaatttacttgcagcattttgtaagctaattgtatatactgtggtggagatgaatacagctgcagatatcttcaaacagtatatgaagtattataatgactatggagatatcatcaaagaaacaatgagtaaaacaaggcagatagacaaaattcagtgtgctaagacccttattctcagtctgcaacagctttttaatgaaatgatacaagaaaatggctataattttgatagatcatcctctacatttagtggcataaaagaacttgctcgacgttttgctttaacttttggacttgatcagttgaaaacaagagaagccattgccatgctacacaaagatggcatagaatttgcttttaaagagcctaatccgcaaggggagagccatccacctttaaatttggcatttcttgatattctgagtgaattttcttctaaactacttcgacaagacaaaagaacagtgtatgtttacttggaaaagttcatgacctttcagatgtcactccgaagagaggatgtgtggcttccactgatgtcttaccgaaattctttgctagctggtggtgatgatgacaccatgtcagtcattagtggaatcagcagccgggggtcaacagtacggagtaaaaaatcaaaaccatctacaggaaaacggaaagtggttgagggcatgcagctttcactcactgaagaaagtagtagtagtgacagtatgtggttaagcagagaacaaacactgcacacccctgttatgatgcagacaccacaactcacctccactattatgagagagcccaaaagattacggcctgaggatagcttcatgagtgtttatccaatgcagactgaacatcatcaaacacctcttgattataatcggcgtggcacaagcctaatggaagatgatgaagagccaattgtggaagatgttatgatgtcctcagaagggaggattgaggatcttaatgagggaatggattttgacaccatggatatagatttgccaccatcaaagaacagacgagagagaacagaactgaagcctgatttctttgatccagcttcaattatggatgaatcagttcttggagtgtcaatgttttaa

SEQ ID NO: 30207 - DNA, 4281 bp, Homo sapiens
  source 1..4281: mol_type = unassigned DNA
ttcatgtgacgggcccctctgcttctcccccgccccatcatctccagcgcgtggtgggggaactgctggggaaggcgattggcatcgatctctccatcccttccgaggcccgacttcggtggccaccgagtactaaattcacttgggaataaaagaaaaacataagaaaattataagagaaaggaattgtcttagaagaaagaaggcaagccaccattttacccacgtaaatatatgaatatatttctgacattgaggtgttccagaagatgataaagaaatgatagcagctccagaaataccaactgattttaatctactacaggagtcagaaacacatttttcttctgacacagattttgaagatatcgaaggaaaaaaccaaaagcaaggcaaaggcaaaacttgtaaaaaaggcaaaaagggcccagcagaaaagggcaaaggtggaaatggaggaggaaaacctccttctggtccaaaccgaatgaatggtcatcaccaacagaatggagtggaaaacatgatgttgtttgaagttgttaaaatgggcaagagtgctatgcagtcggtggtagatgattggatagaatcatacaagcatgaccgagatatagcacttcttgaccttatcaacttttttattcagtgttcaggctgtaaaggagttgtcacagcagaaatgtttagacatatgcagaactctgagataattcgaaaaatgactgaagaattcgatgaggatagtggagattatccacttaccatggctggtcctcagtggaagaagttcaaatccagtttttgtgaattcattggcgtgttagtacggcaatgtcaatatagtatcatatatgatgagtatatgatggatacagtcatttcacttcttacaggattgtctgactcacaagtcagagcatttcgacatacaagcaccctggcagctatgaagttgatgacagctttggtgaatgtggcactaaatcttagcattaatatggataatacacaaagacaatatgaagcagaacggaataaaatgattggaaaacgagccaatgagaggctagaactcctgctacaaaagcggaaagagcttcaggaaaatcaagatgaaatagaaaatatgatgaatgcaatatttaaaggagtgtttgtacatagataccgtgatgcgatagctgaaattcgagctatttgcattgaagagattggcatttggatgaagatgtatagtgatgcctttcttaatgacagttatttaaaatatgttggttggactatgcatgataagcaaggtgaagtaagactcaaatgtcttactgctctacaagggctttattataacaaagagcttaattccaaactggaactttttaccagtcggttcaaggatagaattgtgtctatgacccttgacaaagaatatgatgttgcagtacaagcaataaaattactcactcttgttttacagagtagtgaagaagttctcactgcagaagattgtgaaaatgtctatcatctggtttattcagctcaccggccagtagcagtagcagctggagaatttctctacaaaaagctcttcagtcgtagagatccagaggaggatggaatgatgaaaagaagaggaagacaaggtccaaatgccaaccttgttaagacattggtttttttctttctagaaagtgagttacatgagcatgcagcataccttgtggatagcatgtgggactgtgctactgagctgctgaaagactgggaatgtatgaatagcttgttactggaagagccacttagtggagaggaagcactaacagataggcaagagagtgctctgattgaaataatgctttgtaccattagacaagcggctgaatgtcatcctcccgtgggaagagggacaggaaaaagggtgcttacagcaaaggagaagaagacacagttggatgataggacaaaaatcactgagctttttgccgtggcccttcctcagttattagcaaaatactctgtagatgcagaaaaggtgactaacttgttgcagttgcctcagtactttgatttggaaatatataccactggacgattagaaaagcatttggatgccttattgcgacagatccggaatattgtagagaagcacacagatacagatgttttggaagcatgttctaaaacttaccatgcactctgtaatgaagagttcacaatcttcaacagagtagatatttcaagaagtcaactgatagatgaattggcagataaatttaaccggcttcttgaagattttctgcaagagggtgaagaacctgatgaagatgatgcatatcaggtattgtcaacattgaagaggatcactgcttttcataatgcccatgacctttcaaagtgggatttatttgcttgtaattacaaactcttgaaaactggaatcgaaaatggagacatgcctgagcagattgttattcacgcactgcagtgtactcactatgtaatcctttggcaacttgctaagataactgaaagcagctctacaaaggaggacttgctgcgtttaaagaaacaaatgagagtattttgtcagatatgtcaacattacctgaccaacgtgaatactactgttaaggaacaggccttcactattctgtgtgatattttgatgatcttcagccatcagattatgtcaggagggcgtgacatgttagagccattagtgtatacccctgattcttcattgcagtctgagttgctcagctttattttggatcatgtcttcattgaacaggatgatgataataatagtgcagatggtcagcaagaggatgaagccagtaaaattgaagctctgcacaagagaagaaatttacttgcagcattttgtaagctaattgtatatactgtggtggagatgaatacagctgcagatatcttcaaacagtatatgaagtattataatgactatggagatatcatcaaagaaacaatgagtaaaacaaggcagatagacaaaattcagtgtgctaagacccttattctcagtctgcaacagctttttaatgaaatgatacaagaaaatggctataattttgatagatcatcctctacatttagtggcataaaagaacttgctcgacgttttgctttaacttttggacttgatcagttgaaaacaagagaagccattgccatgctacacaaagatggcatagaatttgcttttaaagagcctaatccgcaaggggagagccatccacctttaaatttggcatttcttgatattctgagtgaattttcttctaaactacttcgacaagacaaaagaacagtgtatgtttacttggaaaagttcatgacctttcagatgtcactccgaagagaggatgtgtggcttccactgatgtcttaccgaaattctttgctagctggtggtgatgatgacaccatgtcagtcattagtggaatcagcagccgggggtcaacagtacggagtaaaaaatcaaaaccatctacaggaaaacggaaagtggttgagggcatgcagctttcactcactgaagaaagtagtagtagtgacagtatgtggttaagcagagaacaaacactgcacacccctgttatgatgcagacaccacaactcacctccactattatgagagagcccaaaagattacggcctgaggatagcttcatgagtgtttatccaatgcagactgaacatcatcaaacacctcttgattataatcggcgtggcacaagcctaatggaagatgatgaagagccaattgtggaagatgttatgatgtcctcagaagggaggattgaggatcttaatgagggaatggattttgacaccatggatatagatttgccaccatcaaagaacagacgagagagaacagaactgaagcctgatttctttgatccagcttcaattatggatgaatcagttcttggagtgtcaatgttttaataccagtacacaattaaatctgtggtgaagtcattttctaagtggaagaggaaattttaaagtgtggtagatacagtgaaattctgtacagatttttctctaaggagaatatgacatgcttatgcttaccaagatcaagtgcattgaggggcagttttgtttgcctgaataaacgtaaaggacaagtaaacaatttgatgataagctacagtttttcttagaaagtaaatattttatttatgcgctgttagttggcttttgaatcgattatttcatgcttttttttaaaaaaaaaaaaaaacaaa

SEQ ID NO: 30208 - DNA, 4393 bp, Homo sapiens
  source 1..4393: mol_type = unassigned DNA
attcatgtgacgggcccctctgcttctcccccgccccatcatctccagcgcgtggtgggggaactgctggggaaggcgattggcatcgatctctccatcccttccgaggcccgacttcggtggccaccgagtactaaattcacttgggaataaaagaaaaacataagaaaattataagagaaaggaattgtcttagaagaaagaaggcaagccaccattttacccacgtaaatatatgaatatatttctgacattgaggtgttccagaagatgataaagaaatgatagcagctccagaaataccaactgattttaatctactacaggagtcagaaacacatttttcttctgacacagattttgaagatatcgaaggaaaaaaccaaaagcaaggcaaaggcaaaacttgtaaaaaaggcaaaaagggcccagcagaaaagggcaaaggtggaaatggaggaggaaaacctccttctggtccaaaccgaatgaatggtcatcaccaacagaatggagtggaaaacatgatgttgtttgaagttgttaaaatgggcaagagtgctatgcagtcggtggtagatgattggatagaatcatacaagcatgaccgagatatagcacttcttgaccttatcaacttttttattcagtgttcaggctgtaaaggagttgtcacagcagaaatgtttagacatatgcagaactctgagataattcgaaaaatgactgaagaattcgatgaggatagtggagattatccacttaccatggctggtcctcagtggaagaagttcaaatccagtttttgtgaattcattggcgtgttagtacggcaatgtcaatatagtatcatatatgatgagtatatgatggatacagtcatttcacttcttacaggattgtctgactcacaagtcagagcatttcgacatacaagcaccctggcagctatgaagttgatgacagctttggtgaatgtggcactaaatcttagcattaatatggataatacacaaagacaatatgaagcagaacggaataaaatgattggaaaacgagccaatgagaggctagaactcctgctacaaaagcggaaagagcttcaggaaaatcaagatgaaatagaaaatatgatgaatgcaatatttaaaggagtgtttgtacatagataccgtgatgcgatagctgaaattcgagctatttgcattgaagagattggcatttggatgaagatgtatagtgatgcctttcttaatgacagttatttaaaatatgttggttggactatgcatgataagcaaggtgaagtaagactcaaatgtcttactgctctacaagggctttattataacaaagagcttaattccaaactggaactttttaccagtcggttcaaggatagaattgtgtctatgacccttgacaaagaatatgatgttgcagtacaagcaataaaattactcactcttgttttacagagtagtgaagaagttctcactgcagaagattgtgaaaatgtctatcatctggtttattcagctcaccggccagtagcagtagcagctggagaatttctctacaaaaagctcttcagtcgtagagatccagaggaggatggaatgatgaaaagaagaggaagacaaggtccaaatgccaaccttgttaagacattggtttttttctttctagaaagtgagttacatgagcatgcagcataccttgtggatagcatgtgggactgtgctactgagctgctgaaagactgggaatgtatgaatagcttgttactggaagagccacttagtggagaggaagcactaacagataggcaagagagtgctctgattgaaataatgctttgtaccattagacaagcggctgaatgtcatcctcccgtgggaagagggacaggaaaaagggtgcttacagcaaaggagaagaagacacagttggatgataggacaaaaatcactgagctttttgccgtggcccttcctcagttattagcaaaatactctgtagatgcagaaaaggtgactaacttgttgcagttgcctcagtactttgatttggaaatatataccactggacgattagaaaagcatttggatgccttattgcgacagatccggaatattgtagagaagcacacagatacagatgttttggaagcatgttctaaaacttaccatgcactctgtaatgaagagttcacaatcttcaacagagtagatatttcaagaagtcaactgatagatgaattggcagataaatttaaccggcttcttgaagattttctgcaagagggtgaagaacctgatgaagatgatgcatatcaggtattgtcaacattgaagaggatcactgcttttcataatgcccatgacctttcaaagtgggatttatttgcttgtaattacaaactcttgaaaactggaatcgaaaatggagacatgcctgagcagattgttattcacgcactgcagtgtactcactatgtaatcctttggcaacttgctaagataactgaaagcagctctacaaaggaggacttgctgcgtttaaagaaacaaatgagagtattttgtcagatatgtcaacattacctgaccaacgtgaatactactgttaaggaacaggccttcactattctgtgtgatattttgatgatcttcagccatcagattatgtcaggagggcgtgacatgttagagccattagtgtatacccctgattcttcattgcagtctgagttgctcagctttattttggatcatgtcttcattgaacaggatgatgataataatagtgcagatggtcagcaagaggatgaagccagtaaaattgaagctctgcacaagagaagaaatttacttgcagcattttgtaagctaattgtatatactgtggtggagatgaatacagctgcagatatcttcaaacagtatatgaagtattataatgactatggagatatcatcaaagaaacaatgagtaaaacaaggcagatagacaaaattcagtgtgctaagacccttattctcagtctgcaacagctttttaatgaaatgatacaagaaaatggctataattttgatagatcatcctctacatttagtggcataaaagaacttgctcgacgttttgctttaacttttggacttgatcagttgaaaacaagagaagccattgccatgctacacaaagatggcatagaatttgcttttaaagagcctaatccgcaaggggagagccatccacctttaaatttggcatttcttgatattctgagtgaattttcttctaaactacttcgacaagacaaaagaacagtgtatgtttacttggaaaagttcatgacctttcagatgtcactccgaagagaggatgtgtggcttccactgatgtcttaccgaaattctttgctagctggtggtgatgatgacaccatgtcagtcattagtggaatcagcagccgggggtcaacagtacggagtaaaaaatcaaaaccatctacaggaaaacggaaagtggttgagggcatgcagctttcactcactgaagaaagtagtagtagtgacagtatgtggttaagcagagaacaaacactgcacacccctgttatgatgcagacaccacaactcacctccactattatgagagagcccaaaagattacggcctgaggatagcttcatgagtgtttatccaatgcagactgaacatcatcaaacacctcttgattataacacgcaggtaacatggatgttagctcaaagacaacaagaggaagcaaggcaacagcaggagagagcagcaatgagctatgttaaactgcgaactaatcttcagcatgccattcggcgtggcacaagcctaatggaagatgatgaagagccaattgtggaagatgttatgatgtcctcagaagggaggattgaggatcttaatgagggaatggattttgacaccatggatatagatttgccaccatcaaagaacagacgagagagaacagaactgaagcctgatttctttgatccagcttcaattatggatgaatcagttcttggagtgtcaatgttttaataccagtacacaattaaatctgtggtgaagtcattttctaagtggaagaggaaattttaaagtgtggtagatacagtgaaattctgtacagatttttctctaaggagaatatgacatgcttatgcttaccaagatcaagtgcattgaggggcagttttgtttgcctgaataaacgtaaaggacaagtaaacaatttgatgataagctacagtttttcttagaaagtaaatattttatttatgcgctgttagttggcttttgaatcgattatttcatgcttttttttaaaaaaaaaaaaaaacaaa

SEQ ID NO: 30209 - DNA, 5991 bp, Homo sapiens
  source 1..5991: mol_type = unassigned DNA
cttcctagagagggaacaacattcatgtgacgggcccctctgcttctcccccgccccatcatctccagcgcgtggtgggggaactgctggggaaggcgattggcatcgatctctccatcccttccgaggcccgacttcggaattgtcttagaagaaagaaggcaagccaccattttacccacgtaaatatatgaatatatttctgacattgaggtgttccagaagatgataaagaaatgatagcagctccagaaataccaactgattttaatctactacaggagtcagaaacacatttttcttctgacacagattttgaagatatcgaaggaaaaaaccaaaagcaaggcaaaggcaaaacttgtaaaaaaggcaaaaagggcccagcagaaaagggcaaaggtggaaatggaggaggaaaacctccttctggtccaaaccgaatgaatggtcatcaccaacagaatggagtggaaaacatgatgttgtttgaagttgttaaaatgggcaagagtgctatgcagtcggtggtagatgattggatagaatcatacaagcatgaccgagatatagcacttcttgaccttatcaacttttttattcagtgttcaggctgtaaaggagttgtcacagcagaaatgtttagacatatgcagaactctgagataattcgaaaaatgactgaagaattcgatgaggatagtggagattatccacttaccatggctggtcctcagtggaagaagttcaaatccagtttttgtgaattcattggcgtgttagtacggcaatgtcaatatagtatcatatatgatgagtatatgatggatacagtcatttcacttcttacaggattgtctgactcacaagtcagagcatttcgacatacaagcaccctggcagctatgaagttgatgacagctttggtgaatgtggcactaaatcttagcattaatatggataatacacaaagacaatatgaagcagaacggaataaaatgattggaaaacgagccaatgagaggctagaactcctgctacaaaagcggaaagagcttcaggaaaatcaagatgaaatagaaaatatgatgaatgcaatatttaaaggagtgtttgtacatagataccgtgatgcgatagctgaaattcgagctatttgcattgaagagattggcatttggatgaagatgtatagtgatgcctttcttaatgacagttatttaaaatatgttggttggactatgcatgataagcaaggtgaagtaagactcaaatgtcttactgctctacaagggctttattataacaaagagcttaattccaaactggaactttttaccagtcggttcaaggatagaattgtgtctatgacccttgacaaagaatatgatgttgcagtacaagcaataaaattactcactcttgttttacagagtagtgaagaagttctcactgcagaagattgtgaaaatgtctatcatctggtttattcagctcaccggccagtagcagtagcagctggagaatttctctacaaaaagctcttcagtcgtagagatccagaggaggatggaatgatgaaaagaagaggaagacaaggtccaaatgccaaccttgttaagacattggtttttttctttctagaaagtgagttacatgagcatgcagcataccttgtggatagcatgtgggactgtgctactgagctgctgaaagactgggaatgtatgaatagcttgttactggaagagccacttagtggagaggaagcactaacagataggcaagagagtgctctgattgaaataatgctttgtaccattagacaagcggctgaatgtcatcctcccgtgggaagagggacaggaaaaagggtgcttacagcaaaggagaagaagacacagttggatgataggacaaaaatcactgagctttttgccgtggcccttcctcagttattagcaaaatactctgtagatgcagaaaaggtgactaacttgttgcagttgcctcagtactttgatttggaaatatataccactggacgattagaaaagcatttggatgccttattgcgacagatccggaatattgtagagaagcacacagatacagatgttttggaagcatgttctaaaacttaccatgcactctgtaatgaagagttcacaatcttcaacagagtagatatttcaagaagtcaactgatagatgaattggcagataaatttaaccggcttcttgaagattttctgcaagagggtgaagaacctgatgaagatgatgcatatcaggtattgtcaacattgaagaggatcactgcttttcataatgcccatgacctttcaaagtgggatttatttgcttgtaattacaaactcttgaaaactggaatcgaaaatggagacatgcctgagcagattgttattcacgcactgcagtgtactcactatgtaatcctttggcaacttgctaagataactgaaagcagctctacaaaggaggacttgctgcgtttaaagaaacaaatgagagtattttgtcagatatgtcaacattacctgaccaacgtgaatactactgttaaggaacaggccttcactattctgtgtgatattttgatgatcttcagccatcagattatgtcaggagggcgtgacatgttagagccattagtgtatacccctgattcttcattgcagtctgagttgctcagctttattttggatcatgtcttcattgaacaggatgatgataataatagtgcagatggtcagcaagaggatgaagccagtaaaattgaagctctgcacaagagaagaaatttacttgcagcattttgtaagctaattgtatatactgtggtggagatgaatacagctgcagatatcttcaaacagtatatgaagtattataatgactatggagatatcatcaaagaaacaatgagtaaaacaaggcagatagacaaaattcagtgtgctaagacccttattctcagtctgcaacagctttttaatgaaatgatacaagaaaatggctataattttgatagatcatcctctacatttagtggcataaaagaacttgctcgacgttttgctttaacttttggacttgatcagttgaaaacaagagaagccattgccatgctacacaaagatggcatagaatttgcttttaaagagcctaatccgcaaggggagagccatccacctttaaatttggcatttcttgatattctgagtgaattttcttctaaactacttcgacaagacaaaagaacagtgtatgtttacttggaaaagttcatgacctttcagatgtcactccgaagagaggatgtgtggcttccactgatgtcttaccgaaattctttgctagctggtggtgatgatgacaccatgtcagtcattagtggaatcagcagccgggggtcaacagtacggagtaaaaaatcaaaaccatctacaggaaaacggaaagtggttgagggcatgcagctttcactcactgaagaaagtagtagtagtgacagtatgtggttaagcagagaacaaacactgcacacccctgttatgatgcagacaccacaactcacctccactattatgagagagcccaaaagattacggcctgaggatagcttcatgagtgtttatccaatgcagactgaacatcatcaaacacctcttgattataatcggcgtggcacaagcctaatggaagatgatgaagagccaattgtggaagatgttatgatgtcctcagaagggaggattgaggatcttaatgagggaatggattttgacaccatggatatagatttgccaccatcaaagaacagacgagagagaacagaactgaagcctgatttctttgatccagcttcaattatggatgaatcagttcttggagtgtcaatgttttaataccagtacacaattaaatctgtggtgaagtcattttctaagtggaagaggaaattttaaagtgtggtagatacagtgaaattctgtacagatttttctctaaggagaatatgacatgcttatgcttaccaagatcaagtgcattgaggggcagttttgtttgcctgaataaacgtaaaggacaagtaaacaatttgatgataagctacagtttttcttagaaagtaaatattttatttatgcgctgttagttggcttttgaatcgattatttcatgcttttttttaaaaaaaaaaaaaaacaaaataacaatctgaagaggcatttggtacagatatgaattctcttacatttatttactggttgtactaaataatgatgacctctgctggatttctgtttacatccagaaaacaatgttaaggatgtatttattcccctaccctgaagaaagtgtaggatagaattgtttttagcattctaaatttaaatgcttaaaacgtcaatcaacaaaactttgttttaaatattgtaattgtggagaaaagtaaacttataagcagaacttttacaattttttcatctaaaagtattttaagatatttttaaaatccaagagcttctctatacttttcagaaatatccagatgcagtgaactgccagaaggtaaccagtctcaaacatgcttatcccattatcaaccctgaaagtttgcttgtcctttaagataaaaatgtaatgttgtgatattccttccagtaatgccactgtattttgtctccaaataaaagaagcttattgtagtatgtttgcagaaaaattctaaacaaaaattatacagcttattagagtgtgggaatagggatctaaattttaaataaaattatatatatatataaattggtgctgattttataattgcgcagtttgtttagttttttcttacttttaaattccaacttaaaattatgaggtttcagaaatatattgaaagtttaacaatgtttaaaaatagaaaagcatgagtgttcatgctttaaaatgatttttaaatttgtattttatattgttttatctatctgtctttgcaagcagtcttcaggttaaagatacttctaacaggttacagtacatttcctctgtatgtaaattagatgggataatagaattcataacccataatattctttgaaagctaagctttaaacttcattttatgtcctttcacaaataaattagtttaaaacagaaagtggctacttgccattttgacatcaactcattttgcgaggcttaggcagctagacatcgtttaaaacaaaatattaacttatattacatgtgtatctatctattgtcagtcgtctctcagttcttgaggtatattattttaatcattccatgccttaatatgcttgcaatacaagaatatcttcagatgggtgaataccaaaaggctttcagtttttagtcagaaatcaagcattgggctgtggtagccaaaaaccataggttagctaaaaagatcatgatacaattattttattaagtcatggttaataacaaatgaatccagacttgtctaacagattttccatcaacaaatattgttatgtgcaaaagtattgcctatgttgttttacacaccactgcattaactagaactgctgagaggactgtatatatgattttaaacctaagttgattttttttctcactcttgaaaggagtacttctttgtgaaagcagttcttacagctttgttttcaaccagctaaaaatgttttatatattactctaacctgttgtcctccacattctattgtcctaattgtactgttttctgatttgtatttatgtcttgagacagtaactttttgaataaaaataaacctacagtatgttgtatgttttctcttgtactcaaagggggagggtggctataaatggtttgcaaatttatatctattatcacatcttttaatgtgtttggggaataatttatagagaataccatcagtttatatttttaataaatcatatgtatttacaatgaaa

SEQ ID NO: 30210 - DNA, 6045 bp, Homo sapiens
  source 1..6045: mol_type = unassigned DNA
gggtggcccaaaatggagaacgcggagcagcgcaagatggaggctccgcttctctgtgtagcagtagatttaggttccttttctccggcaggctcctaagcctaggagagcccgaactggagcgcgtggtgggggaactgctggggaaggcgattggcatcgatctctccatcccttccgaggcccgacttcggaattgtcttagaagaaagaaggcaagccaccattttacccacgtaaatatatgaatatatttctgacattgaggtgttccagaagatgataaagaaatgatagcagctccagaaataccaactgattttaatctactacaggagtcagaaacacatttttcttctgacacagattttgaagatatcgaaggaaaaaaccaaaagcaaggcaaaggcaaaacttgtaaaaaaggcaaaaagggcccagcagaaaagggcaaaggtggaaatggaggaggaaaacctccttctggtccaaaccgaatgaatggtcatcaccaacagaatggagtggaaaacatgatgttgtttgaagttgttaaaatgggcaagagtgctatgcagtcggtggtagatgattggatagaatcatacaagcatgaccgagatatagcacttcttgaccttatcaacttttttattcagtgttcaggctgtaaaggagttgtcacagcagaaatgtttagacatatgcagaactctgagataattcgaaaaatgactgaagaattcgatgaggatagtggagattatccacttaccatggctggtcctcagtggaagaagttcaaatccagtttttgtgaattcattggcgtgttagtacggcaatgtcaatatagtatcatatatgatgagtatatgatggatacagtcatttcacttcttacaggattgtctgactcacaagtcagagcatttcgacatacaagcaccctggcagctatgaagttgatgacagctttggtgaatgtggcactaaatcttagcattaatatggataatacacaaagacaatatgaagcagaacggaataaaatgattggaaaacgagccaatgagaggctagaactcctgctacaaaagcggaaagagcttcaggaaaatcaagatgaaatagaaaatatgatgaatgcaatatttaaaggagtgtttgtacatagataccgtgatgcgatagctgaaattcgagctatttgcattgaagagattggcatttggatgaagatgtatagtgatgcctttcttaatgacagttatttaaaatatgttggttggactatgcatgataagcaaggtgaagtaagactcaaatgtcttactgctctacaagggctttattataacaaagagcttaattccaaactggaactttttaccagtcggttcaaggatagaattgtgtctatgacccttgacaaagaatatgatgttgcagtacaagcaataaaattactcactcttgttttacagagtagtgaagaagttctcactgcagaagattgtgaaaatgtctatcatctggtttattcagctcaccggccagtagcagtagcagctggagaatttctctacaaaaagctcttcagtcgtagagatccagaggaggatggaatgatgaaaagaagaggaagacaaggtccaaatgccaaccttgttaagacattggtttttttctttctagaaagtgagttacatgagcatgcagcataccttgtggatagcatgtgggactgtgctactgagctgctgaaagactgggaatgtatgaatagcttgttactggaagagccacttagtggagaggaagcactaacagataggcaagagagtgctctgattgaaataatgctttgtaccattagacaagcggctgaatgtcatcctcccgtgggaagagggacaggaaaaagggtgcttacagcaaaggagaagaagacacagttggatgataggacaaaaatcactgagctttttgccgtggcccttcctcagttattagcaaaatactctgtagatgcagaaaaggtgactaacttgttgcagttgcctcagtactttgatttggaaatatataccactggacgattagaaaagcatttggatgccttattgcgacagatccggaatattgtagagaagcacacagatacagatgttttggaagcatgttctaaaacttaccatgcactctgtaatgaagagttcacaatcttcaacagagtagatatttcaagaagtcaactgatagatgaattggcagataaatttaaccggcttcttgaagattttctgcaagagggtgaagaacctgatgaagatgatgcatatcaggtattgtcaacattgaagaggatcactgcttttcataatgcccatgacctttcaaagtgggatttatttgcttgtaattacaaactcttgaaaactggaatcgaaaatggagacatgcctgagcagattgttattcacgcactgcagtgtactcactatgtaatcctttggcaacttgctaagataactgaaagcagctctacaaaggaggacttgctgcgtttaaagaaacaaatgagagtattttgtcagatatgtcaacattacctgaccaacgtgaatactactgttaaggaacaggccttcactattctgtgtgatattttgatgatcttcagccatcagattatgtcaggagggcgtgacatgttagagccattagtgtatacccctgattcttcattgcagtctgagttgctcagctttattttggatcatgtcttcattgaacaggatgatgataataatagtgcagatggtcagcaagaggatgaagccagtaaaattgaagctctgcacaagagaagaaatttacttgcagcattttgtaagctaattgtatatactgtggtggagatgaatacagctgcagatatcttcaaacagtatatgaagtattataatgactatggagatatcatcaaagaaacaatgagtaaaacaaggcagatagacaaaattcagtgtgctaagacccttattctcagtctgcaacagctttttaatgaaatgatacaagaaaatggctataattttgatagatcatcctctacatttagtggcataaaagaacttgctcgacgttttgctttaacttttggacttgatcagttgaaaacaagagaagccattgccatgctacacaaagatggcatagaatttgcttttaaagagcctaatccgcaaggggagagccatccacctttaaatttggcatttcttgatattctgagtgaattttcttctaaactacttcgacaagacaaaagaacagtgtatgtttacttggaaaagttcatgacctttcagatgtcactccgaagagaggatgtgtggcttccactgatgtcttaccgaaattctttgctagctggtggtgatgatgacaccatgtcagtcattagtggaatcagcagccgggggtcaacagtacggagtaaaaaatcaaaaccatctacaggaaaacggaaagtggttgagggcatgcagctttcactcactgaagaaagtagtagtagtgacagtatgtggttaagcagagaacaaacactgcacacccctgttatgatgcagacaccacaactcacctccactattatgagagagcccaaaagattacggcctgaggatagcttcatgagtgtttatccaatgcagactgaacatcatcaaacacctcttgattataatcggcgtggcacaagcctaatggaagatgatgaagagccaattgtggaagatgttatgatgtcctcagaagggaggattgaggatcttaatgagggaatggattttgacaccatggatatagatttgccaccatcaaagaacagacgagagagaacagaactgaagcctgatttctttgatccagcttcaattatggatgaatcagttcttggagtgtcaatgttttaataccagtacacaattaaatctgtggtgaagtcattttctaagtggaagaggaaattttaaagtgtggtagatacagtgaaattctgtacagatttttctctaaggagaatatgacatgcttatgcttaccaagatcaagtgcattgaggggcagttttgtttgcctgaataaacgtaaaggacaagtaaacaatttgatgataagctacagtttttcttagaaagtaaatattttatttatgcgctgttagttggcttttgaatcgattatttcatgcttttttttaaaaaaaaaaaaaaacaaaataacaatctgaagaggcatttggtacagatatgaattctcttacatttatttactggttgtactaaataatgatgacctctgctggatttctgtttacatccagaaaacaatgttaaggatgtatttattcccctaccctgaagaaagtgtaggatagaattgtttttagcattctaaatttaaatgcttaaaacgtcaatcaacaaaactttgttttaaatattgtaattgtggagaaaagtaaacttataagcagaacttttacaattttttcatctaaaagtattttaagatatttttaaaatccaagagcttctctatacttttcagaaatatccagatgcagtgaactgccagaaggtaaccagtctcaaacatgcttatcccattatcaaccctgaaagtttgcttgtcctttaagataaaaatgtaatgttgtgatattccttccagtaatgccactgtattttgtctccaaataaaagaagcttattgtagtatgtttgcagaaaaattctaaacaaaaattatacagcttattagagtgtgggaatagggatctaaattttaaataaaattatatatatatataaattggtgctgattttataattgcgcagtttgtttagttttttcttacttttaaattccaacttaaaattatgaggtttcagaaatatattgaaagtttaacaatgtttaaaaatagaaaagcatgagtgttcatgctttaaaatgatttttaaatttgtattttatattgttttatctatctgtctttgcaagcagtcttcaggttaaagatacttctaacaggttacagtacatttcctctgtatgtaaattagatgggataatagaattcataacccataatattctttgaaagctaagctttaaacttcattttatgtcctttcacaaataaattagtttaaaacagaaagtggctacttgccattttgacatcaactcattttgcgaggcttaggcagctagacatcgtttaaaacaaaatattaacttatattacatgtgtatctatctattgtcagtcgtctctcagttcttgaggtatattattttaatcattccatgccttaatatgcttgcaatacaagaatatcttcagatgggtgaataccaaaaggctttcagtttttagtcagaaatcaagcattgggctgtggtagccaaaaaccataggttagctaaaaagatcatgatacaattattttattaagtcatggttaataacaaatgaatccagacttgtctaacagattttccatcaacaaatattgttatgtgcaaaagtattgcctatgttgttttacacaccactgcattaactagaactgctgagaggactgtatatatgattttaaacctaagttgattttttttctcactcttgaaaggagtacttctttgtgaaagcagttcttacagctttgttttcaaccagctaaaaatgttttatatattactctaacctgttgtcctccacattctattgtcctaattgtactgttttctgatttgtatttatgtcttgagacagtaactttttgaataaaaataaacctacagtatgttgtatgttttctcttgtactcaaagggggagggtggctataaatggtttgcaaatttatatctattatcacatcttttaatgtgtttggggaataatttatagagaataccatcagtttatatttttaataaatcatatgtatttacaatgaaa

SEQ ID NO: 30211 - DNA, 385 bp, Homo sapiens
  source 1..385: mol_type = unassigned DNA
tcccctcgacaccccactaaagacagaagaaccgcggctcgatcgggtccgcggcggaagcgcggccaaacgaatgagaattgtcttagaagaaagaaggcaagccaccattttacccacgtaaatatatgaatatatttctgacattgaggtgttccagaagatgataaagaaatgatagcagctccagaaataccaactgattttaatctactacaggagtcagaaacacatttttcttctgacacagattttgaagatatcgaaggaaaaaaccaaaagcaaggcaaaggcaaaacttgtaaaaaaggcaaaaagggcccagcagaaaagggcaaaggtggaaatggaggaggaaaacctccttctggtccaaaccgaatga

SEQ ID NO: 30212 - DNA, 676 bp, Homo sapiens
  source 1..676: mol_type = unassigned DNA
attcctggctctagcagggcctgctcgggagctgctggtgtttgttactgtcctcgcagcacttttctgccaaccttctctctctgcgtattggttaggagcaaaagcaggaggcggtctcctaattctgtctgtagcctagcgcgttgcgtttaagggtatatctgaacttattttgttaaaaaaaaggctctgggaagtggatgcatttgtttaatgacatataattcaggaattgtcttagaagaaagaaggcaagccaccattttacccacgtaaatatatgaatatatttctgacattgaggtgttccagaagatgataaagaaatgatagcagctccagaaataccaactgattttaatctactacaggagtcagaaacacatttttcttctgacacagattttgaagatatcgaaggaaaaaaccaaaagcaaggcaaaggcaaaacttgtaaaaaaggcaaaaagggcccagcagaaaagggcaaaggtggaaatggaggaggaaaacctccttctggtccaaaccgaatgaatggtcatcaccaacagaatggagtggaaaacatgatgttgtttgaagttgttaaaatgggcaagagtgctatgcagtcggtggtagatgattggatagaatcatacaagcatgaccgagatatagcacttcttga

SEQ ID NO: 30213 - DNA, 678 bp, Homo sapiens
  source 1..678: mol_type = unassigned DNA
agtgctgcttttcattcccacccccacccgcactgtctttctcaaggcacgaactgagctgatccttgccccaggaattgtcttagaagaaagaaggcaagccaccattttacccacgtaaatatatgaatatatttctgacattgaggtgttccagaagatgataaagaaatgatagcagctccagaaataccaactgattttaatctactacaggagtcagaaacacatttttcttctgacacagattttgaagatatcgaaggaaaaaaccaaaagcaaggcaaaggcaaaacttgtaaaaaaggcaaaaagggcccagcagaaaagggcaaaggtggaaatggaggaggaaaacctccttctggtccaaaccgaatgaatggtcatcaccaacagaatggagtggaaaacatgatgttgtttgaagttgttaaaatgggcaagagtgctatgcagtcggtggtagatgattggatagaatcatacaagcatgaccgagatatagcacttcttgaccttatcaacttttttattcagtgttcaggctgtaaaggagttgtcacagcagaaatgtttagacatatgcagaactctgagataattcgaaaaatgactgaagaattcgatgaggatagtggagattatccacttaccatggctggtcctcagtggaag

SEQ ID NO: 30214 - DNA, 742 bp, Homo sapiens
  source 1..742: mol_type = unassigned DNA
ggcccaaaatggagaacgcggagcagcgcaagatggaggctccgcttctctgtgtagcagtagatttaggttccttttctccggcaggctcctaagcctaggagagcccgaactggaggtggccaccgagtactaaattcacttgggaataaaagaaaaacataagaaaattataagagaaaggaattgtcttagaagaaagaaggcaagccaccattttacccacgtaaatatatgaatatatttctgacattgaggtgttccagaagatgataaagaaatgatagcagctccagaaataccaactgattttaatctactacaggagtcagaaacacatttttcttctgacacagattttgaagatatcgaaggaaaaaaccaaaagcaaggcaaaggcaaaacttgtaaaaaaggcaaaaagggcccagcagaaaagggcaaaggtggaaatggaggaggaaaacctccttctggtccaaaccgaatgaatggtcatcaccaacagaatggagtggaaaacatgatgttgtttgaagttgttaaaatgggcaagagtgctatgcagtcggtggtagatgattggatagaatcatacaagcatgaccgagatatagcacttcttgaccttatcaacttttttattcagtgttcaggctgtaaaggagttgtcacagcagaaatgtttagacatatgcagaactctgagataattcgaaaaatgactgaagaattcgatgag

SEQ ID NO: 30215 - DNA, 798 bp, Homo sapiens
  source 1..798: mol_type = unassigned DNA
atccttgccccaggtggccaccgagtactaaattcacttgggaataaaagaaaaacataagaaaattataagagaaaggaattgtcttagaagaaagaaggcaagccaccattttacccacgtaaatatatgaatatatttctgacattgaggtgttccagaagatgataaagaaatgatagcagctccagaaataccaactgattttaatctactacaggagtcagaaacacatttttcttctgacacagattttgaagatatcgaaggaaaaaaccaaaagcaaggcaaaggcaaaacttgtaaaaaaggcaaaaagggcccagcagaaaagggcaaaggtggaaatggaggaggaaaacctccttctggtccaaaccgaatgaatggtcatcaccaacagaatggagtggaaaacatgatgttgtttgaagttgttaaaatgggcaagagtgctatgcagtcggtggtagatgattggatagaatcatacaagcatgaccgagatatagcacttcttgaccttatcaacttttttattcagtgttcaggctgtaaaggagttgtcacagcagaaatgtttagacatatgcagaactctgagataattcgaaaaatgactgaagaattcgatgaggatagtggagattatccacttaccatggctggtcctcagtggaagaagttcaaatccagtttttgtgaattcattggcgtgttagtacggcaatgtcaatatagtatcatatatgatgagtatatgatggatacagtcatttcacttcttacaggattgtc

SEQ ID NO: 30216 - DNA, 2089 bp, Homo sapiens
  source 1..2089: mol_type = unassigned DNA
gtggccgacagatggcgcctgcgcgttccattcgcctccaagtcgccgaagagcgaacaccccaaacaatcccgaagcgccaccaaaaaaaaaaaaaaaaaaaaaaaaaaaaaaaaaaaaaaaaagaaaaaaaaccccgccggatccgaccgccactttcaaaaccccccaccgctctagaaccgcgggagcttccgtccctgagtagaattcgagggtgtaaagaagaggaaggggaaaaatatcttgtaccagcccaggggtgaagaagcccccggcctgagaaagaaggaggagtgggggaggcgaacagtctcgttgctgcctctgtgtacgctgaggggggaggaattgtcttagaagaaagaaggcaagccaccattttacccacgtaaatatatgaatatatttctgacattgaggtgttccagaagatgataaagaaatgatagcagctccagaaataccaactgattttaatctactacaggagtcagaaacacatttttcttctgacacagattttgaagatatcgaaggaaaaaaccaaaagcaaggcaaaggcaaaacttgtaaaaaaggcaaaaagggcccagcagaaaagggcaaaggtggaaatggaggaggaaaacctccttctggtccaaaccgaatgaatggtcatcaccaacagaatggagtggaaaacatgatgttgtttgaagttgttaaaatgggcaagagtgctatgcagtcggtggtagatgattggatagaatcatacaagcatgaccgagatatagcacttcttgaccttatcaacttttttattcagtgttcaggctgtaaaggagttgtcacagcagaaatgtttagacatatgcagaactctgagataattcgaaaaatgactgaagaattcgatgaggatagtggagattatccacttaccatggctggtcctcagtggaagaagttcaaatccagtttttgtgaattcattggcgtgttagtacggcaatgtcaatatagtatcatatatgatgagtatatgatggatacagtcatttcacttcttacaggattgtctgactcacaagtcagagcatttcgacatacaagcaccctggcagctatgaagttgatgacagctttggtgaatgtggcactaaatcttagcattaatatggataatacacaaagacaatatgaagcagaacggaataaaatgattggaaaacgagccaatgagaggctagaactcctgctacaaaagcggaaagagcttcaggaaaatcaagatgaaatagaaaatatgatgaatgcaatatttaaaggagtgtttgtacatagataccgtgatgcgatagctgaaattcgagctatttgcattgaagagattggcatttggatgaagatgtatagtgatgcctttcttaatgacagttatttaaaatatgttggttggactatgcatgataagcaaggtgaagtaagactcaaatgtcttactgctctacaagggctttattataacaaagagcttaattccaaactggaactttttaccagtcggttcaaggatagaattgtgtctatgacccttgacaaagaatatgatgttgcagtacaagcaataaaattactcactcttgttttacagagtagtgaagaagttctcactgcagaagattgtgaaaatgtctatcatctggtttattcagctcaccggccagtagcagtagcagctggagaatttctctacaaaaagctcttcagtcgtagagatccagaggaggatggaatgatgaaaagaagaggaagacaaggtccaaatgccaaccttgttaagacattggtttttttctttctagaaagtgagttacatgagcatgcagcataccttgtggatagcatgtgggactgtgctactgagctgctgaaagactgggaatgtatgaatagcttgttactggaagagccacttagtggagaggaagcactaacagataggcaagagagtgctctgattgaaataatgctttgtaccattagacaagcggctgaatgtcatcctcccgtgggaagagggacaggaaaaagggtgctt

SEQ ID NO: 30217 - DNA, 296 bp, Homo sapiens
  source 1..296: mol_type = unassigned DNA
gaggtaagttataaaatggcggaggcgaagcttctagaagtttggaggggcacccggagggcgcttggcccaccgtgaggaattgtcttagaagaaagaaggcaagccaccattttacccacgtaaatatatgaatatatttctgacattgaggtgttccagaagatgataaagaaatgatagcagctccagaaataccaactgattttaatctactacaggagtcagaaacacatttttcttctgacacagattttgaagatatcgaaggaaaaaaccaaaagcaaggcaaaggc

SEQ ID NO: 30218 - DNA, 4198 bp, Homo sapiens
  source 1..4198: mol_type = unassigned DNA
gcgcttttctggaatctttcgcccccggaagggcagcggcgggcgcctgtgtggaaggtggggtggccagagacacccgagggacctgagctggatcgccatacctaccctgtggtcctcatcttcctggcctcatagctcctcctctccaagcatgtcttccccgttgcaaagagctgtgggagataccaagagggccttgtctgcatcttctagttcctctgccagtctaccctttgatgacagggactcaaaccatacctcagaggggaatggcgactctttgttagctgatgaagacactgactttgaagacagcttgaatcgcaatgtgaagaagagagcagcaaaacgaccaccgaaaacaacaccggtggcaaaacatccaaagaaagggtcccgagtggtacatcgtcatagccggaaacagtcagagccaccagccaatgatcttttcaatgctgtgaaagccgccaaaagtgacatgcagtctttggtagatgagtggctggatagctacaagcaagaccaggatgcaggatttctggagcttgttaactttttcatccaatcttgcggatgtaaaggcattgtgacccctgagatgttcaagaagatgtccaactcagagatcatccagcacctaacagagcagtttaatgaggactcgggggactaccctctcatagctccaggtccatcctggaagaagttccagggcagcttctgtgaatttgtgaggacattggtctgtcagtgccagtacagcctcctctatgatggcttccctatggacgacctcatctccctgctcactggcctctcagactcacaagtccgcgccttccgtcacactagcaccctggctgctatgaaactgatgacctccctggtaaaagttgccctccaactgagtgtgcaccaagataacaatcagcgtcagtatgaggctgaaagaaacaaggggccagggcagagggcacctgagcggctggagagcctgttggagaaacgcaaagagctccaagagcatcaagaggagattgaggggatgatgaatgccctcttcaggggtgtctttgttcatcggtacagggatgtccttcctgagatccgtgctatctgcattgaggaaattgggtgttggatgcaaagctacagcacgtctttcctcaccgacagctatttaaaatatattggttggactctgcatgataagcaccgagaagtccgcctgaagtgtgtgaaggccctgaaagggctgtacggtaaccgggacctgaccacacgcctggagctcttcaccagccgcttcaaggaccggatggtttccatggtcatggacagagagtatgatgtggcagtggaggctgtcagattactgatacttatccttaagaacatggaaggggtgctgacggacgcggattgtgagagcgtctacccagttgtgtatgcctctcatcgaggcctggcctctgccgcaggcgaatttctgtactggaaactcttctaccctgagtgcgagataagaatgatgggtggaagagagcaacgccagagcccaggcgcccagaggactttcttccagcttctgctgtccttctttgtggagagcgagctccatgaccacgctgcttacttagtagacagtctgtgggactgtgcaggggctcggctgaaggactgggagggtctgacaagcctgctgctggagaaggaccagaacctgggtgatgtgcaggagagcacactgatagaaatccttgtgtccagtgcccggcaagcttcagaggggcacccgcctgtgggccgggtcactgggaggaagggcttaacctctaaggagcgcaagacccaagccgatgacagggtgaagttgactgagcacctcatccccctgctgccccagctcctggccaagttctcagctgatgcagagaaggtcactcccctgctccagcttctcagctgctttgacctccacatctactgcactgggcgcttggagaagcacctggagctgttcctgcagcaactccaggaggtggtggtgaagcatgcagagccagcggtgcttgaggctggggcgcatgccctctacctgctctgtaatcccgaattcactttcttcagccgggcggactttgcccgcagccagctagtagatttgctgactgaccgcttccagcaggagcttgaagagctgttacagtcgtccttcctagatgaggatgaggtatataatctggcagccactctgaaacgcctctctgccttctacaacactcatgacctgactcgctgggagctctatgagccatgttgccaactcctgcagaaggctgtggacacaggagaggttcctcaccaggttatcctgccagccttgactcttgtctatttttccattctctggacactaacccacatttctaaatcagatgcttcccagaagcagctgtcgagtttgagggacagaatggtggccttctgtgaactctgccagagttgcctctcagatgtggatactgagatccaggagcaggcttttgtcttattaagtgatctacttctcatctttagccctcagatgattgttgggggccgtgatttccttaggccacttgtcttttttcctgaagctactctccagtctgagctagccagcttcctcatggaccacgtcttcatccagccgggagacctgggcagtggtgattcccaggaggatcatttacagatagagcggctacaccagcggcgccgcctcctagccgggttctgcaagctgttgctttatggggtgctggagatggatgcagcctcagatgttttcaaacactacaacaagttctacaatgactatggtgacattatcaaggaaacattaactagagcaaggcagattgaccgaagtcattgttcccgaatcctgctgctgagcctcaagcagctgtacacagaactgctgcaggagcatgggccccagggcctgaatgagcttcctgccttcatcgagatgagggacctggcccggaggtttgccttgagttttggaccccagcagctgcagaaccgtgacctcgtggtcatgctacacaaggaaggcatccagttctccttgtctgagcttcctccagctggctcctccaatcagcctccaaatctggcattcctggagctcctttcagagttttccccccgactcttccatcaggacaagcagcttttactgtcctatctagaaaagtgcctgcagcatgtctcccaggcacctggccatccctggggcccagtcaccacctactgccactccctcagccctgtggagaacacagcagagaccagccctcaggtcctccccagctccaagaggaggcgcgttgaagggcctgccaagcctaacagagaggacgtctcctcgtcccaggaagaaagtctgcagctgaacagcatcccgcccacgcccaccctcacctccacagctgtgaagagcaggcagcccctgtgggggttgaaagagatggaggaagaagatggctcagagttggattttgcccagggtcagcccgtcgcaggcaccgagaggtcaaggttcttgggtccacaatatttccagactccacacaacccttcaggtcctggcctgggcaaccagctgatgcgactcagccttatggaagaggacgaggaagaagagttagaaatccaggatgagtcaaatgaagaacggcaggatacagacatgcaagcaagtagctactcttccaccagtgagcgcgggctggacctcttagattctacagagctggatattgaggatttctgacaggactctgggcccctccccagctccactccctacctcaagaatgtgaccatttggaaaaggcaaagagaaaaggagcaaaatgaagcattcccccaggcttcagccctgggctctgaggggaaagagttgggcattgtttttctaacctaacctttccctctggggtagagaagccgagagaccctgtcctccctaatgcactgtggcccagtccccttgcctttttcctgttctgtttggagtggagaagggcagcacctctgtgtttaatggaaatagcccatagtctcctggatttttggaacatctttctcagcctattttgtgtcctaatgattcgctcaataaacatgtttgaatcca

SEQ ID NO: 30219 - DNA, 3194 bp, Homo sapiens
  source 1..3194: mol_type = unassigned DNA
cgcgcttttctggaatctttcgcccccggaagggcagcggcgggcgcctgtgtggaaggtggggtggccagagacacccgagggacctgagctggatcgccatacctaccctgtggtcctcatcttcctggcctcatagctcctcctctccaagcatgtcttccccgttgcaaagagctgtgggagataccaagagggccttgtctgcatcttctagttcctctgccagtctaccctttgatgacagggactcaaaccatacctcagaggggaatggcgactctttgttagctgatgaagacactgactttgaagacagcttgaatcgcaatgtgaagaagagagcagcaaaacgaccaccgaaaacaacaccggtggcaaaacatccaaagaaagggtcccgagtggtacatcgtcatagccggaaacagtcagagccaccagccaatgatcttttcaatgctgtgaaagccgccaaaagtgacatgcagtctttggtagatgagtggctggatagctacaagcaagaccaggatgcaggatttctggagcttgttaactttttcatccaatcttgcggatgtaaaggcattgtgacccctgagatgttcaagaagatgtccaactcagagatcatccagcacctaacagagcagtttaatgagatggacgacctcatctccctgctcactggcctctcagactcacaagtccgcgccttccgtcacactagcaccctggctgctatgaaactgatgacctccctggtaaaagttgccctccaactgagtgtgcaccaagataacaatcagcgtcagtatgaggctgaaagaaacaaggggccagggcagagggcacctgagcggctggagagcctgttggagaaacgcaaagagctccaagagcatcaagaggagattgaggggatgatgaatgccctcttcaggggtgtctttgttcatcggtacagggatgtccttcctgagatccgtgctatctgcattgaggaaattgggtgttggatgcaaagctacagcacgtctttcctcaccgacagctatttaaaatatattggttggactctgcatgataagcaccgagaagtccgcctgaagtgtgtgaaggccctgaaagggctgtacggtaaccgggacctgaccacacgcctggagctcttcaccagccgcttcaaggaccggatggtttccatggtcatggacagagagtatgatgtggcagtggaggctgtcagattactgatacttatccttaagaacatggaaggggtgctgacggacgcggattgtgagagcgtctacccagttgtgtatgcctctcatcgaggcctggcctctgccgcaggcgaatttctgtactggaaactcttctaccctgagtgcgagataagaatgatgggtggaagagagcaacgccagagcccaggcgcccagaggactttcttccagcttctgctgtccttctttgtggagagcgagctccatgaccacgctgcttacttagtagacagtctgtgggactgtgcaggggctcggctgaaggactgggagggtctgacaagcctgctgctggagaaggaccagaacctgggtgatgtgcaggagagcacactgatagaaatccttgtgtccagtgcccggcaagcttcagaggggcacccgcctgtgggccgggtcactgggaggaagggcttaacctctaaggagcgcaagacccaagccgatgacagggtgaagttgactgagcacctcatccccctgctgccccagctcctggccaagttctcagctgatgcagagaaggtcactcccctgctccagcttctcagctgctttgacctccacatctactgcactgggcgcttggagaagcacctggagctgttcctgcagcaactccaggaggtggtggtgaagcatgcagagccagcggtgcttgaggctggggcgcatgccctctacctgctctgtaatcccgaattcactttcttcagccgggcggactttgcccgcagccagctagtagatttgctgactgaccgcttccagcaggagcttgaagagctgttacagtcgtccttcctagatgaggatgaggtatataatctggcagccactctgaaacgcctctctgccttctacaacactcatgacctgactcgctgggagctctatgagccatgttgccaactcctgcagaaggctgtggacacaggagaggttcctcaccaggttatcctgccagccttgactcttgtctatttttccattctctggacactaacccactccctcagccctgtggagaacacagcagagaccagccctcaggtcctccccagctccaagaggaggcgcgttgaagggcctgccaagcctaacagagaggacgtctcctcgtcccaggaagaaagtctgcagctgaacagcatcccgcccacgcccaccctcacctccacagctgtgaagagcaggcagcccctgtgggggttgaaagagatggaggaagaagatggctcagagttggattttgcccagggtcagcccgtcgcaggcaccgagaggtcaaggttcttgggtccacaatatttccagactccacacaacccttcaggtcctggcctgggcaaccagctgatgcgactcagccttatggaagaggacgaggaagaagagttagaaatccaggatgagtcaaatgaagaacggcaggatacagacatgcaagcaagtagctactcttccaccagtgagcgcgggctggacctcttagattctacagagctggatattgaggatttctgacaggactctgggcccctccccagctccactccctacctcaagaatgtgaccatttggaaaaggcaaagagaaaaggagcaaaatgaagcattcccccaggcttcagccctgggctctgaggggaaagagttgggcattgtttttctaacctaacctttccctctggggtagagaagccgagagaccctgtcctccctaatgcactgtggcccagtccccttgcctttttcctgttctgtttggagtggagaagggcagcacctctgtgtttaatggaaatagcccatagtctcctggatttttggaacatctttctcagcctattttgtgtcctaatgattcgctcaataaacatgtttgaatccacacgtt

SEQ ID NO: 30220 - DNA, 3884 bp, Homo sapiens
  source 1..3884: mol_type = unassigned DNA
cgcgcttttctggaatctttcgcccccggaagggcagcggcgggcgcctgtgtggaaggtggggtggccagagacacccgagggacctgagctggatcgccatacctaccctgtggtcctcatcttcctggcctcatagctcctcctctccaagcatgtcttccccgttgcaaagagctgtgggagataccaagagggccttgtctgcatcttctagttcctctgccagtctaccctttgatgacagggactcaaaccatacctcagaggggaatggcgactctttgttagctgatgaagacactgactttgaagacagcttgaatcgcaatgtgaagaagagagcagcaaaacgaccaccgaaaacaacaccggtggcaaaacatccaaagaaagggtcccgagtggtacatcgtcatagccggaaacagtcagagccaccagccaatgatcttttcaatgctgtgaaagccgccaaaagtgacatgcagtctttggtagatgagtggctggatagctacaagcaagaccaggatgcaggatttctggagcttgttaactttttcatccaatcttgcggatgtaaaggcattgtgacccctgagatgttcaagaagatgtccaactcagagatcatccagcacctaacagagcagtttaatgaggactcgggggactaccctctcatagctccaggtccatcctggaagaagttccagggcagcttctgtgaatttgtgaggacattggtctgtcagtgccagtacagcctcctctatgatggcttccctatggacgacctcatctccctgctcactggcctctcagactcacaagtccgcgccttccgtcacactagcaccctggctgctatgaaactgatgacctccctggtaaaagttgccctccaactgagtgtgcaccaagataacaatcagcgtcagtatgaggctgaaagaaacaaggggccagggcagagggcacctgagcggctggagagcctgttggagaaacgcaaagagctccaagagcatcaagaggagattgaggggatgatgaatgccctcttcaggggtgtctttgttcatcggtacagggatgtccttcctgagatccgtgctatctgcattgaggaaattgggtgttggatgcaaagctacagcacgtctttcctcaccgacagctatttaaaatatattggttggactctgcatgataagcaccgagaagtccgcctgaagtgtgtgaaggccctgaaagggctgtacggtaaccgggacctgaccacacgcctggagctcttcaccagccgcttcaaggaccggatggtttccatggtcatggacagagagtatgatgtggcagtggaggctgtcagattactgatacttatccttaagaacatggaaggggtgctgacggacgcggattgtgagagcgtctacccagttgtgtatgcctctcatcgaggcctggcctctgccgcaggcgaatttctgtactggaaactcttctaccctgagtgcgagataagaatgatgggtggaagagagcaacgccagagcccaggcgcccagaggactttcttccagcttctgctgtccttctttgtggagagcgagctccatgaccacgctgcttacttagtagacagtctgtgggactgtgcaggggctcggctgaaggactgggagggtctgacaagcctgctgctggagaaggaccagaacctgggtgatgtgcaggagagcacactgatagaaatccttgtgtccagtgcccggcaagcttcagaggggcacccgcctgtgggccgggtcactgggaggaagggcttaacctctaaggagcgcaagacccaagccgatgacagggtgaagttgactgagcacctcatccccctgctgccccagctcctggccaagttctcagctgatgcagagaaggtcactcccctgctccagcttctcagctgctttgacctccacatctactgcactgggcgcttggagaagcacctggagctgttcctgcagcaactccaggaggtggtggtgaagcatgcagagccagcggtgcttgaggctggggcgcatgccctctacctgctctgtaatcccgaattcactttcttcagccgggcggactttgcccgcagccagctagtagatttgctgactgaccgcttccagcaggagcttgaagagctgttacagtcgtccttcctagatgaggatgaggtatataatctggcagccactctgaaacgcctctctgccttctacaacactcatgacctgactcgctgggagctctatgagccatgttgccaactcctgcagaaggctgtggacacaggagaggttcctcaccaggttatcctgccagccttgactcttgtctatttttccattctctggacactaacccacatttctaaatcagatgcttcccagaagcagctgtcgagtttgagggacagaatggtggccttctgtgaactctgccagagttgcctctcagatgtggatactgagatccaggagcaggcttttgtcttattaagtgatctacttctcatctttagccctcagatgattgttgggggccgtgatttccttaggccacttgtcttttttcctgaagctactctccagtctgagctagccagcttcctcatggaccacgtcttcatccagccgggagacctgggcagtggtgattcccaggaggatcatttacagatagagcggctacaccagcggcgccgcctcctagccgggttctgcaagctgttgctttatggggtgctggagatggatgcagcctcagatgttttcaaacactacaacaagttctacaatgactatggtgacattatcaaggaaacattaactagagcaaggcagattgaccgaagtcattgttcccgaatcctgctgctgagcctcaagcagctgtacacagaactgctgcaggagcatgggccccagggcctgaatgagcttcctgccttcatcgagatgagggacctggcccggaggtttgccttgagttttggaccccagcagctgcagaaccgtgacctcgtggtcatgctacacaaggaaggcatccagttctccttgtctgagcttcctccagctggctcctccaatcagcctccaaatctggcattcctggagctcctttcagagttttccccccgactcttccatcaggacaagcagcttttactgtcctatctagaaaagtgcctgcagcatgtctcccaggcacctggccatccctggggcccagtcaccacctactgccactccctcagccctgtggagaacacagcagagaccagccctcaggtcctccccagctccaagaggaggcgcgttgaagggcctgccaagcctaacagagaggacgtctcctcgtcccaggaagaaagtctgcagctgaacagcatcccgcccacgcccaccctcacctccacagctgtgaagagcaggcagcccctgtgggggttgaaagagatggaggaagaagatggctcagagttggattttgcccagggcagtcagcccgtcgcaggcaccgagaggtcaaggttcttgggtccacaatatttccagactccacacaacccttcaggtcctggcctgggcaaccagctgatgcgactcagccttatggaagaggacgaggaagaagagttagaaatccaggatgagtcaaatgaagaacggcaggatacagacatgcaagcaagtagctactcttccaccagtgagcgcgggctggacctcttagattctacagagctggatattgagattactgagagtcttccgttactaggtaagtcaccgcatccttataactccaggtga

SEQ ID NO: 30221 - DNA, 605 bp, Homo sapiens
  source 1..605: mol_type = unassigned DNA
gggcgagccgttgggattgcgcttgcgcacagcgtgtcttgtacgttcccgcgcttttctggaatctttcgcccccggaagggcagcggcgggcgcctgtgtggaagctggatcgccatacctaccctgtggtcctcatcttcctggcctcatagctcctcctctccaagcatgtcttccccgttgcaaagagctgtgggagataccaagagggccttgtctgcatcttctagttcctctgccagtctaccctttgatgacagggactcaaaccatacctcagaggggaatggcgactctttgttagctgatgaagacactgactttgaagacagcttgaatcgcaatgtgaagaagagagcagcaaaacgaccaccgaaaacaacaccggtggcaaaacatccaaagaaagggtcccgagtggtacatcgtcatagccggaaacagtcagagccaccagccaatgatcttttcaatgctgtgaaagccgccaaaagtgacatgcagtctttggtagatgagtggctggatagctacaagcaagaccaggatgcaggatttctggagcttgttaactttttcatccaatcttgcggatgtaaagg

SEQ ID NO: 30222 - DNA, 534 bp, Homo sapiens
  source 1..534: mol_type = unassigned DNA
atctttcgcccccggaagggcagcggcgggcgcctgtgtggaaggtggggtggccagagacacccgagggacctgaggtggggaccttccctgaaccctgctcggccagaagtcactcttccaggctctgacagctggatcgccatacctaccctgtggtcctcatcttcctggcctcatagctcctcctctccaagcatgtcttccccgttgcaaagagctgtgggagataccaagagggccttgtctgcatcttctagttcctctgccagtctaccctttgatgacagggactcaaaccatacctcagaggggaatggcgactctttgttagctgatgaagacactgactttgaagacagcttgaatcgcaatgtgaagaagagagcagcaaaacgaccaccgaaaacaacaccggtggcaaaacatccaaagaaagggtcccgagtggtacatcgtcatagccggaaacagtcagagccaccagccaatgatcttttcaatgctgtgaaagccgccaaaagtgacatgcag

SEQ ID NO: 30223 - DNA, 4450 bp, Homo sapiens
  source 1..4450: mol_type = unassigned DNA
gtggcgatccggctcaaaaggcggggcctgggtggaacctagcctatggcaattgagaagccagattaaaggggttactagcagtctggtccaaaacccgcccaatggagtaggagattgagggtagcgggggtgggacctgggtgggggcggggctaaagcgggccgcccgcgtgcccaagcccacgtgagagggcaggacgcctgagagcttgaggccacacgaggctgtggagcggcgtgactcaaacgtggcgcgcatcagctcgcacacttccaaacctcgcgatagctactggccctgggcgagccgttgggattgcgcttgcgcacagcgtgtcttctggatcgccatacctaccctgtggtcctcatcttcctggcctcatagctcctcctctccaagcatgtcttccccgttgcaaagagctgtgggagataccaagagggccttgtctgcatcttctagttcctctgccagtctaccctttgatgacagggactcaaaccatacctcagaggggaatggcgactctttgttagctgatgaagacactgactttgaagacagcttgaatcgcaatgtgaagaagagagcagcaaaacgaccaccgaaaacaacaccggtggcaaaacatccaaagaaagggtcccgagtggtacatcgtcatagccggaaacagtcagagccaccagccaatgatcttttcaatgctgtgaaagccgccaaaagtgacatgcagtctttggtagatgagtggctggatagctacaagcaagaccaggatgcaggatttctggagcttgttaactttttcatccaatcttgcggatgtaaaggcattgtgacccctgagatgttcaagaagatgtccaactcagagatcatccagcacctaacagagcagtttaatgaggactcgggggactaccctctcatagctccaggtccatcctggaagaagttccagggcagcttctgtgaatttgtgaggacattggtctgtcagtgccagtacagcctcctctatgatggcttccctatggacgacctcatctccctgctcactggcctctcagactcacaagtccgcgccttccgtcacactagcaccctggctgctatgaaactgatgacctccctggtaaaagttgccctccaactgagtgtgcaccaagataacaatcagcgtcagtatgaggctgaaagaaacaaggggccagggcagagggcacctgagcggctggagagcctgttggagaaacgcaaagagctccaagagcatcaagaggagattgaggggatgatgaatgccctcttcaggggtgtctttgttcatcggtacagggatgtccttcctgagatccgtgctatctgcattgaggaaattgggtgttggatgcaaagctacagcacgtctttcctcaccgacagctatttaaaatatattggttggactctgcatgataagcaccgagaagtccgcctgaagtgtgtgaaggccctgaaagggctgtacggtaaccgggacctgaccacacgcctggagctcttcaccagccgcttcaaggaccggatggtttccatggtcatggacagagagtatgatgtggcagtggaggctgtcagattactgatacttatccttaagaacatggaaggggtgctgacggacgcggattgtgagagcgtctacccagttgtgtatgcctctcatcgaggcctggcctctgccgcaggcgaatttctgtactggaaactcttctaccctgagtgcgagataagaatgatgggtggaagagagcaacgccagagcccaggcgcccagaggactttcttccagcttctgctgtccttctttgtggagagcgagctccatgaccacgctgcttacttagtagacagtctgtgggactgtgcaggggctcggctgaaggactgggagggtctgacaagcctgctgctggagaaggaccagaacctgggtgatgtgcaggagagcacactgatagaaatccttgtgtccagtgcccggcaagcttcagaggggcacccgcctgtgggccgggtcactgggaggaagggcttaacctctaaggagcgcaagacccaagccgatgacagggtgaagttgactgagcacctcatccccctgctgccccagctcctggccaagttctcagctgatgcagagaaggtcactcccctgctccagcttctcagctgctttgacctccacatctactgcactgggcgcttggagaagcacctggagctgttcctgcagcaactccaggaggtggtggtgaagcatgcagagccagcggtgcttgaggctggggcgcatgccctctacctgctctgtaatcccgaattcactttcttcagccgggcggactttgcccgcagccagctagtagatttgctgactgaccgcttccagcaggagcttgaagagctgttacagtcgtccttcctagatgaggatgaggtatataatctggcagccactctgaaacgcctctctgccttctacaacactcatgacctgactcgctgggagctctatgagccatgttgccaactcctgcagaaggctgtggacacaggagaggttcctcaccaggttatcctgccagccttgactcttgtctatttttccattctctggacactaacccacatttctaaatcagatgcttcccagaagcagctgtcgagtttgagggacagaatggtggccttctgtgaactctgccagagttgcctctcagatgtggatactgagatccaggagcaggcttttgtcttattaagtgatctacttctcatctttagccctcagatgattgttgggggccgtgatttccttaggccacttgtcttttttcctgaagctactctccagtctgagctagccagcttcctcatggaccacgtcttcatccagccgggagacctgggcagtggtgattcccaggaggatcatttacagatagagcggctacaccagcggcgccgcctcctagccgggttctgcaagctgttgctttatggggtgctggagatggatgcagcctcagatgttttcaaacactacaacaagttctacaatgactatggtgacattatcaaggaaacattaactagagcaaggcagattgaccgaagtcattgttcccgaatcctgctgctgagcctcaagcagctgtacacagaactgctgcaggagcatgggccccagggcctgaatgagcttcctgccttcatcgagatgagggacctggcccggaggtttgccttgagttttggaccccagcagctgcagaaccgtgacctcgtggtcatgctacacaaggaaggcatccagttctccttgtctgagcttcctccagctggctcctccaatcagcctccaaatctggcattcctggagctcctttcagagttttccccccgactcttccatcaggacaagcagcttttactgtcctatctagaaaagtgcctgcagcatgtctcccaggcacctggccatccctggggcccagtcaccacctactgccactccctcagccctgtggagaacacagcagagaccagccctcaggtcctccccagctccaagaggaggcgcgttgaagggcctgccaagcctaacagagaggacgtctcctcgtcccaggaagaaagtctgcagctgaacagcatcccgcccacgcccaccctcacctccacagctgtgaagagcaggcagcccctgtgggggttgaaagagatggaggaagaagatggctcagagttggattttgcccagggtcagcccgtcgcaggcaccgagaggtcaaggttcttgggtccacaatatttccagactccacacaacccttcaggtcctggcctgggcaaccagctgatgcgactcagccttatggaagaggacgaggaagaagagttagaaatccaggatgagtcaaatgaagaacggcaggatacagacatgcaagcaagtagctactcttccaccagtgagcgcgggctggacctcttagattctacagagctggatattgaggatttctgacaggactctgggcccctccccagctccactccctacctcaagaatgtgaccatttggaaaaggcaaagagaaaaggagcaaaatgaagcattcccccaggcttcagccctgggctctgaggggaaagagttgggcattgtttttctaacctaacctttccctctggggtagagaagccgagagaccctgtcctccctaatgcactgtggcccagtccccttgcctttttcctgttctgtttggagtggagaagggcagcacctctgtgtttaatggaaatagcccatagtctcctggatttttggaacatctttctcagcctattttgtgtcctaatgattcgctcaataaacatgtttgaatcc

SEQ ID NO: 30224 - DNA, 699 bp, Homo sapiens
  source 1..699: mol_type = unassigned DNA
gcccccggaagggcagcggcgggcgcctgtgtggaaggtggggtggccagagacacccgagggacctgagctggatcgccatacctaccctgtggtcctcatcttcctggcctcatagctcctcctctccaagcatgtcttccccgttgcaaagagctgtgggagataccaagagggccttgtctgcatcttctagttcctctgccagtctaccctttgatgacagggactcaaaccatacctcagaggggaatggcgactctttgttagctgatgaagacactgactttgaagacagcttgaatcgcaatgtgaagaagagagcagcaaaacgaccaccgaaaacaacaccggtggcaaaacatccaaagaaagggtcccgagtggtacatcgtcatagccggaaacagtcagagccaccagccaatgatcttttcaatgctgtgaaagccgccaaaagtgacatgcaggactcgggggactaccctctcatagctccaggtccatcctggaagaagttccagggcagcttctgtgaatttgtgaggacattggtctgtcagtgccagtacagcctcctctatgatggcttccctatggacgacctcatctccctgctcactggcctctcagactcacaagtccgcgccttccgtcacactagcaccctggctgctatgaaactgatgacctccctgg

SEQ ID NO: 30225 - DNA, 2079 bp, Homo sapiens
  source 1..2079: mol_type = unassigned DNA
ggcgtcccctccgtgaggtcgcgcccgttcgcaccgcccccgcccgcaagaaagatggcagtggcctgatccgggcccgttggcggcgtcactgacgcttcgctccggtcctcggatcccgagcgcggggaggcagaccgactgtgagctgcttgtccccatcctgcggccgtcctggggacacagagccctccgtggtgcccggggattggattggagccaggacctcacttcctcctctgcccctgcccctgcccctcccagcacctggcccacaccctgcagcccgccccatggtctggccctgggtggcgatggcgtccaggtggggtcccctcattggcctggctccgtgctgcctctggctcctgggggcagtccttctgatggacgcgtctgcacggcctgccaaccactcgtccactcgagagagagtagccaacagggaggagaatgagatcctgcccccagaccacctgaacggggtgaagctggagatggacgggcacctcaatcgcggcttccaccaggaggtcttcctaggcaaggacctgggtggctttgatgaggacgcggagccgcggcggagccggaggaagctgatggtcatcttttccaaggtggatgtgaacactgaccggaagatcagtgccaaggagatgcagcgctggatcatggagaagacggccgagcacttccaggaggccatggaggagagcaagacacacttccgcgccgtggaccctgacggggacggtcacgtgtcttgggacgagtataaggtgaagtttttggcgagtaaaggccatagcgagaaggaggttgccgacgccatcaggctcaacgaggaactcaaagtggatgaggaaacacaggaagtcctggagaacctgaaggaccgctggtaccaggcggacagcccccctgcagacctgctgctgacggaggaggagttcctgtcgttcctccaccccgagcacagccggggaatgctcaggttcatggtgaaggagatcgtccgggacctggaccaggacggtgacaagcagctctctgtgcccgagttcatctccctgcccgtgggcaccgtggagaaccagcagggccaggacattgacgacaactgggtgaaagacagaaaaaaggagtttgaggagctcattgactccaaccacgacggcatcgtgaccgccgaggagctggagaacgtgcccacactcccgctgcagccaataggcaccttaaatagccacttcgtgcggctggccgcggagctcggagggggaaaggcgacgctgacctgtgccccgctcgcccgcagagctacatggaccccatgaacgagtacaacgcgctgaacgaggccaagcagatgatcgccgtcgccgacgagaaccagaaccaccacctggagcccgaggaggtgctcaagtacagcgagttcttcacgggcagcaagctggtggactacgcgcgcagcgtgcacgaggagttttgagcgcccggccgcgccccgcgccgccccccacgcaccaccggggcggcctcgcgggtgactccgggctccgtggctgtcccggaccccacctcttccctgccgcccgccaccggccgaccgaccgcggctgccccagttgatgagcggcgtgtcccctctgcagcgcgcaccccggcggggctttggctgtgacgcggtcggggcgcggggctgggctgtggccccgcggcgccgcctcctccctggtccctcgaaatcgtggcatctcacttctgagaacgaaatctcgcttcagtcactctgccgaaggcgctgacggcatcgcggccggaacctctgggcccggcccctcccagggccgccgctccgtgggaaaaaacagctcctccatttccttgaaaactgaacgattattaaaaatagattaaacttcgctggaaatgagtagccaggaagttcaggggagggtgccgggtccttcccgggcctggcgtgtcggagccacccaggtcccgcagctgccgctgagaaaatgcaaatatttgttgtgacaagaatcacatacatttactttaaatata

SEQ ID NO: 30226 - DNA, 1956 bp, Homo sapiens
  source 1..1956: mol_type = unassigned DNA
gcaccgcccccgcccgcaagaaagatggcagtggcctgatccgggcccgttggcggcgtcactgacgcttcgctccggtcctcggatcccgagcgcggggaggcagaccgactgtgagctgcttgtccccatcctgcggccgtcctggggacacagagccctccgtggtgcccggggattggattggagccaggacctcacttcctcctctgcccctgcccctgcccctcccagcacctggcccacaccctgcagcccgccccatggtctggccctgggtggcgatggcgtccaggtggggtcccctcattggcctggctccgtgctgcctctggctcctgggggcagtccttctgatggacgcgtctgcacggcctgccaaccactcgtccactcgagagagagtagccaacagggaggagaatgagatcctgcccccagaccacctgaacggggtgaagctggagatggacgggcacctcaatcgcggcttccaccaggaggtcttcctaggcaaggacctgggtggctttgatgaggacgcggagccgcggcggagccggaggaagctgatggtcatcttttccaaggtggatgtgaacactgaccggaagatcagtgccaaggagatgcagcgctggatcatggagaagacggccgagcacttccaggaggccatggaggagagcaagacacacttccgcgccgtggaccctgacggggacggtcacgtgtcttgggacgagtataaggtgaagtttttggcgagtaaaggccatagcgagaaggaggttgccgacgccatcaggctcaacgaggaactcaaagtggatgaggaaacacaggaagtcctggagaacctgaaggaccgctggtaccaggcggacagcccccctgcagacctgctgctgacggaggaggagttcctgtcgttcctccaccccgagcacagccggggaatgctcaggttcatggtgaaggagatcgtccgggacctggaccaggacggtgacaagcagctctctgtgcccgagttcatctccctgcccgtgggcaccgtggagaaccagcagggccaggacattgacgacaactgggtgaaagacagaaaaaaggagtttgaggagctcattgactccaaccacgacggcatcgtgaccgccgaggagctggagagctacatggaccccatgaacgagtacaacgcgctgaacgaggccaagcagatgatcgccgtcgccgacgagaaccagaaccaccacctggagcccgaggaggtgctcaagtacagcgagttcttcacgggcagcaagctggtggactacgcgcgcagcgtgcacgaggagttttgagcgcccggccgcgccccgcgccgccccccacgcaccaccggggcggcctcgcgggtgactccgggctccgtggctgtcccggaccccacctcttccctgccgcccgccaccggccgaccgaccgcggctgccccagttgatgagcggcgtgtcccctctgcagcgcgcaccccggcggggctttggctgtgacgcggtcggggcgcggggctgggctgtggccccgcggcgccgcctcctccctggtccctcgaaatcgtggcatctcacttctgagaacgaaatctcgcttcagtcactctgccgaaggcgctgacggcatcgcggccggaacctctgggcccggcccctcccagggccgccgctccgtgggaaaaaacagctcctccatttccttgaaaactgaacgattattaaaaatagattaaacttcgctggaaatgagtagccaggaagttcaggggagggtgccgggtccttcccgggcctggcgtgtcggagccacccaggtcccgcagctgccgctgagaaaatgcaaatatttgttgtgacaagaatcacatacatttactttaaatatagttgccttttttggtcagcttca

SEQ ID NO: 30227 - DNA, 728 bp, Homo sapiens
  source 1..728: mol_type = unassigned DNA
gctggagatggacgggcacctcaatcgcggcttccaccaggaggtcttcctaggcaaggacctgggtggctttgatgaggacgcggagccgcggcggagccggaggaagctgatggtcatcttttccaaggtggatgtgaacactgaccggaagatcagtgccaaggagatgcagcgctggatcatggagaagacggccgagcacttccaggaggccatggaggagagcaagacacacttccgcgccgtggaccctgacggggacggtcacgtgtcttgggacgagtataaggtgaagtttttggcgagtaaaggccatagcgagaaggaggttgccgacgccatcaggctcaacgaggaactcaaagtggatgaggaaagcagcacctctcggaactttctggatttgcgtgctggcgtctgtcggcctcgatacccacaggctgcgcccctctcagcacaggaagtcctggagaacctgaaggaccgctggtaccaggcggacagcccccctgcagacctgctgctgacggaggaggagttcctgtcgttcctccaccccgagcacagccggggaatgctcaggttcatggtgaaggagatcgtccgggacctggaccaggacggtgacaagcagctctctgtgcccgagttcatctccctgcccgtgggcaccgtggagaaccagcagggccaggacattgacgacaactgggtgaaagacagaa

SEQ ID NO: 30228 - DNA, 861 bp, Homo sapiens
  source 1..861: mol_type = unassigned DNA
gcccgcaagaaagatggcagtggcctgatccgggcccgttggcggcgtcactgacgcttcgctccggtcctcggatcccgagcgcggggaggcagaccgactgtgagctgcttgtccccatcctgcggccgtcctggggacacagagccctccgtggtgcccggggattggattggagccaggacctcacttcctcctctgcccctgcccctgcccctcccagcacctggcccacaccctgcagcccgccccatggtctggccctgggtggcgatggcgtccaggtggggtcccctcattggcctggctccgtgctgcctctggctcctgggggcagtccttctgatggacgcgtctgcacggcctgccaaccactcgtccactcgagagagagtagccaacagggaggagaatgagatcctgcccccagaccacctgaacggggtgaagctggagatggacgggcacctcaatcgcggcttccaccaggaggtcttcctaggcaaggacctgggtggctttgatgaggacgcggagccgcggcggagccggaggaagctgatggtcatcttttccaaggtggatgtgaacactgaccggaagatcagtgccaaggagatgcagcgctggatcatggagaagacggccgagcacttccaggaggccatggaggagagcaagacacacttccgcgccgtggaccctgacggggacggtcacgtgtcttgggacgagtataaggtgaagtttttggcgagtaaaggccatagcgagaaggaggttgccgacgccatcaggctcaacgaggaactcaaagtggatgaggaaagacatggcccacctggacctagagctctgtga

SEQ ID NO: 30229 - DNA, 1497 bp, Homo sapiens
  source 1..1497: mol_type = unassigned DNA
aaccgaagcggctcaggaaggcagctgtcactgagcccctggaacagagcgagagtatcgtaagtaaccaggctcagccggtttctcaggccgctctagtcaaataaaccataaagatcagactcgggcttcttcacttccttctctccgtggtttcgccattagcttccggttccggggaggggccgagttttcttcgaagatttggggctccgcgatacagttaggatggctgtagtacctctgctgttgttggggggtttgtggagcgctgtgggagcgtccagcctgggtgtcgttacttgcggctccgtggtgaagctactcaatacgcgccacaacgtccgactgcactcacacgacgtgcgctatgggtcaggtagtgggcagcagtcagtgacaggtgtaacctctgtggatgacagcaacagttactggaggatacgggggaagagtgccacagtgtgtgagaggggaacccccatcaagtgtggccagcccatccggctgacacatgtcaacactggccgaaacctccatagtcaccacttcacttcacctctttctggaaaccaggaagtgagtgcttttggtgaggaaggtgaaggtgattatctggatgactggacagtgctctgtaatggaccctactgggtgagagatggtgaggtgcggttcaaacactcttccactgaggtactgctgtctgtcacaggagaacaatatggtcgacctatcagtgggcaaaaagaggtgcatggcatggcccagccaagtcagaacaactactggaaagccatggaaggcatcttcatgaagcccagtgagttgttgaaggcagaagcccaccatgcagagctgtgaatctagaggctctgagccactgttaacgcacaatgttcacagacatctgttgctgcctcaccttgggatccctgccacaagttccttgggcagtggccatgtcaccattgagatgaagatatacaacagaaaatagtggctgtgtttggaagcttcagccctgcacatttgaactagtcactctcccagacttgcgtgggtcagttctttctgagtagaggacttgctggtaaaggggcagatgctttttattagtactgataaaacaaactgagggaaacatccctcttagctgggaaacttttactcttcaggagcttggcatcatggactgttaatgtatgtgattttccccctattttctctctccaaaatgataaaaacaataattttattatgagtcactgtgttgttatttattaggtgtgctatttcattagctgcttaatcctttgagtcctaagactctttggagacgctatgaagctccaatgtgggcccttttaagagcttttcttgcatacaaaccttttctccctctactttgacttctctccaggcatctcatctttaatagatctttgactaattatagctaaaaactctcagagaatacagcataataaatagcca

SEQ ID NO: 30230 - DNA, 865 bp, Homo sapiens
  source 1..865: mol_type = unassigned DNA
ctgtcagaaccggattgggccgcggcggggacggaagcggcccctgggcccgaggggctggagccgggccggggcgatgtggagcgcgggccgcggcggggctgcctggccggtgctgttggggctgctgctggcgctgttagtgccgggcggtggtgccgccaagaccggtgcggagctcgtgacctgcgggtcggtgctgaagctgctcaatacgcaccaccgcgtgcggctgcactcgcacgacatcaaatacggatccggcagcggccagcaatcggtgaccggcgtagaggcgtcggacgacgccaatagctactggcggatccgcggcggctcggagggcgggtgcccgcgcgggtccccggtgcgctgcgggcaggcggtgaggctcacgcatgtgcttacgggcaagaacctgcacacgcaccacttcccgtcgccgctgtccaacaaccaggaggtgagtgcctttggggaagacggcgagggcgacgacctggacctatggacagtgcgctgctctggacagcactgggagcgtgaggctgctgtgcgcttccagcatgtgggcacctctgtgttcctgtcagtcacgggtgagcagtatggaagccccatccgtgggcagcatgaggtccacggcatgcccagtgccaacacgcacaatacgtggaaggccatggaaggcatcttcatcaagcctagtgtggagccctctgcaggtcacgatgaactctgagtgtgtggatggatgggtggatggagggtggcaggtggggcgtctgcagggccactcttggcagagactttgggtttgtaggggtcctcaagtgcctttgtgattaaagaatgttggtctatg

SEQ ID NO: 30231 - DNA, 4038 bp, Homo sapiens
  source 1..4038: mol_type = unassigned DNA
gctggacctgggcaccgccagccgcctgggcacgggactgggcgggggcgctgacctcggcctaggaggcccaggatcccggagacgcccgcgccctcaggaccctgcgggtcgcacgccctccccagcttctgctgctcgccgctcttcggcagggcgaggtcaggtgcccccttctcgcctctcttctcttctcttctcttcctcctccacttctgtgcccgcggagactccggccgcccccttccgcaggggtgtagtaatctgcggagctgacagcagccccgcagccaccctgcccgaagtctccggaagcggcacgagctcaggccgccgcagccccggcggacccactgttggacctgaggagccagccctcctcccgcacccaaacttggagcacttgacctttggctgttggagggggcaggctcgcgggtggctggacagctgcggagccgcgagggcatcttgcctggagaccgtcggctgcactcccgggctcctggctttgcctctgggatcccgaggtgtccacatcagacgcatgttgactgagacctagagtcatggatgtatgcgtccgtcttgccctgtggctcctctggggactcctcctgcaccagggccagagcctcagccatagtcacagtgagaaggcgacaggaaccagctcgggggccaactctgaggagtccactgcagcagagttttgccgaattgacaagcccctgtgtcacagtgaggatgagaaactcagcttcgaggcagtccgtaacatccacaaactgatggacgatgatgccaatggtgatgtggatgtggaagaaagtgatgagttcctgagggaagacctcaattaccatgacccaacagtgaaacacagcaccttccatggtgaggataagctcatcagcgtggaggacctgtggaaggcatggaagtcatcagaagtatacaattggaccgtggatgaggtggtacagtggctgatcacatatgtggagctgcctcagtatgaggagaccttccggaagctgcagctcagtggccatgccatgccaaggctggctgtcaccaacaccaccatgacagggactgtgctgaagatgacagaccggagtcatcggcagaagctgcagctgaaggctctggatacagtgctctttgggcctcctctcttgactcgccataatcacctcaaggacttcatgctggtggtgtctatcgttattggtgtgggcggctgctggtttgcctatatccagaaccgttactccaaggagcacatgaagaagatgatgaaggacttggaggggttacaccgagctgagcagagtctgcatgaccttcaggaaaggctgcacaaggcccaggaggagcaccgcacagtggaggtggagaaggtccatctggaaaagaagctgcgcgatgagatcaaccttgctaagcaggaagcccagcggctgaaggagctgcgggagggtactgagaatgagcggagccgccaaaaatatgctgaggaggagttggagcaggttcgggaggccttgaggaaagcagagaaggagctagaatctcacagctcatggtatgctccagaggcccttcagaagtggctgcagctgacacatgaggtggaggtgcaatattacaacatcaagaagcaaaatgctgagaagcagctgctggtggccaaggagggggctgagaagataaaaaagaagagaaacacactctttggcaccttccacgtggcccacagctcttccctggatgatgtagatcataaaattctaacagctaagcaagcactgagcgaggtgacagcagcattgcgggagcgcctgcaccgctggcaacagatcgagatcctctgtggcttccagattgtcaacaaccctggcatccactcactggtggctgccctcaacatagaccccagctggatgggcagtacacgccccaaccctgctcacttcatcatgactgacgacgtggatgacatggatgaggagattgtgtctcccttgtccatgcagtcccctagcctgcagagcagtgttcggcagcgcctgacggagccacagcatggcctgggatctcagagggatttgacccattccgattcggagtcctccctccacatgagtgaccgccagcgtgtggcccccaaacctcctcagatgagccgtgctgcagacgaggctctcaatgccatgacttccaatggcagccaccggctgatcgagggggtccacccagggtctctggtggagaaactgcctgacagccctgccctggccaagaaggcattactggcgctgaaccatgggctggacaaggcccacagcctgatggagctgagcccctcagccccacctggtggctctccacatttggattcttcccgttctcacagccccagctccccagacccagacacaccatctccagttggggacagccgagccctgcaagccagccgaaacacacgcattccccacctggctggcaagaaggctgtggctgaggaggataatggctctattggcgaggaaacagactccagcccaggccggaagaagtttcccctcaaaatctttaagaagcctcttaagaagtaggcaggatggggtggcagtaaagggacagcttgtccttccctgggtgttctgtctctccttccctcccttccttcaagataactggccccaagagtggggcatgggaagggctggtccaggggtctgggcactgtacatacctgccccctcatccttgggtccttcattattatttattaactgaccaccatggcctgcctgccctgcctccgtcccaaccatgggctgctgctgtcactccctctccacttcagtgcatgtcttagttgctgttccctcagctcccagctccacctctggggttcagcttctgtctctgctgtcccagttttgaggtttggtttcttgtttctgtctcttgctttcgggctcctccctcccaccactccccaacttcccctagcagttgcagggaagataggacgagtagcttctgacatgtgtgcctcagatctgttccaccccactcacagtggttctgtttgctccagactggggctagggcctaatctttgaagtttgttctttggtattgatgtgggtcagaaggagcctcatcctaatctcactcaggcctccagggatccatgggggagtgaaaccaattctcagagaacaacccaccagagacttttaaagagaggccaggcttgggaatgggttgggagaggcatctgttcattggagcatgagtggatgccagaactgtaggttataaggcagtcactttttctctctactcccacccacacctgcctccctcttacccctgctcccccacactgcaggaggatttgtctctaagaggtgctgccccaaagctccccaagcatcaatactcctagggctcaggacaagtggctcccctggccaggagagccacagccatgatacagggctcttatggagccctggagttgttgggcaaggatgctgtcattttttgaaccaaaagacaaacaggttaaaaggaaaaaaagtaatctgaatttcccaagtgcctacgctgcatattccccttgttagatcccattttcatgttactttgtagccttggccagaggctcaaaaaggacacaaccagtttggggaaggggtggctaaggaagatggtataggtgaaggcggctgtgtgaccactttcccccacccttcccaccctctagacaactctctcccttacctgtttttgctatggctgtaaaggtatttttcctctgccccactccctgccatacctttatcctgggatcctattttgggcctggggtgggtatacctggggctggtcttaggagggtgctaggctgcagactgccttgtactccctggacaccctcaaatggggttttctgtgttatttcataaaattctttgaagtccaataaagcatgtaggagattttaaccac

SEQ ID NO: 30232 - DNA, 5154 bp, Homo sapiens
  source 1..5154: mol_type = unassigned DNA
gaggcgggggattggtatgcgagcgaatgtgcgaggggagggaggcgtcccggcggagcgtggtactacgaccagcgcgggccggagggggcggggggatgcgccgcggcggcggcggcgcgggagctggggttggtgtttggcggcgccagagcagcggatcccggtctcgccgcagcagcagcgcgggtgtcgtgcaccgcctgaagacgccgtacctttctaccccccaccttttttttttttttttttaaataaccggaaccaatgaacgcagccgggatcagagctccggaggccgccggtgccgatgggaccaggctggcgcccggcgggagcccgtgtctgaggcggcgggggcggccggaggagtcgccggcggcggtggtggcgcctcgcggagccggcgagctgcaggcggccggggcgccgctgcgctttcacccggcttctcctcggcgccttcatcccgcctcgactcctggcccagcgtggggctggctgctgcggcggcggcgctgggctgcgttgctggtgctcgggctgctggtagccggagcggcggacggatgcgagcttgtgccccggcacctccgcgggcggcgggcgactggctctgccgcaactgccgcctcctctcccgccgcggcggccggcgatagcccggcgctcatgacagatccctgcatgtcactgagtccaccatgctttacagaagaagacagatttagtctggaagctcttcaaacaatacataaacaaatggatgatgacaaagatggtggaattgaagtagaggaaagtgatgaattcatcagagaagatatgaaatataaagatgctactaataaacacagccatctgcacagagaagataaacatataacgattgaggatttatggaaacgatggaaaacatcagaagttcataattggacccttgaagacactcttcagtggttgatagagtttgttgaactaccccaatatgagaagaattttagagacaacaatgtcaaaggaacgacacttcccaggatagcagtgcacgaaccttcatttatgatctcccagttgaaaatcagtgaccggagtcacagacaaaaacttcagctcaaggcattggatgtggttttgtttggacctctaacacgcccacctcataactggatgaaagattttatcctcacagtttctatagtaattggtgttggaggctgctggtttgcttatacgcagaataagacatcaaaagaacatgttgcaaaaatgatgaaagatttagagagcttacaaactgcagagcaaagtctaatggacttacaggagaggcttgaaaaggcacaggaagaaaacagaaatgttgctgtagaaaagcaaaatttagagcgcaaaatgatggatgaaatcaattatgcaaaggaggaggcttgtcggctgagagagctaagggagggagctgaatgtgaattgagtagacgtcagtatgcagaacaggaattggaacaggttcgcatggctctgaaaaaggccgaaaaagaatttgaactgagaagcagttggtctgttccagatgcacttcagaaatggcttcagttaacacatgaagtagaagtgcaatactacaatattaaaagacaaaacgctgaaatgcagctagctattgctaaagatgaggcagaaaaaattaaaaagaagagaagcacagtctttgggactctgcacgttgcacacagctcctccctagatgaggtagaccacaaaattctggaagcaaagaaagctctctctgagttgacaacttgtttacgagaacgactttttcgctggcaacaaattgagaagatctgtggctttcagatagcccataactcaggactccccagcctgacctcttccctttattctgatcacagctgggtggtgatgcccagagtctccattccaccctatccaattgctggaggagttgatgacttagatgaagacacacccccaatagtgtcacaatttcccgggaccatggctaaacctcctggatcattagccagaagcagcagcctgtgccgttcacgccgcagcattgtgccgtcctcgcctcagcctcagcgagctcagcttgctccacacgccccccacccgtcacaccctcggcaccctcaccacccgcaacacacaccacactccttgccttcccctgatccagatatcctctcagtgtcaagttgccctgcgctttatcgaaatgaagaggaggaagaggccatttacttctctgctgaaaagcaatgggaagtgccagacacagcttcagaatgtgactccttaaattcttccattggaaggaaacagtctcctcctttaagcctcgagatataccaaacattatctccgcgaaagatatcaagagatgaggtgtccctagaggattcctcccgaggggattcgcctgtaactgtggatgtgtcttggggttctcccgactgtgtaggtctgacagaaactaagagtatgatcttcagtcctgcaagcaaagtgtacaatggcattttggagaaatcctgtagcatgaaccagctttccagtggcatcccggtgcctaaacctcgccacacatcatgttcctcagctggcaacgacagtaaaccagttcaggaagccccaagtgttgccagaataagcagcatcccacatgacctttgtcataatggagagaaaagcaaaaagccatcaaaaatcaaaagcctttttaagaagaaatctaagtgaactggctgacttgatggaatcatgttcaagtggcatctgtaaactattatcccccaccctccactccccaccttttttttggtttaattttaggaatgtaactccattggggctttccaggccggatgccatagtggaacatccagaagggcaactgtctactgtctgcttatttaagtgactatatataatcaattcatcaagccagttattactgaaaaatcattgaaatgagacagtttacagtcatttctgcctatttatttctgctttgttctcagtgatgtatatgcaacattttgttgaaagccacgatggacttacaagctttaatggactcgtaagccagcatgggcttgcaaaaatttcttgtttaccagagcatcttcttatctttccacagagctatttacatcctggactatataacttaaaagaagtaaaacgtaattgcactactgttttccagactggaaaaaaaaaaaatctctgcaagtgaaactgtatagagtttataaaatgactatggataggggactgttttcacttttagatcaaaatgggtttttaagtagaacctagggtttctaattgacttgatttctggaaatgaaaacccgcgcttttattatgggaagcttcttgaactgcatttactattgtgaagtttcaagtcccgctgtaaagatcatgttgttttgttttccccagggctttcactgtgatttactgcattgcaggctgtatgataaaacacacataatttaaagagagaaggctcttgattccttatgcaagtggaagagttgaaacttgattgaaggacttaaaacattcacaaccttaagccgaggtggggggatatggggattcaggcaattgtttacacactttgaataactgcaaaggatttacggtttgtgaaaaatgtgtactgtggaaaagataataaattgaagacattattgtgtgggattgtgctgatttttgttgataacacaaaaaacactatgttttctggagagctgtgtaagctgtcttgttgcttagttgcaatataagaaatagtgatgttttggacgtaagttgtcaacaaatttctattttatattgttatatttttatgtagtttgaaatgtaaaaatgttctaatatcaagattaacaaatataaatttatggtgcatttagattgcgttgtattaatttataaagtatggtgttcattaaattggtgggttgtataagggtagcttttgttgttaaaaaaacagtagagagttaagttccatatagcaacaaagtatgttaacatctagggagtttctgcttataccactttaaaaatatgcaatcataagtgatttggttactgcaatgcagatggatgtttggatgaacaactgatacattttagttagaatgctttttcagcattatggctaaaatatatgtctaacccagtgctatttaggtgaaaatgctaattgataaaccagaagtttcttttgagatttgctttaaagaaatgctttagtaagaatatgaacaatttcctgatgtctcctataaattgtgattgtttattctattactattgttaaaaacttgaatggtatttatattggctgatatttatatacttaatagattgagttctgtaagggcaaaaacggattgaaatgaacatagcgttttgcactaatgataagataacctgagaggtagggttgaggaacacagggttgaaagctgttggagaggggaaaagttgtgcataaagaactgaaaagggttctggagtgttcattcagagtgaagggaaaactttatccttctatttcttataaccagacaggaggagttcttccctttgaaaattgcaaaaggaatgagaactttgcagttggatgaatagagaagggaaaagttgctggagcacggagtgaagatgggaggagctgttagcaaggcccactgctgctcctgggtgagaagggagctctggagcaggaccagctgggggccggcactgctgcttagagtggaggaggctggccaaagagactgtgggctgttttcagtcagggagcatgtgcattgtttgtgctcaatttcagacactcatttataaacaaattcaaccaagggatatttactgctttatgttgcttatgataattattttgcattaatacagtatacacatttgtaaattcaacaggaaattattgagttttggaaagctacagtaatttctgtattacatcatttatatgtgaaaagttggacatttctgtaagtttttaaaattatccatttgttactttaacattttaaaattatggtgttttcctgattttaaaagcaatattttccttactgt

SEQ ID NO: 30233 - DNA, 5178 bp, Homo sapiens
  source 1..5178: mol_type = unassigned DNA
gaggcgggggattggtatgcgagcgaatgtgcgaggggagggaggcgtcccggcggagcgtggtactacgaccagcgcgggccggagggggcggggggatgcgccgcggcggcggcggcgcgggagctggggttggtgtttggcggcgccagagcagcggatcccggtctcgccgcagcagcagcgcgggtgtcgtgcaccgcctgaagacgccgtacctttctaccccccaccttttttttttttttttttaaataaccggaaccaatgaacgcagccgggatcagagctccggaggccgccggtgccgatgggaccaggctggcgcccggcgggagcccgtgtctgaggcggcgggggcggccggaggagtcgccggcggcggtggtggcgcctcgcggagccggcgagctgcaggcggccggggcgccgctgcgctttcacccggcttctcctcggcgccttcatcccgcctcgactcctggcccagcgtggggctggctgctgcggcggcggcgctgggctgcgttgctggtgctcgggctgctggtagccggagcggcggacggatgcgagcttgtgccccggcacctccgcgggcggcgggcgactggctctgccgcaactgccgcctcctctcccgccgcggcggccggcgatagcccggcgctcatgacagatccctgcatgtcactgagtccaccatgctttacagaagaagacagatttagtctggaagctcttcaaacaatacataaacaaatggatgatgacaaagatggtggaattgaagtagaggaaagtgatgaattcatcagagaagatatgaaatataaagatgctactaataaacacagccatctgcacagagaagataaacatataacgattgaggatttatggaaacgatggaaaacatcagaagttcataattggacccttgaagacactcttcagtggttgatagagtttgttgaactaccccaatatgagaagaattttagagacaacaatgtcaaaggaacgacacttcccaggatagcagtgcacgaaccttcatttatgatctcccagttgaaaatcagtgaccggagtcacagacaaaaacttcagctcaaggcattggatgtggttttgtttggacctctaacacgcccacctcataactggatgaaagattttatcctcacagtttctatagtaattggtgttggaggctgctggtttgcttatacgcagaataagacatcaaaagaacatgttgcaaaaatgatgaaagatttagagagcttacaaactgcagagcaaagtctaatggacttacaggagaggcttgaaaaggcacaggaagaaaacagaaatgttgctgtagaaaagcaaaatttagagcgcaaaatgatggatgaaatcaattatgcaaaggaggaggcttgtcggctgagagagctaagggagggagctgaatgtgaattgagtagacgtcagtatgcagaacaggaattggaacaggttcgcatggctctgaaaaaggccgaaaaagaatttgaactgagaagcagttggtctgttccagatgcacttcagaaatggcttcagttaacacatgaagtagaagtgcaatactacaatattaaaagacaaaacgctgaaatgcagctagctattgctaaagatgaggttgctgcttcatatctgattcaggcagaaaaaattaaaaagaagagaagcacagtctttgggactctgcacgttgcacacagctcctccctagatgaggtagaccacaaaattctggaagcaaagaaagctctctctgagttgacaacttgtttacgagaacgactttttcgctggcaacaaattgagaagatctgtggctttcagatagcccataactcaggactccccagcctgacctcttccctttattctgatcacagctgggtggtgatgcccagagtctccattccaccctatccaattgctggaggagttgatgacttagatgaagacacacccccaatagtgtcacaatttcccgggaccatggctaaacctcctggatcattagccagaagcagcagcctgtgccgttcacgccgcagcattgtgccgtcctcgcctcagcctcagcgagctcagcttgctccacacgccccccacccgtcacaccctcggcaccctcaccacccgcaacacacaccacactccttgccttcccctgatccagatatcctctcagtgtcaagttgccctgcgctttatcgaaatgaagaggaggaagaggccatttacttctctgctgaaaagcaatgggaagtgccagacacagcttcagaatgtgactccttaaattcttccattggaaggaaacagtctcctcctttaagcctcgagatataccaaacattatctccgcgaaagatatcaagagatgaggtgtccctagaggattcctcccgaggggattcgcctgtaactgtggatgtgtcttggggttctcccgactgtgtaggtctgacagaaactaagagtatgatcttcagtcctgcaagcaaagtgtacaatggcattttggagaaatcctgtagcatgaaccagctttccagtggcatcccggtgcctaaacctcgccacacatcatgttcctcagctggcaacgacagtaaaccagttcaggaagccccaagtgttgccagaataagcagcatcccacatgacctttgtcataatggagagaaaagcaaaaagccatcaaaaatcaaaagcctttttaagaagaaatctaagtgaactggctgacttgatggaatcatgttcaagtggcatctgtaaactattatcccccaccctccactccccaccttttttttggtttaattttaggaatgtaactccattggggctttccaggccggatgccatagtggaacatccagaagggcaactgtctactgtctgcttatttaagtgactatatataatcaattcatcaagccagttattactgaaaaatcattgaaatgagacagtttacagtcatttctgcctatttatttctgctttgttctcagtgatgtatatgcaacattttgttgaaagccacgatggacttacaagctttaatggactcgtaagccagcatgggcttgcaaaaatttcttgtttaccagagcatcttcttatctttccacagagctatttacatcctggactatataacttaaaagaagtaaaacgtaattgcactactgttttccagactggaaaaaaaaaaaatctctgcaagtgaaactgtatagagtttataaaatgactatggataggggactgttttcacttttagatcaaaatgggtttttaagtagaacctagggtttctaattgacttgatttctggaaatgaaaacccgcgcttttattatgggaagcttcttgaactgcatttactattgtgaagtttcaagtcccgctgtaaagatcatgttgttttgttttccccagggctttcactgtgatttactgcattgcaggctgtatgataaaacacacataatttaaagagagaaggctcttgattccttatgcaagtggaagagttgaaacttgattgaaggacttaaaacattcacaaccttaagccgaggtggggggatatggggattcaggcaattgtttacacactttgaataactgcaaaggatttacggtttgtgaaaaatgtgtactgtggaaaagataataaattgaagacattattgtgtgggattgtgctgatttttgttgataacacaaaaaacactatgttttctggagagctgtgtaagctgtcttgttgcttagttgcaatataagaaatagtgatgttttggacgtaagttgtcaacaaatttctattttatattgttatatttttatgtagtttgaaatgtaaaaatgttctaatatcaagattaacaaatataaatttatggtgcatttagattgcgttgtattaatttataaagtatggtgttcattaaattggtgggttgtataagggtagcttttgttgttaaaaaaacagtagagagttaagttccatatagcaacaaagtatgttaacatctagggagtttctgcttataccactttaaaaatatgcaatcataagtgatttggttactgcaatgcagatggatgtttggatgaacaactgatacattttagttagaatgctttttcagcattatggctaaaatatatgtctaacccagtgctatttaggtgaaaatgctaattgataaaccagaagtttcttttgagatttgctttaaagaaatgctttagtaagaatatgaacaatttcctgatgtctcctataaattgtgattgtttattctattactattgttaaaaacttgaatggtatttatattggctgatatttatatacttaatagattgagttctgtaagggcaaaaacggattgaaatgaacatagcgttttgcactaatgataagataacctgagaggtagggttgaggaacacagggttgaaagctgttggagaggggaaaagttgtgcataaagaactgaaaagggttctggagtgttcattcagagtgaagggaaaactttatccttctatttcttataaccagacaggaggagttcttccctttgaaaattgcaaaaggaatgagaactttgcagttggatgaatagagaagggaaaagttgctggagcacggagtgaagatgggaggagctgttagcaaggcccactgctgctcctgggtgagaagggagctctggagcaggaccagctgggggccggcactgctgcttagagtggaggaggctggccaaagagactgtgggctgttttcagtcagggagcatgtgcattgtttgtgctcaatttcagacactcatttataaacaaattcaaccaagggatatttactgctttatgttgcttatgataattattttgcattaatacagtatacacatttgtaaattcaacaggaaattattgagttttggaaagctacagtaatttctgtattacatcatttatatgtgaaaagttggacatttctgtaagtttttaaaattatccatttgttactttaacattttaaaattatggtgttttcctgattttaaaagcaatattttccttactgt

SEQ ID NO: 30234 - DNA, 3922 bp, Homo sapiens
  source 1..3922: mol_type = unassigned DNA
ccgcggcggcggcggcgcgggagctggggttggtgtttggcggcgccagagcagcggatcccggtctcgccgcagcagcagcgcgggtgtcgtgcaccgcctgaagacgccgtacctttctaccccccaccttttttttttttttttttaaataaccggaaccaatgaacgcagccgggatcagagctccggaggccgccggtgccgatgggaccaggctggcgcccggcgggagcccgtgtctgaggcggcgggggcggccggaggagtcgccggcggcggtggtggcgcctcgcggagccggcgagctgcaggcggccggggcgccgctgcgctttcacccggcttctcctcggcgccttcatcccgcctcgactcctggcccagcgtggggctggctgctgcggcggcggcgctgggctgcgttgctggtgctcgggctgctggtagccggagcggcggacggatgcgagcttgtgccccggcacctccgcgggcggcgggcgactggctctgccgcaactgccgcctcctctcccgccgcggcggccggcgatagcccggcgctcatgacagatccctgcatgtcactgagtccaccatgctttacagaagaagacagatttagtctggaagctcttcaaacaatacataaacaaatggatgatgacaaagatggtggaattgaagtagaggaaagtgatgaattcatcagagaagatatgaaatataaagatgctactaataaacacagccatctgcacagagaagataaacatataacgattgaggatttatggaaacgatggaaaacatcagaagttcataattggacccttgaagacactcttcagtggttgatagagtttgttgaactaccccaatatgagaagaattttagagacaacaatgtcaaaggaacgacacttcccaggatagcagtgcacgaaccttcatttatgatctcccagttgaaaatcagtgaccggagtcacagacaaaaacttcagctcaaggcattggatgtggttttgtttggacctctaacacgcccacctcataactggatgaaagattttatcctcacagtttctatagtaattggtgttggaggctgctggtttgcttatacgcagaataagacatcaaaagaacatgttgcaaaaatgatgaaagatttagagagcttacaaactgcagagcaaagtctaatggacttacaggagaggcttgaaaaggcacaggaagaaaacagaaatgttgctgtagaaaagcaaaatttagagcgcaaaatgatggatgaaatcaattatgcaaaggaggaggcttgtcggctgagagagctaagggagggagctgaatgtgaattgagtagacgtcagtatgcagaacaggaattggaacaggttcgcatggctctgaaaaaggccgaaaaagaatttgaactgagaagcagttggtctgttccagatgcacttcagaaatggcttcagttaacacatgaagtagaagtgcaatactacaatattaaaagacaaaacgctgaaatgcagctagctattgctaaagatgaggcagaaaaaattaaaaagaagagaagcacagtctttgggactctgcacgttgcacacagctcctccctagatgaggtagaccacaaaattctggaagcaaagaaagctctctctgagttgacaacttgtttacgagaacgactttttcgctggcaacaaattgagaagatctgtggctttcagatagcccataactcaggactccccagcctgacctcttccctttattctgatcacagctgggtggtgatgcccagagtctccattccaccctatccaattgctggaggagttgatgacttagatgaagacacacccccaatagtgtcacaatttcccgggaccatggctaaacctcctggatcattagccagaagcagcagcctgtgccgttcacgccgcagcattgtgccgtcctcgcctcagcctcagcgagctcagcttgctccacacgccccccacccgtcacaccctcggcaccctcaccacccgcaacacacaccacactccttgccttcccctgatccagatatcctctcagtgtcaagttgccctgcgctttatcgaaatgaagaggaggaagaggccatttacttctctgctgaaaagcaatgtattcaccttgggctcggtgcgtgcaaaagtgaatgagactaagtagtaaagctctcaaaaaaaaaaaggaagtgccagacacagcttcagaatgtgactccttaaattcttccattggaaggaaacagtctcctcctttaagcctcgagatataccaaacattatctccgcgaaagatatcaagagatgaggtgtccctagaggattcctcccgaggggattcgcctgtaactgtggatgtgtcttggggttctcccgactgtgtaggtctgacagaaactaagagtatgatcttcagtcctgcaagcaaagtgtacaatggcattttggagaaatcctgtagcatgaaccagctttccagtggcatcccggtgcctaaacctcgccacacatcatgttcctcagctggcaacgacagtaaaccagttcaggaagccccaagtgttgccagaataagcagcatcccacatgacctttgtcataatggagagaaaagcaaaaagccatcaaaaatcaaaagcctttttaagaagaaatctaagtgaactggctgacttgatggaatcatgttcaagtggcatctgtaaactattatcccccaccctccactccccaccttttttttggtttaattttaggaatgtaactccattggggctttccaggccggatgccatagtggaacatccagaagggcaactgtctactgtctgcttatttaagtgactatatataatcaattcatcaagccagttattactgaaaaatcattgaaatgagacagtttacagtcatttctgcctatttatttctgctttgttctcagtgatgtatatgcaacattttgttgaaagccacgatggacttacaagctttaatggactcgtaagccagcatgggcttgcaaaaatttcttgtttaccagagcatcttcttatctttccacagagctatttacatcctggactatataacttaaaagaagtaaaacgtaattgcactactgttttccagactggaaaaaaaaaaaatctctgcaagtgaaactgtatagagtttataaaatgactatggataggggactgttttcacttttagatcaaaatgggtttttaagtagaacctagggtttctaattgacttgatttctggaaatgaaaacccgcgcttttattatgggaagcttcttgaactgcatttactattgtgaagtttcaagtcccgctgtaaagatcatgttgttttgttttccccagggctttcactgtgatttactgcattgcaggctgtatgataaaacacacataatttaaagagagaaggctcttgattccttatgcaagtggaagagttgaaacttgattgaaggacttaaaacattcacaaccttaagccgaggtggggggatatggggattcaggcaattgtttacacactttgaataactgcaaaggatttacggtttgtgaaaaatgtgtactgtggaaaagataataaattgaagacattattgtgtgggattgtgctgatttttgttgataacacaaaaaacactatgttttctggagagctgtgtaagctgtcttgttgcttagttgcaatataagaaatagtgatgttttggacgtaagttgtcaacaaatttctattttatattgttatatttttatgtagtttgaaatgtaaaaatgttctaatatcaagattaacaaatataaatttatggtgcattt

SEQ ID NO: 30235 - DNA, 5154 bp, Homo sapiens; identical to SEQ ID NO: 30232
  source 1..5154: mol_type = unassigned DNA

SEQ ID NO: 30236 - DNA, 3613 bp, Homo sapiens
  source 1..3613: mol_type = unassigned DNA
agagcagcggatcccggtctcgccgcagcagcagcgcgggtgtcgtgcaccgcctgaagacgccgtacctttctaccccccaccttttttttttttttttttaaataaccggaaccaatgaacgcagccgggatcagagctccggaggccgccggtgccgatgggaccaggctggcgcccggcgggagcccgtgtctgaggcggcgggggcggccggaggagtcgccggcggcggtggtggcgcctcgcggagccggcgagctgcaggcggccggggcgccgctgcgctttcacccggcttctcctcggcgccttcatcccgcctcgactcctggcccagcgtggggctggctgctgcggcggcggcgctgggctgcgttgctggtgctcgggctgctggtagccggagcggcggacggatgcgagcttgtgccccggcacctccgcgggcggcgggcgactggctctgccgcaactgccgcctcctctcccgccgcggcggccggcgatagcccggcgctcatgacagatccctgcatgtcactgagtccaccatgctttacagaagaagacagatttagtctggaagctcttcaaacaatacataaacaaatggatgatgacaaagatggtggaattgaagtagaggaaagtgatgaattcatcagagaagatatgaaatataaagatgctactaataaacacagccatctgcacagagaagataaacatataacgattgaggatttatggaaacgatggaaaacatcagaagttcataattggacccttgaagacactcttcagtggttgatagagtttgttgaactaccccaatatgagaagaattttagagacaacaatgtcaaaggaacgacacttcccaggatagcagtgcacgaaccttcatttatgatctcccagttgaaaatcagtgaccggagtcacagacaaaaacttcagctcaaggcattggatgtggttttgtttggacctctaacacgcccacctcataactggatgaaagattttatcctcacagtttctatagtaattggtgttggaggctgctggtttgcttatacgcagaataagacatcaaaagaacatgttgcaaaaatgatgaaagatttagagagcttacaaactgcagagcaaagtctaatggacttacaggagaggcttgaaaaggcacaggaagaaaacagaaatgttgctgtagaaaagcaaaatttagagcgcaaaatgatggatgaaatcaattatgcaaaggaggaggcttgtcggctgagagagctaagggagggagctgaatgtgaattgagtagacgtcagtatgcagaacaggaattggaacaggttcgcatggctctgaaaaaggccgaaaaagaatttgaactgagaagcagttggtctgttccagatgcacttcagaaatggcttcagttaacacatgaagtagaagtgcaatactacaatattaaaagacaaaacgctgaaatgcagctagctattgctaaagatgaggttgctgcttcatatctgattcaggcagaaaaaattaaaaagaagagaagcacagtctttgggactctgcacgttgcacacagctcctccctagatgaggtagaccacaaaattctggaagcaaagaaagctctctctgagttgacaacttgtttacgagaacgactttttcgctggcaacaaattgagaagatctgtggctttcagatagcccataactcaggactccccagcctgacctcttccctttattctgatcacagctgggtggtgatgcccagagtctccattccaccctatccaattgctggaggagttgatgacttagatgaagacacacccccaatagtgtcacaatttcccgggaccatggctaaacctcctggatcattagccagaagcagcagcctgtgccgttcacgccgcagcattgtgccgtcctcgcctcagcctcagcgagctcagcttgctccacacgccccccacccgtcacaccctcggcaccctcaccacccgcaacacacaccacactccttgccttcccctgatccagatatcctctcagtgtcaagttgccctgcgctttatcgaaatgaagaggaggaagaggccatttacttctctgctgaaaagcaatgggaagtgccagacacagcttcagaatgtgactccttaaattcttccattggaaggaaacagtctcctcctttaagcctcgagatataccaaacattatctccgcgaaagatatcaagagatgaggtgtccctagaggattcctcccgaggggattcgcctgtaactgtggatgtgtcttggggttctcccgactgtgtaggtctgacagaaactaagagtatgatcttcagtcctgcaagcaaagtgtacaatggcattttggagaaatcctgtagcatgaaccagctttccagtggcatcccggtgcctaaacctcgccacacatcatgttcctcagctggcaacgacagtaaaccagttcaggaagccccaagtgttgccagaataagcagcatcccacatgacctttgtcataatggagagaaaagcaaaaagccatcaaaaatcaaaagcctttttaagaagaaatctaagtgaactggctgacttgatggaatcatgttcaagtggcatctgtaaactattatcccccaccctccactccccaccttttttttggtttaattttaggaatgtaactccattggggctttccaggccggatgccatagtggaacatccagaagggcaactgtctactgtctgcttatttaagtgactatatataatcaattcatcaagccagttattactgaaaaatcattgaaatgagacagtttacagtcatttctgcctatttatttctgctttgttctcagtgatgtatatgcaacattttgttgaaagccacgatggacttacaagctttaatggactcgtaagccagcatgggcttgcaaaaatttcttgtttaccagagcatcttcttatctttccacagagctatttacatcctggactatataacttaaaagaagtaaaacgtaattgcactactgttttccagactggaaaaaaaaaaaatctctgcaagtgaaactgtatagagtttataaaatgactatggataggggactgttttcacttttagatcaaaatgggtttttaagtagaacctagggtttctaattgacttgatttctggaaatgaaaacccgcgcttttattatgggaagcttcttgaactgcatttactattgtgaagtttcaagtcccgctgtaaagatcatgttgttttgttttccccagggctttcactgtgatttactgcattgcaggctgtatgataaaacacacataatttaaagagagaaggctcttgattccttatgcaagtggaagagttgaaacttgattgaaggacttaaaacattcacaaccttaagccgaggtggggggatatggggattcaggcaattgtttacacactttgaataactgcaaaggatttacggtttgtgaaaaatgtgtactgtggaaaagataataaattgaagacattattgtg

SEQ ID NO: 30237 - DNA, 3925 bp, Homo sapiens
  source 1..3925: mol_type = unassigned DNA
ccgcggcggcggcggcgcgggagctggggttggtgtttggcggcgccagagcagcggatcccggtctcgccgcagcagcagcgcgggtgtcgtgcaccgcctgaagacgccgtacctttctaccccccaccttttttttttttttttttaaataaccggaaccaatgaacgcagccgggatcagagctccggaggccgccggtgccgatgggaccaggctggcgcccggcgggagcccgtgtctgaggcggcgggggcggccggaggagtcgccggcggcggtggtggcgcctcgcggagccggcgagctgcaggcggccggggcgccgctgcgctttcacccggcttctcctcggcgccttcatcccgcctcgactcctggcccagcgtggggctggctgctgcggcggcggcgctgggctgcgttgctggtgctcgggctgctggtagccggagcggcggacggatgcgagcttgtgccccggcacctccgcgggcggcgggcgactggctctgccgcaactgccgcctcctctcccgccgcggcggccggcgatagcccggcgctcatgacagatccctgcatgtcactgagtccaccatgctttacagaagaagacagatttagtctggaagctcttcaaacaatacataaacaaatggatgatgacaaagatggtggaattgaagtagaggaaagtgatgaattcatcagagaagatatgaaatataaagatgctactaataaacacagccatctgcacagagaagataaacatataacgattgaggatttatggaaacgatggaaaacatcagaagttcataattggacccttgaagacactcttcagtggttgatagagtttgttgaactaccccaatatgagaagaattttagagacaacaatgtcaaaggaacgacacttcccaggatagcagtgcacgaaccttcatttatgatctcccagttgaaaatcagtgaccggagtcacagacaaaaacttcagctcaaggcattggatgtggttttgtttggacctctaacacgcccacctcataactggatgaaagattttatcctcacagtttctatagtaattggtgttggaggctgctggtttgcttatacgcagaataagacatcaaaagaacatgttgcaaaaatgatgaaagatttagagagcttacaaactgcagagcaaagtctaatggacttacaggagaggcttgaaaaggcacaggaagaaaacagaaatgttgctgtagaaaagcaaaatttagagcgcaaaatgatggatgaaatcaattatgcaaaggaggaggcttgtcggctgagagagctaagggagggagctgaatgtgaattgagtagacgtcagtatgcagaacaggaattggaacaggttcgcatggctctgaaaaaggccgaaaaagaatttgaactgagaagcagttggtctgttccagatgcacttcagaaatggcttcagttaacacatgaagtagaagtgcaatactacaatattaaaagacaaaacgctgaaatgcagctagctattgctaaagatgaggcagaaaaaattaaaaagaagagaagcacagtctttgggactctgcacgttgcacacagctcctccctagatgaggtagaccacaaaattctggaagcaaagaaagctctctctgagttgacaacttgtttacgagaacgactttttcgctggcaacaaattgagaagatctgtggctttcagatagcccataactcaggactccccagcctgacctcttccctttattctgatcacagctgggtggtgatgcccagagtctccattccaccctatccaattgctggaggagttgatgacttagatgaagacacacccccaatagtgtcacaatttcccgggaccatggctaaacctcctggatcattagccagaagcagcagcctgtgccgttcacgccgcagcattgtgccgtcctcgcctcagcctcagcgagctcagcttgctccacacgccccccacccgtcacaccctcggcaccctcaccacccgcaacacacaccacactccttgccttcccctgatccagatatcctctcagtgtcaagttgccctgcgctttatcgaaatgaagaggaggaagaggccatttacttctctgctgaaaagcaatgtattcaccttgggctcggtgcgtgcaaaagtgaatgagactaagtagtaaagctctcaaaaaaaaaaaggaagtgccagacacagcttcagaatgtgactccttaaattcttccattggaaggaaacagtctcctcctttaagcctcgagatataccaaacattatctccgcgaaagatatcaagagatgaggtgtccctagaggattcctcccgaggggattcgcctgtaactgtggatgtgtcttggggttctcccgactgtgtaggtctgacagaaactaagagtatgatcttcagtcctgcaagcaaagtgtacaatggcattttggagaaatcctgtagcatgaaccagctttccagtggcatcccggtgcctaaacctcgccacacatcatgttcctcagctggcaacgacagtaaaccagttcaggaagccccaagtgttgccagaataagcagcatcccacatgacctttgtcataatggagagaaaagcaaaaagccatcaaaaatcaaaagcctttttaagaagaaatctaagtgaactggctgacttgatggaatcatgttcaagtggcatctgtaaactattatcccccaccctccactccccaccttttttttggtttaattttaggaatgtaactccattggggctttccaggccggatgccatagtggaacatccagaagggcaactgtctactgtctgcttatttaagtgactatatataatcaattcatcaagccagttattactgaaaaatcattgaaatgagacagtttacagtcatttctgcctatttatttctgctttgttctcagtgatgtatatgcaacattttgttgaaagccacgatggacttacaagctttaatggactcgtaagccagcatgggcttgcaaaaatttcttgtttaccagagcatcttcttatctttccacagagctatttacatcctggactatataacttaaaagaagtaaaacgtaattgcactactgttttccagactggaaaaaaaaaaaatctctgcaagtgaaactgtatagagtttataaaatgactatggataggggactgttttcacttttagatcaaaatgggtttttaagtagaacctagggtttctaattgacttgatttctggaaatgaaaacccgcgcttttattatgggaagcttcttgaactgcatttactattgtgaagtttcaagtcccgctgtaaagatcatgttgttttgttttccccagggctttcactgtgatttactgcattgcaggctgtatgataaaacacacataatttaaagagagaaggctcttgattccttatgcaagtggaagagttgaaacttgattgaaggacttaaaacattcacaaccttaagccgaggtggggggatatggggattcaggcaattgtttacacactttgaataactgcaaaggatttacggtttgtgaaaaatgtgtactgtggaaaagataataaattgaagacattattgtgtgggattgtgctgatttttgttgataacacaaaaaacactatgttttctggagagctgtgtaagctgtcttgttgcttagttgcaatataagaaatagtgatgttttggacgtaagttgtcaacaaatttctattttatattgttatatttttatgtagtttgaaatgtaaaaatgttctaatatcaagattaacaaatataaatttatggtgcatttaga

SEQ ID NO: 30238 - DNA, 4114 bp, Homo sapiens
  source 1..4114: mol_type = unassigned DNA
ttttgtttggctgaggggagcgagcggcgctttgggggaggggtcgcgtaggcgcctcacctgaccctgcggccgtgcggttgctgctccggggcaggtctccttccaggccaggggcccggaatcatgtacataaagcaggtgattatccagggttttcgaagttacagagatcaaacaattgtagatcccttcagttcaaaacataatgtgattgtgggcagaaatggatctggaaaaagtaactttttttatgcaattcagtttgttctcagtgatgagtttagtcatcttcgtccagaacagcggttggctttattgcatgaaggtactggtcctcgtgttatttctgcttttgtggagattatttttgataattcagacaaccggttaccaatcgataaagaggaagtttcacttcgaagagttattggtgccaaaaaggatcagtatttcttagacaagaagatggtcacgaaaaatgatgtgatgaacctccttgaaagcgctggtttttctcgaagcaatccttattatattgttaaacaaggaaagatcaaccagatggcaacagcaccagattctcagagattaaagctattaagagaagtagctggtactagagtgtatgacgaacgaaaggaagaaagcatctccttaatgaaagaaacagagggcaaacgggaaaaaatcaatgagttgttaaaatacattgaagagagattacatactctagaggaagaaaaggaagaactagctcagtatcagaagtgggataaaatgagacgagccctggaatataccatttacaatcaggaacttaacgagactcgtgccaaacttgatgagctttctgctaagcgagagactagtggagaaaaatccagacaattaagagatgctcagcaggatgcaagagataaaatggaggatatcgaacgccaagttagagaattgaaaacaaaaatttcagctatgaaagaagaaaaagaacagcttagtgctgaaagacaagagcagattaagcagaggactaagttggagcttaaagccaaggatttacaagatgaactagcaggcaatagtgaacaaaggaaacgtttattaaaagagaggcagaagctgcttgaaaaaatagaagaaaagcagaaagaactggcagaaacagaacccaaattcaacagtgtgaaagagaaagaagaacgaggaattgctagattggctcaagctacccaggaaagaacggatctttatgcaaagcagggtcgaggaagccagtttacatcaaaagaagaaagggataagtggattaaaaaggaactcaagtctttagatcaggctattaatgacaagaaaagacagattgctgctatacataaggatttggaagacactgaagcaaataaagagaaaaatctggagcagtataataaactggaccaggatcttaatgaagtcaaagctcgagtagaagaactggacagaaaatattacgaagtaaaaaataagaaagatgaactacaaagtgaaagaaactacttgtggagagaagagaatgcagaacagcaagcacttgctgctaaaagagaagatcttgaaaagaagcaacaacttcttagagcagcaacaggaaaggccattttaaatggaatagacagcataaacaaagtgctagaccacttccgtcgaaaaggaataaaccagcatgttcaaaatggctatcatggtattgtaatgaataactttgaatgtgaaccagctttctacacatgcgtggaagtcactgctggaaacaggttattttatcacattgttgattcagatgaagtcagcacgaagattttaatggagtttaataaaatgaatcttcctggagaggttacttttctgcctcttaacaagttagatgtcagggatacagcctatcctgaaaccaatgatgctattcctatgatcagcaaactgaggtacaatcccagatttgacaaagctttcaaacatgtgtttggaaagactcttatttgtcgtagcatggaagtttcaacccagctggcccgtgctttcactatggactgtattactttggaaggtgaccaagtcagccatcggggtgctctaactgggggttattatgacacaaggaagtctcgacttgaattgcaaaaagatgttagaaaagcagaagaagaactaggtgaacttgaagcaaagctcaatgaaaacctgcgcagaaatattgaaaggattaataatgaaattgatcagttgatgaaccaaatgcaacagatcgagacccagcaaaggaaatttaaagcatctagagatagcatattatcagaaatgaagatgctaaaagagaagaggcagcagtcagagaaaaccttcatgcctaagcaacgtagcttacagagtttggaggcaagcttgcatgctatggagtctaccagagagtcattgaaagcagaactgggaactgatttgctttctcaactgagtttggaagatcagaagagagtagatgcactgaatgatgagattcgtcaacttcagcaggaaaacagacagttgctaaatgaaagaattaaattagaaggtattattactcgagtagagacttatctcaatgagaatctgagaaaacgcttggaccaagtagaacaggaacttaatgagctgagagagacagaagggggtactgttctcacagccacaacatcagaacttgaagccatcaataaaagagtaaaagacactatggcacgatcagaagatttggacaattccattgataaaacagaagctggaattaaggagcttcagaagagtatggagcgctggaaaaatatggaaaaagaacatatggatgctataaatcatgatactaaagaactggaaaagatgacaaatcggcaaggcatgctattgaagaagaaagaagagtgtatgaagaaaattcgagaacttggatcacttccccaggaagcatttgaaaagtaccagacactgagcctcaaacagttgtttcgaaaacttgagcagtgcaacacagaattaaagaagtacagccatgttaacaaaaaggctttggatcagtttgtaaatttctccgagcagaaagaaaagttaataaagcgtcaagaagagttagataggggttacaaatcaatcatggaactgatgaatgtacttgaacttcggaaatatgaagctattcagttaactttcaaacaggtatctaagaacttcagtgaagtattccagaagttagtacctggtggcaaagctactttggtgatgaagaaaggagatgtggagggcagtcagtctcaagatgaaggagaagggagtggtgagagtgagaggggttctggctcacaaagcagtgtcccatcagttgaccagtttactggagttggaattagggtgtcatttacaggaaaacaaggtgaaatgagagaaatgcaacagctttcaggtggacagaaatccttggtagcccttgctctgatttttgccattcagaaatgtgacccggctccattttacttgtttgatgaaattgaccaggctctggatgctcagcacagaaaggctgtgtcagatatgattatggaacttgctgtacatgctcagtttattacaactacttttaggcctgaactgcttgagtcagctgacaaattctatggtgtaaagttcagaaataaggttagtcatattgatgtgatcacagcagagatggccaaagactttgtagaagatgataccacacatggttaattggaaaatactacctactggtttgggagatgtatatagtaatatgattctcatacccaggaactgtaaatttaaacctaaatatttggccaatagttttcagacttaaagcatcatagtccttttatatttgtctttgtattttataagatactctgtaatgtcatgtttgtactgatagtttaagaatttaatttcctgtacaactttttgtaaaatgttctgctcctattttaaatgttttgaaacatgctaaatattctttcctaattattttatcacttatactaccttttttatagcttcaattaaataatcggttttatgactaata

SEQ ID NO: 30239 - DNA, 5921 bp, Homo sapiens
  source 1..5921: mol_type = unassigned DNA
cgcctgggctgccggacggtgggaacggaagtcgctgtgggacgctgaggaagccaggatggcgactccgagcaagaagacgtcaactccaagcccccagccttccaagagagctctcccgagagacccttcgtcggaggtcccgagcaagaggaagaattcggccccgcagctgccgctgttgcagtcgtccgggcctttcgtggaaggctctatcgtccgcatctcgatggagaacttcctaacatatgatatttgtgaagtatctcctggaccccacttgaatatgatcgttggagccaatggaacagggaagtcgagcattgtgtgtgccatttgccttggtttagctggaaaacctgctttcatgggacgagcagataaggttgggttttttgtgaagagaggatgttctagaggcatggttgaaattgaattgttcagggcttctggaaatcttgtaatcacccgtgagattgatgtggcaaaaaatcagtccttttggttcatcaacaaaaaatctacaacccagaaaatagtggaagagaaagttgcagccttaaatattcaagtggggaatctttgccagtttctccctcaggacaaagttggagaatttgctaaactcagcaaaattgaactcctcgaagccactgaaaagtcaattggtcccccagaaatgcacaaatatcactgtgaactcaaaaacttaagggagaaagaaaaacagctcgagacctcatgcaaagagaaaactgagtatctacagaaaatggttcagaggaatgaaagatataaacaagatgtggagaggttctatgaacggaagcgacatttagatttaattgagatgcttgaagcaaaaaggccatgggtggaatatgaaaatgttcgtcaggaatatgaagaagtaaaactagttcgtgaccgagtgaaggaagaggtcagaaaacttaaagaagggcagattcctgtaacatgtcgaattgaagaaatggaaaacgagcgtcacaatttggaggctcgaatcaaagaaaaggcaacagatattaaggaggcatctcaaaaatgcaaacagaagcaagatgttatagaaaggaaagataaacatattgaggaacttcagcaggctttaatagtaaagcaaaatgaagagcttgaccgacagaggagaataggtaatacccgcaaaatgatagaggatttgcaaaatgaactaaagaccacggaaaactgcgagaatcttcagccccagattgatgccattacaaatgatctgagacggattcaggatgaaaaggcattatgtgaaggcgaaataattgataagcgaagagagagggaaactctagagaaggagaaaaagagtgtggacgatcatattgtacgttttgacaatcttatgaatcagaaggaagataagctaagacagagattccgtgacacgtatgatgctgttttatggctaagaaataacagagacaaatttaaacaaagagtctgtgagcccataatgctcacgatcaatatgaaagataataaaaatgccaaatatattgaaaatcatattccatcaaatgacttaagagcctttgtatttgaaagtcaagaagatatggaggttttcctcaaagaggttcgtgacaataaaaaattaagagtaaatgctgttattgctcccaagagttcatatgcagacaaagcaccttcaagatctttgaatgaacttaaacaatacggatttttctcttatttgagagaattatttgatgcacctgatcctgtaatgagttacctttgctgtcagtatcatattcatgaagttcctgtaggaactgaaaagaccagagaaagaattgaacgggtaatacaagaaacccgattaaaacagatttatacagcagaagaaaagtatgtggtgaaaacttctttttattcaaacaaagttatttctagtaacacatctctaaaagtagcgcagtttctcactgtcactgtggacctagagcagagaagacacttagaagaacagctaaaggaaattcatagaaaattgcaagcagtggattcagggttgattgccttacgtgaaacaagcaaacatctggagcacaaagacaatgaacttagacaaaagaagaaggagcttcttgagagaaaaaccaagaaaagacaactggaacaaaaaatcagttccaaactaggaagtttaaagctgatggaacaggatacttgcaatcttgaagaggaagagcgaaaagcaagtaccaaaatcaaagaaataaatgttcaaaaagcgaaacttgttaccgaattaacaaacctaataaagatttgtacttctttgcatatacaaaaagtagatttaattctccaaaatactacagtgatctctgagaagaacaaattagaatcagattatatggccgcatcttcacaactccgtcttacagagcaacatttcattgaattggatgaaaatagacagagattattgcagaaatgcaaggaacttatgaaaagagctaggcaagtatgtaacctgggtgcagagcagactcttcctcaagaataccagacacaagtacccaccattccaaatggacacaactcctcactccccatggttttccaagaccttccaaacacattggatgaaattgatgctttattaactgaagaaagatcaagagcttcctgcttcacgggactgaatcctacaattgttcaggaatatacaaaaagagaagaagaaatagaacagttaactgaggaactaaagggaaagaaagttgaactagatcaatacagggaaaacatttcacaggtaaaagaaaggtggcttaatcctttaaaagagctggtagaaaaaattaatgaaaaattcagcaatttttttagttccatgcagtgtgctggtgaagttgatctccatacagaaaatgaggaagattatgataaatatggaattcgaattagagtcaaatttcgaagtagtactcaactgcatgaattaactcctcatcatcaaagtggaggtgaaagaagtgtttctaccatgttatacttgatggcacttcaggagctaaatagatgtccattcagagtagttgatgaaatcaatcagggaatggacccaatcaatgaacggagagtgtttgaaatggttgtaaatactgcctgtaaagaaaatacatctcaatactttttcataacaccaaagctcctgcaaaatcttccttattctgaaaagatgacagttttgtttgtctacaatggccctcatatgctggaaccaaacacatggaatttaaaggctttccaaaggcggcggcgccgtattacattcactcaaccttcttaataaaagtaaagagagggaacttgggaattttttttgttaaattctgtttataagtatggctcaactgaataaaaggagattcactaaaacgaaaagcagttatttttggaaacctgcttttaaatacaaataggttgataatggaaactataatgacctttccaaaatagcagctggtagtaaaagttaagtcttcttcagtcttggttgaacttgagttcttggcactctgaccatgagtcattcagttctcatgttaaaatgtacttaatattacaaatcaaaggtacagtggaagaagggttaatcacaagaagttacttatatggtagccctgagctttaattgcagagtaactttaattacttttagagcctaaagatgactctagagcctaagtcctagtttctcccaatgttatatttaattttaaaaaattgatatgaaaatgtctaatgtatagtaataatttatgacagatctagtcatttcttcctattaaaaaagattaccttatctccagtaggaaatggaattttatgggcctttaaaagaaagttttatgaaacttgatgctataattttattggtatttcaaggggaaaaaagcactggggttcaaaaatggtagcagaactgctttgaaatgctgcaaggtggccactagatgatgcaaaatacaaccaaaagattgactgagaataaaattaggtgacaagggtttttaaagaataaccttttaaagtgtgggggcaggggttgcttttttttattttatttaaagtcaattatattttacatcttacatttctaaaagcattttataattatttttagtaagatttttcttaaaatttcatatactggtttctacaatttatatttgaaatttctcagtgttatgtaaagagtgatggaaaagcattgatttctttaaaaccgtaatgtttttagaacttaagcctatagggcctttcttacaatgttgatgtacccattatcttagaaaatctagtttaaactgttttctttcaccgcaaaagaattaaatgggaaaatcatttgtttatctctaagttatactaattagtagaaccaaacaaattatcttcttttaaaaaataaatcttataggaaaatagacagtccaaagtcatgtctttgaacagtggattggatctgtgccagtaatgacaaaattatttttttgacttgcttgcctgaataaattgaagaattgctttcagtttgggttttgtatattcttaagtagccattgaaatttatattcttaactaggtcaaaaaataatgagccataagtttatgtcctctcacttagacattttctctttaaaaaggtattttcttctttataaacattttaaaagagccttcccttcttaaactaactccagtgcatgaagtgtgaaaatattttaaaatgacatttttactaatatgagcaagtcatgtaaacattgaagaacttggtaacatattagtaaatggatattaccaaatgttttcatcgttaattactttgcgttccaccaaaatatctttactaaaatgtgcttggtgtagtttgtttattgtctaaattagtaccagtcatcttatttctgcaaaatgagtatcaatgtgaaaaagacacgtgaagattaagcatgtttgaaaataaaatggtcaattacatttcaatttacataggccaacaactgttccatactttgtttgtaaacatttaatttctctactggacaaaattaatatttggctttacattgaattttgagctgtgaagaataaattatgtatcattttagcatattaaacagtagtaagtctagcacatagtctcagccacttaaaacaaaagtttttttgtttgtttgtttgtttgtttttttgagatggagtctcactctgttgcccaggctggagtgcagtggcgtgatctcggcttactgcaacctccgcctcccgggttcaagcgattctcctgcctcagcctcccaagtaactgggacaacaggcgcgtcccaccacacccagctaattttttatacttttagtagagatggggtttcagcatattggccaggctggtctcgaactcctgaccttgtgatccacccgcctcggcctcccaaagtgctgggattataggcgtgagcccctgcacccggccaaaagttgatttttaattacataaaaatcgtaaaaacttctagtaaaaacttgatttggtgaatacagttatatttaaaaaccttaaggtgacaagcattttctatgcctaaatcttcattggtttgcctggaaagagtctctgttaaaagattttccatattcaaagtaaaaggaaagatttcttgctttctaattgtcttttggacacatgcctattttctttgaggtataaacctttagatgtgaaaaatgtaatttcattctgctattgtgtgtgcttgtgtgtgtgtaattgaaaaaactgggaaatcctgctttgttggtaataaatcaatatttttatattcttttggtgtatgtta

SEQ ID NO: 30240 - DNA, 5173 bp, Homo sapiens
  source 1..5173: mol_type = unassigned DNA
ggagggcggggcgcaggcgcggttagtaccgcggtgggcgccggggctcccgggaatctaccttctcctgcggccggcacgcggttcccagggggccagcggcggtcagccgaggtcgagacgcccgcagggtggccttagcggccggtcgtaccacggcagccccgccgatcaggttcctttgggagacttcgacttgttggcgacctgatggccaaaagaaaggaagaaaatttttcctctcctaaaaatgccaaaaggccaagacaagaagaattggaggattttgataaagatggtgacgaagacgaatgtaaaggtactactttgactgcagcagaagttggaataattgagagtattcacctaaaaaacttcatgtgtcattcaatgcttggaccttttaagtttggttctaatgtcaactttgttgttggcaacaatggaagtgggaagagtgcagtactcacagctctcatagtcggtcttggtggaagagcagttgctactaatagaggatcctctttaaaaggttttgtgaaagatggacagaactctgcagatatctcaataacattgaggaacagaggagatgatgcctttaaagccagtgtgtatggtaactctatacttatacagcaacacatcagcatagatggaagtcgatcttataaacttaaaagtgcaacaggctccgtggtttccacgaggaaagaagagctgattgcaattcttgatcattttaacatccaggtggataatccagtttctgttttaacacaagaaatgagcaagcagttcttacagtctaaaaatgaaggagacaaatacaaattcttcatgaaagcaacgcaacttgaacagatgaaggaagattattcatacattatggaaacgaaagaaagaacaaaggagcagatacatcaaggagaagagcggcttactgaactaaagcgccagtgtgtagagaaagaggaacgttttcaaagtattgctggtttaagtacaatgaagactaatttagagtccttgaaacatgaaatggcttgggcagtggtcaatgaaattgaaaaacaattgaatgccatcagagataatatcaaaattggagaagatcgtgctgctagacttgacaggaaaatggaagaacagcaggtcagacttaatgaggcagaacaaaagtacaaggatattcaagacaaactagaaaagattagtgaagagacaaatgcacgagcaccagaatgtatggcattgaaagcagatgttgttgctaagaaaagggcctataatgaagctgaggttttatataaccgatccttaaacgaatataaagcattaaagaaagatgatgagcagctttgtaaacgaattgaagagctgaaaaaaagtactgaccaatctttggaacctgaacggttggaaagacaaaaaaaaatatcttggttaaaagagagagtaaaggcctttcaaaatcaagaaaattcagtcaatcaagagatcgaacagtttcagcaagccatagaaaaggacaaagaagaacatggcaaaattaagagagaagaattagatgtgaagcatgcactgagctacaatcagaggcaactgaaagaattgaaagatagtaaaactgatcgactcaaaagatttggccctaatgttccagctcttcttgaagccatagatgatgcttatagacaaggacattttacctataaacctgtaggccctttaggagcttgcattcatcttcgggacccagaacttgctttggctattgaatcttgcttaaaagggcttctgcaggcctattgttgccataatcatgctgatgaaagggtccttcaggcactcatgaaaaggttttatttaccagggacctcacggccaccgataatagtttctgagtttcggaatgagatatatgatgtaagacacagagctgcttatcatccagactttccaacagttctgacagctttagaaatagataatgcggttgtggcaaatagcctaattgacatgagaggcatagagacagtgctactaatcaaaaataattctgtagctcgtgcagtaatgcagtcccaaaagccacccaaaaattgtagagaagcttttactgctgatggtgatcaagtttttgcaggacgttattattcatctgaaaatacaagacctaagttcctaagcagagatgtggattctgaaataagtgacttggagaatgaggttgaaaataagacggcccagatattaaatcttcagcaacatttatctgcccttgaaaaagatattaaacacaatgaggaacttcttaaaaggtgccaactacattataaagaactaaagatgaaaataagaaaaaatatttctgaaattcgggaacttgagaacatagaagaacaccagtctgtagatattgcaactttggaagatgaagctcaggaaaataaaagcaaaatgaaaatggttgaggaacatatggagcaacaaaaagaaaatatggagcatcttaaaagtctgaaaatagaagcagaaaataagtatgatgcaattaaattcaaaattaatcaactatcggagctagcagacccacttaaggatgaattaaaccttgctgattctgaagtggataaccaaaaacgagggaaacgacattatgaagaaaaacaaaaagaacacttggataccttaaataaaaagaaacgagaactggatatgaaagagaaagaactagaggagaaaatgtcacaagcaagacaaatctgcccagagcgtatagaagtagaaaaatctgcatcaattctggacaaagaaattaatcgattaaggcagaagatacaggcagaacatgctagtcatggagatcgagaggaaataatgaggcagtaccaagaagcaagagagacctatcttgatctggatagtaaagtgaggactttaaaaaagtttattaaattactgggagaaatcatggagcacagattcaagacatatcaacaatttagaaggtgtttgactttacgatgcaaattatactttgacaacttactatctcagcgggcctattgtggaaaaatgaattttgaccacaagaatgaaactctaagtatatcagttcagcctggagaaggaaataaagctgctttcaatgacatgagagccttgtctggaggtgaacgttctttctccacagtgtgttttattctttccctgtggtccatcgcagaatctcctttcagatgcctggatgaatttgatgtctacatggatatggttaataggagaattgccatggacttgatactgaagatggcagattcccagcgttttagacagtttatcttgctcacacctcaaagcatgagttcacttccatccagtaaactgataagaattctccgaatgtctgatcctgaaagaggacaaactacattgcctttcagacctgtgactcaagaagaagatgatgaccaaaggtgatttgtaacttaacatgccttgtcctgatgttgaaggatttgtgaagggaaaaaaaattctggactctttgatataataaaatgagactggaggcattctgaaatgaaagaaactcctttatatatccaaccacaatcaaacatataaataagcctggaaaaccaactacaacctgcaatttaagattactattactttaagaaaatcaatttcatagtattggttttaaatctttttaagtttttttaatacgatctatttttataggttctttttcagaagtaaaattttgtacatatatacatgtacatatctgtttagtttgggttcatttctataacattttgtaagaaaataaaagtttgagcacctgattatatttagttttgcttttccagatattacattctatagttaccaaaaatggttgaagggagggatttctcattgcagagggtggggtgcaagggaataagacacttgtacggaacactgaagctttgccaacttctacacatgccttttttgcagtcctttaactgtccaccctaccaagagcttataaccagtatcagaactggataatgacgcagtttttcactctgacctccatcatgcttgcctgatttaaaagccctcagtttgcagtccagggactgttcaggcttgtcctcagctgagaggacacaggctagagggactgtgcagaaccaggctgggagaagggctgggaaaactgggagtggagggtggatcctcatggagcaggagagtagctcatggctccaggagcctgaggccatgcagttgatggtgagctgacatcaattctaagactcatcctaattgaggggtgttaaaaagtgtgctgcttagaatgaccaaatatagttattgtaaaaaatgatatttatgaactttttattttagaaaacatgaattttattgctccctgtattatttgtttgatactaggattcatgctaaactttttaagaatgtattggatatcaagaagcattccttacattagtagcaataaatattagaataaatatgaaattgaactattttcagaaaaagggcagtatattaagagcagggactgttctctagttattgaggaaaactggactttgtttgtgtttttggtggaggaagaagtttaagatactttagtcttaaattgaggtttgccaaatgagaagttcaaaaacttgggctttctaatcagaatttccaggaggaggaaagtgtgtgctgaatattttaaacatttcccactgatcatacaaagtctgatttttaaatttacacttataatgcctttgtattaaaattatttttaacatgtgcttttccaaattaaaaatgaagtagagtataccaaatgcataaactttcattagctaaggaactcatgtctgaattttgttgtagttttgaatgttgtgctctttcatacagaatgggaaacataatcctcaggtatcccagcatctcttgttgaattgaagattattcattgctttggcctcacaaagttttgatttcaactatcataagtgaaaatatcttcctttaatgttctaagtagtgataatattactagaatgaaagaataaaaagaaattgttcttttaaaatatgtgtaacttctaaaaataaaacttaaaatttatatgta

SEQ ID NO: 30241 - DNA, 3724 bp, Homo sapiens
  source 1..3724: mol_type = unassigned DNA
accgcggtgggcgccggggctcccgggaatctaccttctcctgcggccggcacgcggttcccagggggccagcggcggtcagccgaggtcgagacgcccgcagggtggccttagcggccggtcgtaccacggcagccccgccgatcaggttcctttgggagacttcgacttgttggcgaaatgaaccggagaagaatcccaattgggaattgcggaaaacaggactctagggtagagaaaggttgtagaaccaatagggtttgagacctgatggccaaaagaaaggaagaaaatttttcctctcctaaaaatgccaaaaggccaagacaagaagaattggaggattttgataaagatggtgacgaagacgaatgtaaaggtactactttgactgcagcagaagttggaataattgagagtattcacctaaaaaacttcatgtgtcattcaatgcttggaccttttaagtttggttctaatgtcaactttgttgttggcaacaatggaagttggagtgcagtggtgcgatctcggctcaatgcaacctctgcctcccaggttcaagcgattctcctgtttcagccttgtgggaagagtgcagtactcacagctctcatagtcggtcttggtggaagagcagttgctactaatagaggatcctctttaaaaggttttgtgaaagatggacagaactctgcagatatctcaataacattgaggaacagaggagatgatgcctttaaagccagtgtgtatggtaactctatacttatacagcaacacatcagcatagatggaagtcgatcttataaacttaaaagtgcaacaggctccgtggtttccacgaggaaagaagagctgattgcaattcttgatcattttaacatccaggtggataatccagtttctgttttaacacaagaaatgagcaagcagttcttacagtctaaaaatgaaggagacaaatacaaattcttcatgaaagcaacgcaacttgaacagatgaaggaagattattcatacattatggaaacgaaagaaagaacaaaggagcagatacatcaaggagaagagcggcttactgaactaaagcgccagtgtgtagagaaagaggaacgttttcaaagtattgctggtttaagtacaatgaagactaatttagagtccttgaaacatgaaatggcttgggcagtggtcaatgaaattgaaaaacaattgaatgccatcagagataatatcaaaattggagaagatcgtgctgctagacttgacaggaaaatggaagaacagcaggtcagacttaatgaggcagaacaaaagtacaaggatattcaagacaaactagaaaagattagtgaagagacaaatgcacgagcaccagaatgtatggcattgaaagcagatgttgttgctaagaaaagggcctataatgaagctgaggttttatataaccgatccttaaacgaatataaagcattaaagaaagatgatgagcagctttgtaaacgaattgaagagctgaaaaaaagtactgaccaatctttggaacctgaacggttggaaagacaaaaaaaaatatcttggttaaaagagagagtaaaggcctttcaaaatcaagaaaattcagtcaatcaagagatcgaacagtttcagcaagccatagaaaaggacaaagaagaacatggcaaaattaagagagaagaattagatgtgaagcatgcactgagctacaatcagaggcaactgaaagaattgaaagatagtaaaactgatcgactcaaaagatttggccctaatgttccagctcttcttgaagccatagatgatgcttatagacaaggacattttacctataaacctgtaggccctttaggagcttgcattcatcttcgggacccagaacttgctttggctattgaatcttgcttaaaagggcttctgcaggcctattgttgccataatcatgctgatgaaagggtccttcaggcactcatgaaaaggttttatttaccagggacctcacggccaccgataatagtttctgagtttcggaatgagatatatgatgtaagacacagagctgcttatcatccagactttccaacagttctgacagctttagaaatagataatgcggttgtggcaaatagcctaattgacatgagaggcatagagacagtgctactaatcaaaaataattctgtagctcgtgcagtaatgcagtcccaaaagccacccaaaaattgtagagaagcttttactgctgatggtgatcaagtttttgcaggacgttattattcatctgaaaatacaagacctaagttcctaagcagagatgtggattctgaaataagtgacttggagaatgaggttgaaaataagacggcccagatattaaatcttcagcaacatttatctgcccttgaaaaagatattaaacacaatgaggaacttcttaaaaggtgccaactacattataaagaactaaagatgaaaataagaaaaaatatttctgaaattcgggaacttgagaacatagaagaacaccagtctgtagatattgcaactttggaagatgaagctcaggaaaataaaagcaaaatgaaaatggttgaggaacatatggagcaacaaaaagaaaatatggagcatcttaaaagtctgaaaatagaagcagaaaataagtatgatgcaattaaattcaaaattaatcaactatcggagctagcagacccacttaaggatgaattaaaccttgctgattctgaagtggataaccaaaaacgagggaaacgacattatgaagaaaaacaaaaagaacacttggataccttaaataaaaagaaacgagaactggatatgaaagagaaagaactagaggagaaaatgtcacaagcaagacaaatctgcccagagcgtatagaagtagaaaaatctgcatcaattctggacaaagaaattaatcgattaaggcagaagatacaggcagaacatgctagtcatggagatcgagaggaaataatgaggcagtaccaagaagcaagagagacctatcttgatctggatagtaaagtgaggactttaaaaaagtttattaaattactgggagaaatcatggagcacagattcaagacatatcaacaatttagaaggtgtttgactttacgatgcaaattatactttgacaacttactatctcagcgggcctattgtggaaaaatgaattttgaccacaagaatgaaactctaagtatatcagttcagcctggagaaggaaataaagctgctttcaatgacatgagagccttgtctggaggtgaacgttctttctccacagtgtgttttattctttccctgtggtccatcgcagaatctcctttcagatgcctggatgaatttgatgtctacatggatatggttaataggagaattgccatggacttgatactgaagatggcagattcccagcgttttagacagtttatcttgctcacacctcaaagcatgagttcacttccatccagtaaactgataagaattctccgaatgtctgatcctgaaagaggacaaactacattgcctttcagacctgtgactcaagaagaagatgatgaccaaaggtgatttgtaacttaacatgccttgtcctgatgttgaaggatttgtgaagggaaaaaaaattctggactctttgatataataaaatgagactggaggcattctg

SEQ ID NO: 30242 - DNA, 3729 bp, Homo sapiens
  source 1..3729: mol_type = unassigned DNA
tagctcaaaatgttctaaagataaaatctaatgatttcttataggaaggctaggcttggtgggtacaagtaagaaagccaagcagagagaagcttcctggtccttctccacctttccctttcctccagtctggactttgccttctccacctccttggaagacaggctgctcatcccattgtggtgtctcggctggtgtatgttttctgcctaggcttaatggacagcacgaggaggtagggactgacgttacccatgttttacagtggaagaacctgaggcttaaagagatggagtttcgctcttcttgcccaggctagagtgcaatggcacggtctcagctcactgcaacctccgcctcccgggttcaagtgattctcttgtctcagcctcccaaacctgatggccaaaagaaaggaagaaaatttttcctctcctaaaaatgccaaaaggccaagacaagaagaattggaggattttgataaagatggtgacgaagacgaatgtaaaggtactactttgactgcagcagaagttggaataattgagagtattcacctaaaaaacttcatgtgtcattcaatgcttggaccttttaagtttggttctaatgtcaactttgttgttggcaacaatggaagtgggaagagtgcagtactcacagctctcatagtcggtcttggtggaagagcagttgctactaatagaggatcctctttaaaaggttttgtgaaagatggacagaactctgcagatatctcaataacattgaggaacagaggagatgatgcctttaaagccagtgtgtatggtaactctatacttatacagcaacacatcagcatagatggaagtcgatcttataaacttaaaagtgcaacaggctccgtggtttccacgaggaaagaagagctgattgcaattcttgatcattttaacatccaggtggataatccagtttctgttttaacacaagaaatgagcaagcagttcttacagtctaaaaatgaaggagacaaatacaaattcttcatgaaagcaacgcaacttgaacagatgaaggaagattattcatacattatggaaacgaaagaaagaacaaaggagcagatacatcaaggagaagagcggcttactgaactaaagcgccagtgtgtagagaaagaggaacgttttcaaagtattgctggtttaagtacaatgaagactaatttagagtccttgaaacatgaaatggcttgggcagtggtcaatgaaattgaaaaacaattgaatgccatcagagataatatcaaaattggagaagatcgtgctgctagacttgacaggaaaatggaagaacagcaggtcagacttaatgaggcagaacaaaagtacaaggatattcaagacaaactagaaaagattagtgaagagacaaatgcacgagcaccagaatgtatggcattgaaagcagatgttgttgctaagaaaagggcctataatgaagctgaggttttatataaccgatccttaaacgaatataaagcattaaagaaagatgatgagcagctttgtaaacgaattgaagagctgaaaaaaagtactgaccaatctttggaacctgaacggttggaaagacaaaaaaaaatatcttggttaaaagagagagtaaaggcctttcaaaatcaagaaaattcagtcaatcaagagatcgaacagtttcagcaagccatagaaaaggacaaagaagaacatggcaaaattaagagagaagaattagatgtgaagcatgcactgagctacaatcagaggcaactgaaagaattgaaagatagtaaaactgatcgactcaaaagatttggccctaatgttccagctcttcttgaagccatagatgatgcttatagacaaggacattttacctataaacctgtaggccctttaggagcttgcattcatcttcgggacccagaacttgctttggctattgaatcttgcttaaaagggcttctgcaggcctattgttgccataatcatgctgatgaaagggtccttcaggcactcatgaaaaggttttatttaccagggacctcacggccaccgataatagtttctgagtttcggaatgagatatatgatgtaagacacagagctgcttatcatccagactttccaacagttctgacagctttagaaatagataatgcggttgtggcaaatagcctaattgacatgagaggcatagagacagtgctactaatcaaaaataattctgtagctcgtgcagtaatgcagtcccaaaagccacccaaaaattgtagagaagcttttactgctgatggtgatcaagtttttgcaggacgttattattcatctgaaaatacaagacctaagttcctaagcagagatgtggattctgaaataagtgacttggagaatgaggttgaaaataagacggcccagatattaaatcttcagcaacatttatctgcccttgaaaaagatattaaacacaatgaggaacttcttaaaaggtgccaactacattataaagaactaaagatgaaaataagaaaaaatatttctgaaattcgggaacttgagaacatagaagaacaccagtctgtagatattgcaactttggaagatgaagctcaggaaaataaaagcaaaatgaaaatggttgaggaacatatggagcaacaaaaagaaaatatggagcatcttaaaagtctgaaaatagaagcagaaaataagtatgatgcaattaaattcaaaattaatcaactatcggagctagcagacccacttaaggatgaattaaaccttgctgattctgaagtggataaccaaaaacgagggaaacgacattatgaagaaaaacaaaaagaacacttggataccttaaataaaaagaaacgagaactggatatgaaagagaaagaactagaggagaaaatgtcacaagcaagacaaatctgcccagagcgtatagaagtagaaaaatctgcatcaattctggacaaagaaattaatcgattaaggcagaagatacaggcagaacatgctagtcatggagatcgagaggaaataatgaggcagtaccaagaagcaagagagacctatcttgatctggatagtaaagtgaggactttaaaaaagtttattaaattactgggagaaatcatggagcacagattcaagacatatcaacaatttagaaggtgtttgactttacgatgcaaattatactttgacaacttactatctcagcgggcctattgtggaaaaatgaattttgaccacaagaatgaaactctaagtatatcagttcagcctggagaaggaaataaagctgctttcaatgacatgagagccttgtctggaggtgaacgttctttctccacagtgtgttttattctttccctgtggtccatcgcagaatctcctttcagatgcctggatgaatttgatgtctacatggatatggttaataggagaattgccatggacttgatactgaagatggcagattcccagcgttttagacagtttatcttgctcacacctcaaagcatgagttcacttccatccagtaaactgataagaattctccgaatgtctgatcctgaaagaggacaaactacattgcctttcagacctgtgactcaagaagaagatgatgaccaaaggtgatttgtaacttaacatgccttgtcctgatgttgaaggatttgtgaagggaaaa

SEQ ID NO: 30243 - DNA, 544 bp, Homo sapiens
  source 1..544: mol_type = unassigned DNA
gataatgactgtgcctgtatgtatggacacgatgttctttcttctcatagctcaaaatgttctaaagataaaatctaatgatttcttataggaaggctaggcttggtgggtacaagtaagaaagccaagcagagagaagcttcctggtccttctccacctttccctttcctccagtctggactttgccttctccacctccttggaagacaggctgctcatcccattgtggtgtctcggctggtgtatgttttctgcctaggatggagtttcgctcttcttgcccaggctagagtgcaatggcacggtctcagctcactgcaacctccgcctcccgggttcaagtgattctcttgtctcagcctcccaaacctgatggccaaaagaaaggaagaaaatttttcctctcctaaaaatgccaaaaggccaagacaagaagaattggaggattttgataaagatggtgacgaagacgaatgtaaaggtactactttgactgcagcagaagttggaataattgagagtattcacctaaaaaacttcatg

SEQ ID NO: 30244 - DNA, 5233 bp, Homo sapiens
  source 1..5233: mol_type = unassigned DNA
accgcggtgggcgccggggctcccgggaatctaccttctcctgcggccggcacgcggttcccagggggccagcggcggtcagccgaggtcgagacgcccgcagggtggccttagcggccggtcgtaccacggcagccccgccgatcaggttcctttgggagacttcgacttgttggcgaaatgaaccggagaagaatcccaattgggaattgcggaaaacaggactctagggtagagaaaggttgtagaaccaatagggtttgagacctgatggccaaaagaaaggaagaaaatttttcctctcctaaaaatgccaaaaggccaagacaagaagaattggaggattttgataaagatggtgacgaagacgaatgtaaaggtactactttgactgcagcagaagttggaataattgagagtattcacctaaaaaacttcatgtgtcattcaatgcttggaccttttaagtttggttctaatgtcaactttgttgttggcaacaatggaagtgggaagagtgcagtactcacagctctcatagtcggtcttggtggaagagcagttgctactaatagaggatcctctttaaaaggttttgtgaaagatggacagaactctgcagatatctcaataacattgaggaacagaggagatgatgcctttaaagccagtgtgtatggtaactctatacttatacagcaacacatcagcatagatggaagtcgatcttataaacttaaaagtgcaacaggctccgtggtttccacgaggaaagaagagctgattgcaattcttgatcattttaacatccaggtggataatccagtttctgttttaacacaagaaatgagcaagcagttcttacagtctaaaaatgaaggagacaaatacaaattcttcatgaaagcaacgcaacttgaacagatgaaggaagattattcatacattatggaaacgaaagaaagaacaaaggagcagatacatcaaggagaagagcggcttactgaactaaagcgccagtgtgtagagaaagaggaacgttttcaaagtattgctggtttaagtacaatgaagactaatttagagtccttgaaacatgaaatggcttgggcagtggtcaatgaaattgaaaaacaattgaatgccatcagagataatatcaaaattggagaagatcgtgctgctagacttgacaggaaaatggaagaacagcaggtcagacttaatgaggcagaacaaaagtacaaggatattcaagacaaactagaaaagattagtgaagagacaaatgcacgagcaccagaatgtatggcattgaaagcagatgttgttgctaagaaaagggcctataatgaagctgaggttttatataaccgatccttaaacgaatataaagcattaaagaaagatgatgagcagctttgtaaacgaattgaagagctgaaaaaaagtactgaccaatctttggaacctgaacggttggaaagacaaaaaaaaatatcttggttaaaagagagagtaaaggcctttcaaaatcaagaaaattcagtcaatcaagagatcgaacagtttcagcaagccatagaaaaggacaaagaagaacatggcaaaattaagagagaagaattagatgtgaagcatgcactgagctacaatcagaggcaactgaaagaattgaaagatagtaaaactgatcgactcaaaagatttggccctaatgttccagctcttcttgaagccatagatgatgcttatagacaaggacattttacctataaacctgtaggccctttaggagcttgcattcatcttcgggacccagaacttgctttggctattgaatcttgcttaaaagggcttctgcaggcctattgttgccataatcatgctgatgaaagggtccttcaggcactcatgaaaaggttttatttaccagggacctcacggccaccgataatagtttctgagtttcggaatgagatatatgatgtaagacacagagctgcttatcatccagactttccaacagttctgacagctttagaaatagataatgcggttgtggcaaatagcctaattgacatgagaggcatagagacagtgctactaatcaaaaataattctgtagctcgtgcagtaatgcagtcccaaaagccacccaaaaattgtagagaagcttttactgctgatggtgatcaagtttttgcaggacgttattattcatctgaaaatacaagacctaagttcctaagcagagatgtggattctgaaataagtgacttggagaatgaggttgaaaataagacggcccagatattaaatcttcagcaacatttatctgcccttgaaaaagatattaaacacaatgaggaacttcttaaaaggtgccaactacattataaagaactaaagatgaaaataagaaaaaatatttctgaaattcgggaacttgagaacatagaagaacaccagtctgtagatattgcaactttggaagatgaagctcaggaaaataaaagcaaaatgaaaatggttgaggaacatatggagcaacaaaaagaaaatatggagcatcttaaaagtctgaaaatagaagcagaaaataagtatgatgcaattaaattcaaaattaatcaactatcggagctagcagacccacttaaggatgaattaaaccttgctgattctgaagtggataaccaaaaacgagggaaacgacattatgaagaaaaacaaaaagaacacttggataccttaaataaaaagaaacgagaactggatatgaaagagaaagaactagaggagaaaatgtcacaagcaagacaaatctgcccagagcgtatagaagtagaaaaatctgcatcaattctggacaaagaaattaatcgattaaggcagaagatacaggcagaacatgctagtcatggagatcgagaggaaataatgaggcagtaccaagaagcaagagagacctatcttgatctggatagtaaagtgaggactttaaaaaagtttattaaattactgggagaaatcatggagcacagattcaagacatatcaacaatttagaaggtgtttgactttacgatgcaaattatactttgacaacttactatctcagcgggcctattgtggaaaaatgaattttgaccacaagaatgaaactctaagtatatcagttcagcctggagaaggaaataaagctgctttcaatgacatgagagccttgtctggaggtgaacgttctttctccacagtgtgttttattctttccctgtggtccatcgcagaatctcctttcagatgcctggatgaatttgatgtctacatggatatggttaataggagaattgccatggacttgatactgaagatggcagattcccagcgttttagacagtttatcttgctcacacctcaaagcatgagttcacttccatccagtaaactgataagaattctccgaatgtctgatcctgaaagaggacaaactacattgcctttcagacctgtgactcaagaagaagatgatgaccaaaggtgatttgtaacttaacatgccttgtcctgatgttgaaggatttgtgaagggaaaaaaaattctggactctttgatataataaaatgagactggaggcattctgaaatgaaagaaactcctttatatatccaaccacaatcaaacatataaataagcctggaaaaccaactacaacctgcaatttaagattactattactttaagaaaatcaatttcatagtattggttttaaatctttttaagtttttttaatacgatctatttttataggttctttttcagaagtaaaattttgtacatatatacatgtacatatctgtttagtttgggttcatttctataacattttgtaagaaaataaaagtttgagcacctgattatatttagttttgcttttccagatattacattctatagttaccaaaaatggttgaagggagggatttctcattgcagagggtggggtgcaagggaataagacacttgtacggaacactgaagctttgccaacttctacacatgccttttttgcagtcctttaactgtccaccctaccaagagcttataaccagtatcagaactggataatgacgcagtttttcactctgacctccatcatgcttgcctgatttaaaagccctcagtttgcagtccagggactgttcaggcttgtcctcagctgagaggacacaggctagagggactgtgcagaaccaggctgggagaagggctgggaaaactgggagtggagggtggatcctcatggagcaggagagtagctcatggctccaggagcctgaggccatgcagttgatggtgagctgacatcaattctaagactcatcctaattgaggggtgttaaaaagtgtgctgcttagaatgaccaaatatagttattgtaaaaaatgatatttatgaactttttattttagaaaacatgaattttattgctccctgtattatttgtttgatactaggattcatgctaaactttttaagaatgtattggatatcaagaagcattccttacattagtagcaataaatattagaataaatatgaaattgaactattttcagaaaaagggcagtatattaagagcagggactgttctctagttattgaggaaaactggactttgtttgtgtttttggtggaggaagaagtttaagatactttagtcttaaattgaggtttgccaaatgagaagttcaaaaacttgggctttctaatcagaatttccaggaggaggaaagtgtgtgctgaatattttaaacatttcccactgatcatacaaagtctgatttttaaatttacacttataatgcctttgtattaaaattatttttaacatgtgcttttccaaattaaaaatgaagtagagtataccaaatgcataaactttcattagctaaggaactcatgtctgaattttgttgtagttttgaatgttgtgctctttcatacagaatgggaaacataatcctcaggtatcccagcatctcttgttgaattgaagattattcattgctttggcctcacaaagttttgatttcaactatcataagtgaaaatatcttcctttaatgttctaagtagtgataatattactagaatgaaagaataaaaagaaattgttcttttaaaatatgtgtaacttctaaaaataaaacttaaaatttatatgta

SEQ ID NO: 30245 - DNA, 2819 bp, Homo sapiens
  source 1..2819: mol_type = unassigned DNA
gtacggcttccggtggcgggacgcggggccgcgcacgcgggaaaagcttccccggtgtccccccatccccctccccgcgccccccccgcgtccccccagcgcgcccacctctcgcgccggggccctcgcgaggccgcagcctgaggagattcccaacctgctgagcatccgcacacccactcaggagttggggcccagctcccagtttacttggtttcccttgtgcagcctggggctctgcccaggccaccacaggcaggggtcgacatggcagagacactggagttcaacgacgtctatcaggaggtgaaaggttccatgaatgatggtcgactgaggttgagccgtcagggcatcatcttcaagaatagcaagacaggcaaagtggacaacatccaggctggggagttaacagaaggtatctggcgccgtgttgctctgggccatggacttaaactgcttacaaagaatggccatgtctacaagtatgatggcttccgagaatcggagtttgagaaactctctgatttcttcaaaactcactatcgccttgagctaatggagaaggacctttgtgtgaagggctggaactgggggacagtgaaatttggtgggcagctgctttcctttgacattggtgaccagccagtctttgagatacccctcagcaatgtgtcccagtgcaccacaggcaagaatgaggtgacactggaattccaccaaaacgatgacgcagaggtgtctctcatggaggtgcgcttctacgtcccacccacccaggaggatggtgtggaccctgttgaggcctttgcccagaatgtgttgtcaaaggcggatgtaatccaggccacgggagatgccatctgcatcttccgggagctgcagtgtctgactcctcgtggtcgttatgacattcggatctaccccacctttctgcacctgcatggcaagacctttgactacaagatcccctacaccacagtactgcgtctgtttttgttaccccacaaggaccagcgccagatgttctttgtgatcagcctggatcccccaatcaagcaaggccaaactcgctaccacttcctgatcctcctcttctccaaggacgaggacatttcgttgactctgaacatgaacgaggaagaagtggagaagcgctttgagggtcggctcaccaagaacatgtcaggatccctctatgagatggtcagccgggtcatgaaagcactggtaaaccgcaagatcacagtgccaggcaacttccaagggcactcaggggcccagtgcattacctgttcctacaaggcaagctcaggactgctctacccgctggagcggggcttcatctacgtccacaagccacctgtgcacatccgcttcgatgagatctcctttgtcaactttgctcgtggtaccactactactcgttcctttgactttgaaattgagaccaagcagggcactcagtataccttcagcagcattgagagggaggagtacgggaaactgtttgattttgtcaacgcgaaaaagctcaacatcaaaaaccgaggattgaaagagggcatgaacccaagctacgatgaatatgctgactctgatgaggaccagcatgatgcctacttggagaggatgaaggaggaaggcaagatccgggaggagaatgccaatgacagcagcgatgactcaggagaagaaaccgatgagtcattcaacccaggtgaagaggaggaagatgtggcagaggagtttgacagcaacgcctctgccagctcctccagtaatgagggtgacagtgaccgggatgagaagaagcggaaacagctcaaaaaggccaagatggccaaggaccgcaagagccgcaagaagcctgtggaggtgaagaagggcaaagaccccaatgcccccaagaggcccatgtctgcatacatgctgtggctcaatgccagccgagagaagatcaagtcagaccatcctggcatcagcatcacggatctttccaagaaggcaggcgagatctggaagggaatgtccaaagagaagaaagaggagtgggatcgcaaggctgaggatgccaggagggactatgaaaaagccatgaaagaatatgaagggggccgaggcgagtcttctaagagggacaagtcaaagaagaagaagaaagtaaaggtaaagatggaaaagaaatccacgccctctaggggctcatcatccaagtcgtcctcaaggcagctaagcgagagcttcaagagcaaagagtttgtgtctagtgatgagagctcttcgggagagaacaagagcaaaaagaagaggaggaggagcgaggactctgaagaagaagaactagccagtactccccccagctcagaggactcagcgtcaggatccgatgagtagaaacggaggaaggttctctttgcgcttgccttctcacaccccccgactccccacccatattttggtaccagtttctcctcatgaaatgcagtccctggattctgtgccatctgaacatgctctcctgttggtgtgtatgtcactagggcagtggggagacgtcttaactctgctgcttcccaaggatggctgtttataatttggggagagatagggtgggaggcagggcaatgcaggatccaaatcctcatcttactttcccgaccttaaggatgtagctgctgcttgtcctgttcaagttgctggagcaggggtcatgtgaggccaggcctgtagctcctacctggggcctatttctactttcattttgtatttctggtctgtgaaaatgatttaataaagggaactgactttggaaacca

SEQ ID NO: 30246 - DNA, 785 bp, Homo sapiens
  source 1..785: mol_type = unassigned DNA
gccaacagaaatccattacaatatataagagctaagatttcttgtcccttttcacctttatttgccgtctttcaactggcaagagtcattttgaccagcagattaatcaactgtaagacagatcctcacacaaagaggcaactgaaaggatgaaatcactgacttggatcttgggcctttgggctcttgcagcgtgtttcacacctggtgagagtcaaagaggccccaggggaccatatccacctggaccgctggctcctcctcaaccttttggcccaggatttgttccaccacctcctcctccaccctatggtccagggagaatcccacctcctcctcccgcaccctatggtccagggatatttccaccaccccctcctcaaccctaaggtccaccactccatcctgatgccccaggttatccacagcctccttcccgaccaagaccctatccacctggacctccatttttccctgtaaattctccaactgatcctaccctccctactcctgcaccccaaatatgaacaactgcagcaggtgccaccaccaccacaaaagacaccactacccttgtaactactgcttctactacccaaaatatgaattccaacactgcttccaagagacatttacataaaattgcttccatttttggatgagaatgaaaaattccaaaagtgctgagctttggggagaaataatcttagaaagaaattgtagaaaaaacccatgcagacataacatttataccaatgaggcaaaaataaagaattgagcaccaa

SEQ ID NO: 30247 - DNA, 473 bp, Homo sapiens
  source 1..473: mol_type = unassigned DNA
gccaacagaaatccattacaatatataagagctaagatttcttgtcccttttcacctttatttgccgtctttcaactggcaagagtcattttgaccagcagattaatcaactgtaagacagatcctcacacaaagaggcaactgaaaggatgaaatcactgacttggatcttgggcctttgggctcttgcagcgtgtttcacacctggtgagagtcaaagaggccccaggggaccatatccacctggaccgctggctcctcctcaaccttttggcccaggatttgttccaccacctcctcctccaccctatggtccagggagaatcccacctcctccctactcctgcaccccaaatatgaacaactgcagcaggtgccaccaccaccacaaaagacaccactacccttgtaactactgcttctactacccaaaatatgaattccaacactgcttccaagagacatttacataa

SEQ ID NO: 30248 - DNA, 489 bp, Homo sapiens
  source 1..489: mol_type = unassigned DNA
aacagaaacaagttgctgtgaattactcaacaaggtcctgtgtacttagctgacatgtggtgatggggtgaaaagaatgagtatgtgtgattcttcttaatattgttatttcaccctgattcaagagtcattttgaccagcagattaatcaactgtaagacagatcctcacacaaagaggcaactgaaaggatgaaatcactgacttggatcttgggcctttgggctcttgcagcgtgtttcacacctggtgagagtcaaagaggccccaggggaccatatccacctggaccgctggctcctcctcaaccttttggcccaggatttgttccaccacctcctcctccaccctatggtccagggagaatcccacctcctcctcccgcaccctatggtccagggatatttccaccaccccctcctcaaccctaaggtccaccactccatcctgatgccccaggttatccacagcctccttcccgaccaagac

SEQ ID NO: 30249 - DNA, 1131 bp, Homo sapiens
  source 1..1131: mol_type = unassigned DNA
gtggctttgccctttggcctttgctggctgtgtggcggctccgcggttcgcaggtcgttcgctgagcgtctctgcttagccgcggtcatgagccggcacagccggctgcagaggcaggttctgagcctgtaccgcgatctgctgcgcgccgggcgtgggaagccgggcgccgaggcgcgagtgcgggcagagttccggcagcatgcgggcctgccgcggtccgacgtgctgcgcatcgagtacctgtaccgccgcgggcggcgccagctgcagctgctacgctcgggccacgccaccgccatgggcgccttcgtacgcccgcgggccccgaccggggagcctggcggcgtgggttgccagcctgacgacggcgacagtccaaggaacccccacgacagcacgggggcaccggagacccgccccgacggacggtgacaggcgaagagccgaactcgctcgatggcgtggtggagccaggaggctcgcctgactgcatggggggactggggaacccgcctaaggtgagaggtcttaagagactagcttgacgaattggggatgtcagagactcctccttggcgacgcagggggcctagagagccccgtgatggacggcaagggaggcccgccttttccgatgcttggagacaggtcggtgctcctcccccatgagggcttggggcggcctgggacgctggcgggctggacagtgtcaagccaagagctacttgcccgaaggtacggggagccaggacgacccccggtggacagggagagcctgagacgcccttctcttgacccctgagaacatacccacttctggctcctcaaggagtctcccctctcctgtatttaactctgagaagtgcagactttttgctgagaacgttttgggaaggtgccctgatgagcggtgagaagcccggaatccccttctggaaaactttcccccattaattgtgacaagccaggaccatgaggaaggggtaggggtctatcaccctggttgatcaactgaagacccccaaaggcccctacttgatggttttgaggggcaacattgactcatttgccccttccctctcggaatgttggacaaagggaataaaattggggatatgtctacttccc

SEQ ID NO: 30250 - DNA, 2033 bp, Homo sapiens
  source 1..2033: mol_type = unassigned DNA
cgtggtcggctggccgggcggctaggagttcccggaagtgcccgcgcagccggtttccggtgcaggtggggaaaatggcggtgtctacagtgttctcgacttcgtcgctgatgcttgctctgtcaaggcacagcctattgtctcctttgctcagtgtgacatcattcagacgcttctacagaggtgacagcccaacagattcccaaaaggacatgattgaaatccctttgcctccatggcaggagagaactgatgaatccatagaaaccaaaagagcccgcctgctctatgagagcagaaagaggggaatgttggaaaactgcattcttcttagtctttttgctaaagaacatctgcagcacatgacagaaaagcagctgaacctctatgaccgcctgattaacgagcctagtaatgactgggatatttactactgggccacagaagctaaaccagccccagaaatatttgaaaatgaagtcatggccctgctgagagactttgctaaaaacaaaaacaaagagcagagactgcgtgccccagatcttgagtacctctttgaaaagccacgttgagctgtgctccacggcctggcatgggggttcagtctgtggatggtaactacttatgatggacgttagccttgcttccggcttcttagatgcccagctgccctaccccagaccactggtcctgcctcaagtgatggacataaccctctcctaggacatacatgtaaatgcacaatgtgactcattctcatacttttttgttcagctctgagcctcaaaagtgatttgtcagcagcgctggcatgcaggctttgcctggctgctatctctagaggcaagtctgccacgagagggcactgcaggcgaagcagttgtgcttgctcattgcctcagcccaagtgtactcaaagaaaagaggcagccagctgtgcgtgctgtatggaaagcctcccgccctccctgcagctccccgccctcagtggcccagggctttgttgaagtggaactccccacttccaacctggtatggctccttctgcgaagggaagctgatcccagcctcctgagctgaatccttcaaaggcacagcaggcagaatgagggccacaggcaggagtggtgtgggcacactgcttaggagtcaacatcttcatcattgggctttctttaaaacgtgcactttgtaatttgaaagagaattattaaagcatactgaaaaaaggaaatttacaatttcccagccctcacaattaattttaattttgtctattttcatataacccatagtcatgtttatagagttttacaagttcacaattacaggttttattttcatgtagcactatagaaaactttccccctcattcctacagtcttcacaattagttgactaaataataatacataagaaataatatattagaatgaattagttagaagtgtttttaaaagctctagggctgtgtgacttctgtgttgctagtggtgccctccctggaggggttttgccctcagagctgtaatctaggcagtagaatcagtcacccagactggaccaggtgcatctaaaggtgttgactagaagaaggtcggccagatttgatgagcaggtggttggtgattataggagccgcacacagggactacacacgcacatgtttccagcattgttgagctccagggttcctacagagccacctcatggttcctgcctgctcttcagtatccctggtggctcaggagggaagggaagagatctagcctttacgtaatcacagttaagcctcacagcactctagactagtggtgttacctgtattttatacataagaaagtgggctcagagagaggaagtaatttgtccaaggtcaggtagctattgagtcgaaaaagcagaatttagtatagctcagtctgcctccaaagctcttgaactttctactagaacacactgccttactgctggaaatttaatagaagtctctgtttgggaaagctgtggcaaatagatgtgacagttct

SEQ ID NO: 30251 - DNA, 1153 bp, Homo sapiens
  source 1..1153: mol_type = unassigned DNA
acccgggaaaccggaagccgcctcccacttggttgctcgtacgcggctagtgggtcctcagtggatgtaggctgggcgccgcgatgttcgacgggacaccggcggagagcgacctcggggttaaggggtggggctgacgtcaggagccaagatggcggcggtggtcgccctctccttgaggcgccggttgccggccacaacccttggcggagcctgcctgcaggcctcccgaggagcccagacagctgcagccacagctccccgtatcaagaaatttgccatctatcgatgggacccagacaaggctggagacaaacctcatatgcagacttatgaagttgaccttaataaatgtggccccatggtattggatgctttaatcaagattaagaatgaagttgactctactttgaccttccgaagatcatgcagagaaggcatctgtggctcttgtgcaatgaacatcaatggaggcaacactctagcttgcacccgaaggattgacaccaacctcaataaggtctcaaaaatctaccctcttccacacatgtatgtgataaaggatcttgttcccgatttgagcaacttctatgcacagtacaaatccattgagccttatttgaagaagaaggatgaatctcaggaaggcaagcagcagtatctgcagtccatagaagagcgtgagaaactggacgggctctacgagtgcattctctgtgcctgctgtagcaccagctgccccagctactggtggaacggagacaaatatctggggcctgcagttcttatgcaggcctatcgctggatgattgactccagagatgacttcacagaggagcgcctggccaagctgcaggacccattctctctataccgctgccacaccatcatgaactgcacaaggacctgtcctaagggtctgaatccagggaaagctattgcagagatcaagaaaatgatggcaacctataaggagaagaaagcttcagtttaactgtttccatgctaaacatgatttataaccagctcagagctgaacataatttatatctaatttgagttcctttaaagatcttggttttccatgaatacagcatgtataataaaaattttaagaaataaatgttattctactttattaacaaaaaaaaaa

SEQ ID NO: 30252 - DNA, 1127 bp, Homo sapiens
  source 1..1127: mol_type = unassigned DNA
acttccgtccagaccggaacccaagatggctgcgctgttgctgagacacgttggtcgtcattgcctccgagcccactttagccctcagctctgtatcagaaatgctgttcctttgggaaccacggccaaagaagagatggagcggttctggaataagaatataggttcaaaccgtcctctgtctccccacattactatctacagttggtctcttcccatggcgatgtccatctgccaccgtggcactggtattgctttgagtgcagatgtgggacctaggaaaaggcctgaagattccccagctataccagtctggagtggttgtcctggttcttactgtgttgtcctctatggggctggcagccatgtgaagaaaggaggctcccagcatcatcttcctacacattattacattcacccatctttctgtttgtcattcttatctccagcctgggaaaagttctccttatttgtttagatccttttgtattttcagatctccttggagcagtagagtacctggtagaccataatagtggaaaagggtctagttttccccttgtttctaaagatgaggtggctgcaaaaactccccttttttgcccacagcttgcctactctcggcctagaagcagttattctctctccatattgggctttgatttgtgctgagggtcagcttttggctccttcttcctgagacagtggaaacaatgccagctctgtggcttctgccctggggatgggccgggttggggggtgggttggtgaggctttgggtgccactgcctgtgggttgctggcttaaaggacaattctcttcattggtgagagcccaggccattaacacctacacagtgttattgaaagaagagaggtgggggtggaggggaattagtctgtcccagctagagggagataaagagggctagttagttcttggagcagctgcttttgaggagaaaatatatagctttggacacgaggaagatctagaaaattatcattgaacatattaatggttatttctttttcttggatttccagaaaagcctcttaattttatgctttctcatcgaagtaatgtaccctttttttctgaaactgaattaaatactcattttatc

SEQ ID NO: 30253 - DNA, 1420 bp, Homo sapiens
  source 1..1420: mol_type = unassigned DNA
agctaggcagagctgagcggagaagctccagagccttttaaagagactctcgtcacatgacacccccaaccccgacccccagccggcgcgcctccgccctcgggtggcggggccgcctggcgtcacttccgtccagaccggaacccaagatggctgcgctgttgctgagacacgttggtcgtcattgcctccgagcccactttagccctcagctctgtatcagaaatgctgttcctttgggaaccacggccaaagaagagatggagcggttctggaataagaatataggttcaaaccgtcctctgtctccccacattactatctacagttggtctcttcccatggcgatgtccatctgccaccgtggcactggtattgctttgagtgcaggggtctctctttttggcatgtcggccctgttactccctgggaactttgagtcttatttggaacttgtgaagtccctgtgtctggggccagcactgatccacacagctaagtttgcacttgtcttccctctcatgtatcatacctggaatgggatccgacacttgatgtgggacctaggaaaaggcctgaagattccccagctataccagtctggagtggttgtcctggttcttactgtgttgtcctctatggggctggcagccatgtgaagaaaggaggctcccagcatcatcttcctacacattattacattcacccatctttctgtttgtcattcttatctccagcctgggaaaagttctccttatttgtttagatccttttgtattttcagatctccttggagcagtagagtacctggtagaccataatagtggaaaagggtctagttttccccttgtttctaaagatgaggtggctgcaaaaactccccttttttgcccacagcttgcctactctcggcctagaagcagttattctctctccatattgggctttgatttgtgctgagggtcagcttttggctccttcttcctgagacagtggaaacaatgccagctctgtggcttctgccctggggatgggccgggttggggggtgggttggtgaggctttgggtgccactgcctgtgggttgctggcttaaaggacaattctcttcattggtgagagcccaggccattaacacctacacagtgttattgaaagaagagaggtgggggtggaggggaattagtctgtcccagctagagggagataaagagggctagttagttcttggagcagctgcttttgaggagaaaatatatagctttggacacgaggaagatctagaaaattatcattgaacatattaatggttatttctttttcttggatttccagaaaagcctcttaattttatgctttctcatcgaagtaatgtaccctttttttctgaaactgaattaaatactcattttatctttga

SEQ ID NO: 30254 - DNA, 369 bp, Homo sapiens
  source 1..369: mol_type = unassigned DNA
tccagaccggaacccaagatggctgcgctgttgctgagttggtctcttcccatggcgatgtccatctgccaccgtggcactggtattgctttgagtgcaggggtctctctttttggcatgtcggccctgttactccctgggaactttgagtcttatttggaacttgtgaagtccctgtgtctggggccagcactgatccacacagctaagtttgcacttgtcttccctctcatgtatcatacctggaatgggatccgacacttgatgtgggacctaggaaaaggcctgaagattccccagctataccagtctggagtggttgtcctggttcttactgtgttgtcctctatggggctggcagccatgtga

SEQ ID NO: 30255 - DNA, 460 bp, Homo sapiens
  source 1..460: mol_type = unassigned DNA
cttccgtccagaccggaacccaagatggctgcgctgttgctgagacacgttggtcgtcattgcctccgagcccactttagccctcagctctgtatcagaaattggtctcttcccatggcgatgtccatctgccaccgtggcactggtattgctttgagtgcaggggtctctctttttggcatgtcggccctgttactccctgggaactttgagtcttatttggaacttgtgaagtccctgtgtctggggccagcactgatccacacagctaagtttgcacttgtcttccctctcatgtatcatacctggaatgggatccgacacttgatgtgggacctaggaaaaggcctgaagattccccagctataccagtctggagtggttgtcctggttcttactgtgttgtcctctatggggctggcagccatgtgaagaaaggaggctcccagcatcatcttcc

SEQ ID NO: 30256 - DNA, 1439 bp, Homo sapiens
  source 1..1439: mol_type = unassigned DNA
gacgggtgtgcaccgcctctcgacttccggttcacccagcatttcctcttccctgttttctttcgtcgtcgtgggtgggaattgtcgcctaagtggttccgggttggtggatgaccttgagccctcaggaacgagatggcggttctctggaggctgagtgccgtttgcggtgccctaggaggccgagctctgttgcttcgaactccagtggtcagacctgctcatatctcagcatttcttcaggaccgacctatcccagaatggtgtggagtgcagcacatacacttgtcaccgagccaccattctggctccaaggctgcatctctccactggactagcgagagggttgtcagtgttttgctcctgggtctgcttccggctgcttatttgaatccttgctctgcgatggactattccctggctgcagccctcactcttcatggtcactggggccttggacaagttgttactgactatgttcatggggatgccttgcagaaagctgccaaggcagggcttttggcactttcagctttaacctttgctgggctttgctatttcaactatcacgatgtgggcatctgcaaagctgttgccatgctgtggaagctctgacctttttgacttcatactttgaagaattgatgtatgcctctttgcctctgctttgtcatgccattaagctcacaataaggaagaaataacagataagtccattggtggacagccttcttctcttaatcacaagattattttcagaatttaatctttgaggaaaaggtttgagaggaattatatctaagttgtgagactgagttctatattctggtgagttaatggggttgcctcccagcttcttataagactcacagtataactaaacatgatatatcagcttttgcctttcaatttatcaatctcttaaagagaatccaactttattacgattagtatatgatcaaacttccatatttgccttgggaataatggacaaagggaaatactcttaattcatgaataaaaactttgcagaaaattagacagtgtttaattttcgaaaacttccctctctagacagtagataccacctactgatggttacatatactagggaaattttaaaattaggaaatgctgatagctcatattataaatttctaaatcctaggaagaaacgcttggagtgcttctgaatatacagaagttccatttaagggcaagtttccctgtagatgtatcaaaatactaccaactgtaaattgagatttaattcccaaatgtattctacttgttctaaaacaatctgtccacaaatataaaactataagtaataaattgttattttcgcacaatgggaatctctaatgtgaaaatgtattctatgaaaataatttttttaaataaaatgttatataataaaagtgtcttctatgctttta

SEQ ID NO: 30257 - DNA, 1689 bp, Homo sapiens
  source 1..1689: mol_type = unassigned DNA
gccgaggggacggggtccgactcagaaatggcggcctccatgttctacggcaggctagtggccgtggccacccttcggaaccaccggcctcggacggcccagcgggctgctgctcagggtcctgtattaataggaagttcacatggtggtgtcaacattgaagatgttgctgctgagtctcctgaagcaataattaaagaacctattgatattgaagaaggcatcaaaaaggaacaagctctccagcttgcacagaagatgggatttccacctaatattgtggaatcagcagcagaaaacatggtcaagctttacagcctttttctgaaatacgatgcaaccatgatagaaataaatccaatggtggaagattcagatggagctgtattgtgtatggatgcaaagatcaattttgactctaattcagcctatcgccaaaagaaaatctttgatctacaggactggacccaggaagatgaaagggacaaagatgctgctaaggcaaatctcaactacattggcctcgatggaaatataggctgcctagtaaatggtgctggtttggctatggccacaatggatataataaaacttcatggagggactccagccaacttccttgatgttggtggtggtgctacagtccatcaagtaacagaagcatttaagcttatcacttcagataaaaaggtactggctattctggtcaacatttttggaggaatcatgcgctgtgatgttattgcacagggtatagtcatggcagtaaaagacttggaaattaaaatacctgttgtggtacggttacaaggtacacgagtcgatgatgctaaggcactgatagcggacagtggacttaaaatacttgcttgtgatgacttggatgaagctgctagaatggttgtaaagctctctgaaatagtgaccttagcgaagcaagcacatgtggatgtgaaatttcagttgccaatatgatctgaaaacccagtggatggctgaaggtgttaaatgtgctataatcattaagaatactgtgttctgtgttattgttctttttctttttagtgtgtggagattgtaattgccatctaggcacacaaacatttaaaaggatttggactgcatttaattgtaccattcagaatggactgtttgtacgaagcatgtataatgcagttatcttctttcttttgtcgcagccagtcttttttgcttctcctacaaaacgtaacttgcaatttgccagtttattattgttggatacaaagttcttcattgataagagtcctataaataagataaatacgaagataaagctttattctttagtgttaaaatacagtatatctaataactagcctcattagtagagcagtatattaaaacaatgttttatgtaaaaagtgtttatcttcagcaccaaatacatgataaatgtatcaatcactatttataaacagagctttcaaacactcctcagaatattcttctaagtattttgatgaagtaactttgtaattatttgaacattgttttaatcattaggaaacactgattaactgcaagtcttcatgattctgtcatattaagaaacacctgtaggtttgcttcaaataaaggcatatataccaaggacttacagacaaaattaagaatgtcaatttaagttaataaaaatctcccaatatg

SEQ ID NO: 30258 - DNA, 1952 bp, Homo sapiens
  source 1..1952: mol_type = unassigned DNA
gccgaggggacggggtccgactcagaaatggcggcctccatgttctacggcaggctagtggccgtggccacccttcggaaccaccggcctcggacggcccagcgggctgctgctcaggttcaaaagatgtcgtgataaaggcacaggttttagctggtggtagaggaaaaggaacatttgaaagtggcctcaaaggaggagtgaagatagttttctctccagaagaagcaaaagctgtttcttcacaaatgattgggaaaaaattgtttaccaagcaaacgggagaaaagggcagaatatgcaatcaagtattggtctgtgagcgaaaatatcccaggagagaatactactttgcaataacaatggaaaggtcatttcaaggtcctgtattaataggaagttcacatggtggtgtcaacattgaagatgttgctgctgagtctcctgaagcaataattaaagaacctattgatattgaagaaggcatcaaaaaggaacaagctctccagcttgcacagaagatgggatttccacctaatattgtggaatcagcagcagaaaacatggtcaagctttacagcctttttctgaaatacgatgcaaccatgatagaaataaatccaatggtggaagattcagatggagctgtattgtgtatggatgcaaagatcaattttgactctaattcagcctatcgccaaaagaaaatctttgatctacaggactggacccaggaagatgaaagggacaaagatgctgctaaggcaaatctcaactacattggcctcgatggaaatataggctgcctagtaaatggtgctggtttggctatggccacaatggatataataaaacttcatggagggactccagccaacttccttgatgttggtggtggtgctacagtccatcaagtaacagaagcatttaagcttatcacttcagataaaaaggtactggctattctggtcaacatttttggaggaatcatgcgctgtgatgttattgcacagggtatagtcatggcagtaaaagacttggaaattaaaatacctgttgtggtacggttacaaggtacacgagtcgatgatgctaaggcactgatagcggacagtggacttaaaatacttgcttgtgatgacttggatgaagctgctagaatggttgtaaagctctctgaaatagtgaccttagcgaagcaagcacatgtggatgtgaaatttcagttgccaatatgatctgaaaacccagtggatggctgaaggtgttaaatgtgctataatcattaagaatactgtgttctgtgttattgttctttttctttttagtgtgtggagattgtaattgccatctaggcacacaaacatttaaaaggatttggactgcatttaattgtaccattcagaatggactgtttgtacgaagcatgtataatgcagttatcttctttcttttgtcgcagccagtcttttttgcttctcctacaaaacgtaacttgcaatttgccagtttattattgttggatacaaagttcttcattgataagagtcctataaataagataaatacgaagataaagctttattctttagtgttaaaatacagtatatctaataactagcctcattagtagagcagtatattaaaacaatgttttatgtaaaaagtgtttatcttcagcaccaaatacatgataaatgtatcaatcactatttataaacagagctttcaaacactcctcagaatattcttctaagtattttgatgaagtaactttgtaattatttgaacattgttttaatcattaggaaacactgattaactgcaagtcttcatgattctgtcatattaagaaacacctgtaggtttgcttcaaataaaggcatatataccaaggacttacagacaaaattaagaatgtcaatttaagttaataaaaatctcccaatatg

SEQ ID NO: 30259 - DNA, 2098 bp, Homo sapiens
  source 1..2098: mol_type = unassigned DNA
ccgcctgtcgcctgtgcgcctgcgcgcggcgccgaggggacggggtccgactcagaaatggcggcctccatgttctacggcaggctagtggccgtggccacccttcggaaccaccggcctcggacggcccagcaacagcaaaggaatctctcactacatgaatacatgagtatggaattattgcaagaagctggtgtctccgttcccaaaggatatgtggcaaagtcaccagatgaagcttatgcaattgccaaaaaattaggttcaaaagatgtcgtgataaaggcacaggttttagctggtggtagaggaaaaggaacatttgaaagtggcctcaaaggaggagtgaagatagttttctctccagaagaagcaaaagctgtttcttcacaaatgattgggaaaaaattgtttaccaagcaaacgggagaaaagggcagaatatgcaatcaagtattggtctgtgagcgaaaatatcccaggagagaatactactttgcaataacaatggaaaggtcatttcaaggtcctgtattaataggaagttcacatggtggtgtcaacattgaagatgttgctgctgagtctcctgaagcaataattaaagaacctattgatattgaagaaggcatcaaaaaggaacaagctctccagcttgcacagaagatgggatttccacctaatattgtggaatcagcagcagaaaacatggtcaagctttacagcctttttctgaaatacgatgcaaccatgatagaaataaatccaatggtggaagattcagatggagctgtattgtgtatggatgcaaagatcaattttgactctaattcagcctatcgccaaaagaaaatctttgatctacaggactggacccaggaagatgaaagggacaaagatgctgctaaggcaaatctcaactacattggcctcgatggaaatataggctgcctagtaaatggtgctggtttggctatggccacaatggatataataaaacttcatggagggactccagccaacttccttgatgttggtggtggtgctacagtccatcaagtaacagaagcatttaagcttatcacttcagataaaaaggtactggctattctggtcaacatttttggaggaatcatgcgctgtgatgttattgcacagggtatagtcatggcagtaaaagacttggaaattaaaatacctgttgtggtacggttacaaggtacacgagtcgatgatgctaaggcactgatagcggacagtggacttaaaatacttgcttgtgatgacttggatgaagctgctagaatggttgtaaagctctctgaaatagtgaccttagcgaagcaagcacatgtggatgtgaaatttcagttgccaatatgatctgaaaacccagtggatggctgaaggtgttaaatgtgctataatcattaagaatactgtgttctgtgttattgttctttttctttttagtgtgtggagattgtaattgccatctaggcacacaaacatttaaaaggatttggactgcatttaattgtaccattcagaatggactgtttgtacgaagcatgtataatgcagttatcttctttcttttgtcgcagccagtcttttttgcttctcctacaaaacgtaacttgcaatttgccagtttattattgttggatacaaagttcttcattgataagagtcctataaataagataaatacgaagataaagctttattctttagtgttaaaatacagtatatctaataactagcctcattagtagagcagtatattaaaacaatgttttatgtaaaaagtgtttatcttcagcaccaaatacatgataaatgtatcaatcactatttataaacagagctttcaaacactcctcagaatattcttctaagtattttgatgaagtaactttgtaattatttgaacattgttttaatcattaggaaacactgattaactgcaagtcttcatgattctgtcatattaagaaacacctgtaggtttgcttcaaataaaggcatatataccaaggacttacagacaaaattaagaatgtcaatttaagttaataaaaatctcccaatatga

SEQ ID NO: 30260 - DNA, 2164 bp, Homo sapiens
  source 1..2164: mol_type = unassigned DNA
ccgcctgtcgcctgtgcgcctgcgcgcggcgccgaggggacggggtccgactcagaaatggcggcctccatgttctacggcaggctagtggccgtggccacccttcggaaccaccggcctcggacggcccagcgggctgctgctcaggttctgggaagttctggattgtttaataaccatggactccaagtacagcagcaacagcaaaggaatctctcactacatgaatacatgagtatggaattattgcaagaagctggtgtctccgttcccaaaggatatgtggcaaagtcaccagatgaagcttatgcaattgccaaaaaattaggttcaaaagatgtcgtgataaaggcacaggttttagctggtggtagaggaaaaggaacatttgaaagtggcctcaaaggaggagtgaagatagttttctctccagaagaagcaaaagctgtttcttcacaaatgattgggaaaaaattgtttaccaagcaaacgggagaaaagggcagaatatgcaatcaagtattggtctgtgagcgaaaatatcccaggagagaatactactttgcaataacaatggaaaggtcatttcaaggtcctgtattaataggaagttcacatggtggtgtcaacattgaagatgttgctgctgagtctcctgaagcaataattaaagaacctattgatattgaagaaggcatcaaaaaggaacaagctctccagcttgcacagaagatgggatttccacctaatattgtggaatcagcagcagaaaacatggtcaagctttacagcctttttctgaaatacgatgcaaccatgatagaaataaatccaatggtggaagattcagatggagctgtattgtgtatggatgcaaagatcaattttgactctaattcagcctatcgccaaaagaaaatctttgatctacaggactggacccaggaagatgaaagggacaaagatgctgctaaggcaaatctcaactacattggcctcgatggaaatataggctgcctagtaaatggtgctggtttggctatggccacaatggatataataaaacttcatggagggactccagccaacttccttgatgttggtggtggtgctacagtccatcaagtaacagaagcatttaagcttatcacttcagataaaaaggtactggctattctggtcaacatttttggaggaatcatgcgctgtgatgttattgcacagggtatagtcatggcagtaaaagacttggaaattaaaatacctgttgtggtacggttacaaggtacacgagtcgatgatgctaaggcactgatagcggacagtggacttaaaatacttgcttgtgatgacttggatgaagctgctagaatggttgtaaagctctctgaaatagtgaccttagcgaagcaagcacatgtggatgtgaaatttcagttgccaatatgatctgaaaacccagtggatggctgaaggtgttaaatgtgctataatcattaagaatactgtgttctgtgttattgttctttttctttttagtgtgtggagattgtaattgccatctaggcacacaaacatttaaaaggatttggactgcatttaattgtaccattcagaatggactgtttgtacgaagcatgtataatgcagttatcttctttcttttgtcgcagccagtcttttttgcttctcctacaaaacgtaacttgcaatttgccagtttattattgttggatacaaagttcttcattgataagagtcctataaataagataaatacgaagataaagctttattctttagtgttaaaatacagtatatctaataactagcctcattagtagagcagtatattaaaacaatgttttatgtaaaaagtgtttatcttcagcaccaaatacatgataaatgtatcaatcactatttataaacagagctttcaaacactcctcagaatattcttctaagtattttgatgaagtaactttgtaattatttgaacattgttttaatcattaggaaacactgattaactgcaagtcttcatgattctgtcatattaagaaacacctgtaggtttgcttcaaataaaggcatatataccaaggacttacagacaaaattaagaatgtcaatttaagttaataaaaatctcccaatatga

SEQ ID NO: 30261 - DNA, 1471 bp, Homo sapiens
  source 1..1471: mol_type = unassigned DNA
agtccgcgaggatccccggcggcccggccgtggctgctcctgcagtttctaagagatgggcgggagcaggtgggctctgagtggaggttctgggaagttctggattgtttaataaccatggactccaagtacagcagcaacagcaaaggaatctctcactacatgaatacatgagtatggaattattgcaagaagctggtgtctccgttcccaaaggatatgtggcaaagtcaccagatgaagcttatgcaattgccaaaaaattaggttcaaaagatgtcgtgataaaggcacaggttttagctggtggtagaggaaaaggaacatttgaaagtggcctcaaaggaggagtgaagatagttttctctccagaagaagcaaaagctgtttcttcacaaatgattgggaaaaaattgtttaccaagcaaacgggagaaaagggcagaatatgcaatcaagtattggtctgtgagcgaaaatatcccaggagagaatactactttgcaataacaatggaaaggtcatttcaaggtcctgtattaataggaagttcacatggtggtgtcaacattgaagatgttgctgctgagtctcctgaagcaataattaaagaacctattgatattgaagaaggcatcaaaaaggaacaagctctccagcttgcacagaagatgggatttccacctaatattgtggaatcagcagcagaaaacatggtcaagctttacagcctttttctgaaatacgatgcaaccatgatagaaataaatccaatggtggaagattcagatggagctgtattgtgtatggatgcaaagatcaattttgactctaattcagcctatcgccaaaagaaaatctttgatctacaggactggacccaggaagatgaaagggacaaagatgctgctaaggcaaatctcaactacattggcctcgatggaaatataggctgcctagtaaatggtgctggtttggctatggccacaatggatataataaaacttcatggagggactccagccaacttccttgatgttggtggtggtgctacagtccatcaagtaacagaagcatttaagcttatcacttcagataaaaaggtactggctattctggtcaacatttttggaggaatcatgcgctgtgatgttattgcacagggtatagtcatggcagtaaaagacttggaaattaaaatacctgttgtggtacggttacaaggtacacgagtcgatgatgctaaggcactgatagcggacagtggacttaaaatacttgcttgtgatgacttggatgaagctgctagaatggttgtaaagctctctgaaatagtgaccttagcgaagcaagcacatgtggatgtgaaatttcagttgccaatatgatctgaaaacccagtggatggctgaaggtgttaaatgtgctataatcattaagaatactgtgttctgtgttattgttctttttc

SEQ ID NO: 30262 - DNA, 1381 bp, Homo sapiens
  source 1..1381: mol_type = unassigned DNA
gaggggacggggtccgactcagaaatggcggcctccatgttctacggcaggctagtggccgtggccacccttcggaaccaccggcctcggacggcccagcgggctgctgctcaggttctgggaagttctggattgtttaataaccatggactccaagtacagcagcaacagcaaaggaatctctcactacatgaatacatgagtatggaattattgcaagaagctggtgtctccgttcccaaaggatatgtggcaaagtcaccagatgaagcttatgcaattgccaaaaaattaggttcaaaagatgtcgtgataaaggcacaggttttagctggtggtagaggaaaaggaacatttgaaagtggcctcaaaggaggagtgaagatagttttctctccagaagaagcaaaagctgtttcttcacaaatgattgggaaaaaattgtttaccaagcaaacgggagaaaagggcagaatatgcaataacaatggaaaggtcatttcaaggtcctgtattaataggaagttcacatggtggtgtcaacattgaagatgttgctgctgagtctcctgaagcaataattaaagaacctattgatattgaagaaggcatcaaaaaggaacaagctctccagcttgcacagaagatgggatttccacctaatattgtggaatcagcagcagaaaacatggtcaagctttacagcctttttctgaaatacgatgcaaccatgatagaaataaatccaatggtggaagattcagatggagctgtattgtgtatggatgcaaagatcaattttgactctaattcagcctatcgccaaaagaaaatctttgatctacaggactggacccaggaagatgaaagggacaaagatgctgctaaggcaaatctcaactacattggcctcgatggaaatataggctgcctagtaaatggtgctggtttggctatggccacaatggatataataaaacttcatggagggactccagccaacttccttgatgttggtggtggtgctacagtccatcaagtaacagaagcatttaagcttatcacttcagataaaaaggtactggctattctggtcaacatttttggaggaatcatgcgctgtgatgttattgcacagggtatagtcatggcagtaaaagacttggaaattaaaatacctgttgtggtacggttacaaggtacacgagtcgatgatgctaaggcactgatagcggacagtggacttaaaatacttgcttgtgatgacttggatgaagctgctagaatggttgtaaagctctctgaaatagtgaccttagcgaagcaagcacatgtggatgtgaaatttcagttgccaatatgatctgaaaacccagtggat

SEQ ID NO: 30263 - DNA, 1801 bp, Homo sapiens
  source 1..1801: mol_type = unassigned DNA
ctcacgcacggcacacggaagcaagcacggcgtgagttcgtccctctgcgcacgccccggtttcctcgcgtccgcggctgctcacccgaactccagatgacctccagggagttggaaactgccagctccaaccgagcctttcctcttccccaggaggacgcaacgcggatgcttgcagctggtcaccacgactccgactccgactcctggccgccgcccgcgcggctgtgcgctggccgtcatagcgcgcgggaggacgcgcctggcagcggcaggaagtgacgcgctcactaccccgtcccgcggccgcagccaatctctccccgcgagggcggaggcgccgaaatcaaagcgagagcgcctcggcctctccagctgtccgcgggtcttgctctgttgcctaggctggagtgcagtggtacaagcacggctcactgcagccttgacctcctgggatcaagggttctgggaagttctggattgtttaataaccatggactccaagtacagcagcaacagcaaaggaatctctcactacatgaatacatgagtatggaattattgcaagaagctggtgtctccgttcccaaaggatatgtggcaaagtcaccagatgaagcttatgcaattgccaaaaaattaggttcaaaagatgtcgtgataaaggcacaggttttagctggtggtagaggaaaaggaacatttgaaagtggcctcaaaggaggagtgaagatagttttctctccagaagaagcaaaagctgtttcttcacaaatgattgggaaaaaattgtttaccaagcaaacgggagaaaagggcagaatatgcaatcaagtattggtctgtgagcgaaaatatcccaggagagaatactactttgcaataacaatggaaaggtcatttcaaggtcctgtattaataggaagttcacatggtggtgtcaacattgaagatgttgctgctgagtctcctgaagcaataattaaagaacctattgatattgaagaaggcatcaaaaaggaacaagctctccagcttgcacagaagatgggatttccacctaatattgtggaatcagcagcagaaaacatggtcaagctttacagcctttttctgaaatacgatgcaaccatgatagaaataaatccaatggtggaagattcagatggagctgtattgtgtatggatgcaaagatcaattttgactctaattcagcctatcgccaaaagaaaatctttgatctacaggactggacccaggaagatgaaagggacaaagatgctgctaaggcaaatctcaactacattggcctcgatggaaatataggctgcctagtaaatggtgctggtttggctatggccacaatggatataataaaacttcatggagggactccagccaacttccttgatgttggtggtggtgctacagtccatcaagtaacagaagcatttaagcttatcacttcagataaaaaggtactggctattctggtcaacatttttggaggaatcatgcgctgtgatgttattgcacagggtatagtcatggcagtaaaagacttggaaattaaaatacctgttgtggtacggttacaaggtacacgagtcgatgatgctaaggcactgatagcggacagtggacttaaaatacttgcttgtgatgacttggatgaagctgctagaatggttgtaaagctctctgaaatagtgaccttagcgaagcaagcacatgtggatgtgaaatttcagttgccaatatgatctgaaaacccagtggatggctgaaggtgttaaatgt

SEQ ID NO: 30264 - DNA, 1890 bp, Homo sapiens
  source 1..1890: mol_type = unassigned DNA
gacggggtccgactcagaaatggcggcctccatgttctacggcaggctagtggccgtggccacccttcggaaccaccggcctcggacggcccagcgggctgctgctcaggttctgggaagttctggattgtttaataaccatggactccaagtacagcagcaacagcaaaggaatctctcactacatgaatacatgagtatggaattattgcaagaagctggtgtctccgttcccaaaggatatgtggcaaagtcaccagatgaagcttatgcaattgccaaaaaattaggtacagaagaaagaaataatatgtgcaggataaactgtaactatgagtatttctggcaagttctctgggaccagaactcacaagtaataagaagcaggttcaaaagatgtcgtgataaaggcacaggttttagctggtggtagaggaaaaggaacatttgaaagtggcctcaaaggaggagtgaagatagttttctctccagaagaagcaaaagctgtttcttcacaaatgattgggaaaaaattgtttaccaagcaaacgggagaaaagggcagaatatgcaatcaagtattggtctgtgagcgaaaatatcccaggagagaatactactttgcaataacaatggaaaggtcatttcaaggtcctgtattaataggaagttcacatggtggtgtcaacattgaagatgttgctgctgagtctcctgaagcaataattaaagaacctattgatattgaagaaggcatcaaaaaggaacaagctctccagcttgcacagaagatgggatttccacctaatattgtggaatcagcagcagaaaacatggtcaagctttacagcctttttctgaaatacgatgcaaccatgatagaaataaatccaatggtggaagattcagatggagctgtattgtgtatggatgcaaagatcaattttgactctaattcagcctatcgccaaaagaaaatctttgatctacaggactggacccaggaagatgaaagggacaaagatgctgctaaggcaaatctcaactacattggcctcgatggaaatataggctgcctagtaaatggtgctggtttggctatggccacaatggatataataaaacttcatggagggactccagccaacttccttgatgttggtggtggtgctacagtccatcaagtaacagaagcatttaagcttatcacttcagataaaaaggtactggctattctggtcaacatttttggaggaatcatgcgctgtgatgttattgcacagggtatagtcatggcagtaaaagacttggaaattaaaatacctgttgtggtacggttacaaggtacacgagtcgatgatgctaaggcactgatagcggacagtggacttaaaatacttgcttgtgatgacttggatgaagctgctagaatggttgtaaagctctctgaaatagtgaccttagcgaagcaagcacatgtggatgtgaaatttcagttgccaatatgatctgaaaacccagtggatggctgaaggtgttaaatgtgctataatcattaagaatactgtgttctgtgttattgttctttttctttttagtgtgtggagattgtaattgccatctaggcacacaaacatttaaaaggatttggactgcatttaattgtaccattcagaatggactgtttgtacgaagcatgtataatgcagttatcttctttcttttgtcgcagccagtcttttttgcttctcctacaaaacgtaacttgcaatttgccagtttattattgttggatacaaagttcttcattgataagagtcctataaataagataaatacgaagataaagctttattctttagtgttaaaatacagtatatctaataacta

SEQ ID NO: 30265 - DNA, 1475 bp, Homo sapiens
  source 1..1475: mol_type = unassigned DNA
atgttaatcaaacccacatttctaggaaggagccgagttattatctgcctctccgataggatgcctctttgtcttcacctgccattcccgctgtttcgtgaagaatcctctgtaaagggaaatttgttcaggcgactgctgtggccaccctctgcctcctccggcctctgcccctgggaggtccccgggggcctgggagtgtcattggcgtatgaccgcaacccttgccgctgccgctgacatcgctaccatggtctccggcagcagcggcctcgccgccgcccgtctcctgtcgcgcagcttcctcctgccgcagaatggaattcggcattgttcctacacagcttctcggcaacatctctatgttgataaaaatacaaagattatttgccagggtttcactggcaaacagggcacctttcacagccagcaggcattggaatatggcaccaaactcgttggaggaaccactccagggaaaggaggccagacacatctgggcttacctgtctttaatactgtgaaggaggccaaagaacagacaggagcaacggcttctgtcatttatgttcctccgccttttgctgctgctgccattaatgaagctattgaggcagaaattcccttggttgtgtgtatcactgaaggaattccccagcaggacatggtacgagtcaagcacaaactgctgcgccaggaaaagacaaggctaattgggcccaactgccctggagtcatcaatcctggagaatgtaaaattggcatcatgcctggccatattcacaaaaaaggaaggattggcattgtgtccagatctggcaccctgacttatgaagcagttcaccaaacaacgcaagttggattggggcagtctttgtgcgttggcattggaggtgatccttttaatggaacagattttattgactgcctcgaaatctttttgaacgattctgccacagaaggcatcatattgattggtgaaattggtggtaatgcagaagagaatgctgcagaatttttgaagcaacataattcaggtccaaattccaagcctgtagtgtccttcattgctggtttaactgctcctcctgggagaagaatgggtcatgccggggcaattattgctggaggaaaaggtggagctaaagagaagatctctgcccttcagagtgcaggagttgtggtcagtatgtctcctgcacagctgggaaccacgatctacaaggaatttgaaaagaggaagatgctatgaaagaaaaaaaaaattcctaaaactgtggaatggatcacgtagacatgtaacccagcagcagtttgcttctgttgtccactgattaatcagcctatgtgcctgacactggtcttgcagtacaactggaagccaaaacaaggtggaagatgtcctgaattaagatgttttcaccacattgtattacagagacagccaataaatctactatttgatttcaatatgg

SEQ ID NO: 30266 - DNA, 6011 bp, Homo sapiens
  source 1..6011: mol_type = unassigned DNA
ttattttggcagccttatccaagtctggtacaacatagcaaagagaacaggctatgaaataagatggcaagaaagaaatttagtggattggaaatctctctgattgtcctttttgtcatagttactataatagctattgccttaattgttgttttagcaactaagacacctgctgttgatgaaattagtgattctacttcaactccagctactactcgtgtgactacaaatccttctgattcaggaaaatgtccaaatgtgttaaatgatcctgtcaatgtgagaataaactgcattccagaacaattcccaacagagggaatttgtgcacagagaggctgctgctggaggccgtggaatgactctcttattccttggtgcttcttcgttgataatcatggttataacgttcaagacatgacaacaacaagtattggagttgaagccaaattaaacaggataccttcacctacactatttggaaatgacatcaacagtgttctcttcacaactcaaaatcagacacccaatcgtttccggttcaagattactgatccaaataatagaagatatgaagttcctcatcagtatgtaaaagagtttactggacccacagtttctgatacgttgtatgatgtgaaggttgcccaaaacccatttagcatccaagttattaggaaaagcaacggtaaaactttgtttgacaccagcattggtcccttagtgtactctgaccagtacttacagatctcaacccgtcttccaagtgattatatttatggtattggagaacaagttcataagagatttcgtcatgatttatcctggaaaacatggccaatttttactcgagaccaacttcctggtgataataataataatttatacggccatcaaacattctttatgtgtattgaagatacatctggaaagtcattcggtgtttttttaatgaatagcaatgcaatggagatttttatccagcctactccaatagtaacatatagagttaccggtggcattctggatttttacatccttctaggagatacaccagaacaagtagttcaacagtatcaacagcttgttggactaccagcaatgccagcatattggaatcttggattccaactaagtcgctggaattataagtcactagatgtagtgaaagaagtggtaaggagaaaccgggaagctggcataccatttgatacacaggtcactgatattgactacatggaagacaagaaagactttacttatgatcaagttgcgtttaacggactccctcaatttgtgcaagatttgcatgaccatggacagaaatatgtcatcatcttggaccctgcaatttccataggtcgacgtgccaatggaacaacatatgcaacctatgagaggggaaacacacaacatgtgtggataaatgagtcagatggaagtacaccaattattggagaggtatggccaggattaacagtataccctgatttcactaacccaaactgcattgattggtgggcaaatgaatgcagtattttccatcaagaagtgcaatatgatggactttggattgacatgaatgaagtttccagctttattcaaggttcaacaaaaggatgtaatgtaaacaaattgaattatccaccgtttactcctgatattcttgacaaactcatgtattccaaaacaatttgcatggatgctgtgcagaactggggtaaacagtatgatgttcatagcctctatggatacagcatggctatagccacagagcaagctgtacaaaaagtttttcctaataagagaagcttcattcttacccgctcaacatttgctggatctggaagacatgctgcgcattggttaggagacaatactgcttcatgggaacaaatggaatggtctataactggaatgctggagttcagtttgtttggaatacctttggttggagcagacatctgtggatttgtggctgaaaccacagaagaactttgcagaagatggatgcaacttggggcattttatccattttccagaaaccataattctgacggatatgaacatcaggatcctgcattttttgggcagaattcacttttggttaaatcatcaaggcagtatttaactattcgctacaccttattacccttcctctacactctgttttataaagcccatgtgtttggagaaacagtagcaagaccagttcttcatgagttttatgaggatacgaacagctggattgaggacactgagtttttgtggggccctgcattacttattactcctgttctaaaacagggagcagatactgtgagtgcctacatccctgatgctatttggtatgattatgaatctggtgcaaaaaggccatggaggaaacaacgggttgatatgtatcttccagcagacaaaataggattacatcttagaggaggttatatcatccccattcaagaaccagatgtaacaacaacagcaagccgtaagaatcctctaggacttatagtcgcattaggtgaaaacaacacagccaaaggagactttttctgggatgatggagaaactaaagatacaatacaaaatggcaactacatattatatacattttcagtttctaataacacattagatattgtgtgcacacattcatcatatcaggaaggaactaccttagcatttcagactgtaaaaatccttgggttgacagacagtgttacagaagttagagtggcggaaaataatcaaccaatgaacgctcattccaatttcacttatgatgcttctaaccaggttctcctaattgcagatctcaaacttaatcttggaagaaactttagtgttcaatggaatcaaattttctcagaaaatgaaagatttaattgttatccagatgcagatttggcaactgaacaaaagtgcacacaacgtggctgtgtatggagaacgggttcttctctatccaaagcacctgagtgttactttcccagacaagataactcttattcagtcaactcagctcgctattcatccatgggtataacagctgacctccaactaaatactgcaaatgccagaataaagttaccttctgaccccatctcaactcttcgtgtggaggtgaaatatcacaaaaatgatatgttgcagtttaagatttatgatccccaaaagaagagatatgaagtaccagtaccgttaaacattccaaccaccccaataagtacttatgaagacagactttatgatgtggaaatcaaggaaaatccttttggcatccagattcgacggagaagcagtggaagagtcatttgggattcttggctgcctggatttgcttttaatgaccagttcattcaaatatcgactcgcctgccatcagaatatatatatggttttggggaagtggaacatacagcatttaagcgagatctgaactggaatacttggggaatgttcacaagagaccaaccccctggttacaaacttaattcctatggatttcatccctattacatggctctggaagaggagggcaatgctcatggtgttttcttactcaacagcaatgcaatggatgttacattccagccaactcctgctctaacttaccgtacagttggagggatcttggatttttatatgtttttgggcccaactccagaagttgcaacaaagcaataccatgaagtaattggccatccagtcatgccagcttattgggctttgggattccaattatgtcgttatggatatgcaaatacttcagaggttcgggaattatatgacgctatggtggctgctaacatcccctatgatgttcagtacacagacattgactacatggaaaggcagctagactttacaattggtgaagcattccaggaccttcctcagtttgttgacaaaataagaggagaaggaatgagatacattattatcctggatccagcaatttcaggaaatgaaacaaagacttaccctgcatttgaaagaggacagcagaatgatgtctttgtcaaatggccaaacaccaatgacatttgttgggcaaaggtttggccagatttgcccaacataacaatagataaaactctaacggaagatgaagctgttaatgcttccagagctcatgtagctttcccagatttcttcaggacttccacagcagagtggtgggccagagaaattgtggacttttacaatgaaaagatgaagtttgatggtttgtggattgatatgaatgagccatcaagttttgtaaatggaacaactactaatcaatgcagaaatgacgaactaaattatccaccttatttcccagaactcacaaaaagaactgatggattacatttcagaacaatttgcatggaagctgagcagattcttagtgatggaacatcagttttgcattacgatgttcacaatctctatggatggtcacagatgaaacctactcatgatgcattgcagaagacaactggaaaaagagggattgtaatttctcgttccacgtatcctactagtggacgatggggaggacactggcttggagacaactatgcacgatgggacaacatggacaaatcaatcattggtatgatggaatttagtctgtttggaatgtcatatactggagcagacatctgtggttttttcaacaactcagaatatcatctctgtacccgctggatgcaacttggagcattttatccatactcaaggaatcacaacattgcaaatactagaagacaagatcccgcttcctggaatgaaacttttgctgaaatgtcaaggaatattctaaatattagatacaccttattgccctatttttacacacaaatgcatgaaattcatgctaatggtggcactgttatccgaccccttttgcatgagttctttgatgaaaaaccaacctgggatatattcaagcagttcttatggggtccagcatttatggttaccccagtactggaaccttatgttcaaactgtaaatgcctacgtccccaatgctcggtggtttgactaccatacaggcaaagatattggcgtcagaggacaatttcaaacatttaatgcttcttatgacacaataaacctacatgtccgtggtggtcacatcctaccatgtcaagagccagctcaaaacacattttacagtcgacaaaaacacatgaagctcattgttgctgcagatgataatcagatggcacagggttctctgttttgggatgatggagagagtatagacacctatgaaagagacctatatttatctgtacaatttaatttaaaccagaccaccttaacaagcactatattgaagagaggttacataaataaaagtgaaacgaggcttggatcccttcatgtatgggggaaaggaactactcctgtcaatgcagttactctaacgtataacggaaataaaaattcgcttccttttaatgaagacactaccaacatgatattacgtattgatctgaccacacacaatgttactctagaagaaccaatagaaatcaactggtcatgaagatcaccatcaattttagttgtcaatgggaaaaaacaccaggatttaagtttcacagcacttacaattttccctcttcacttggttcttgtactctacaaaatatagctttcataacatcgaaaagttattttgtagcgtacatcaatgataatgctaattttattatagtaatgtgacttggattcaattttaaggcatatttaacaaaatttgaatagccctatttatccttgttaagtatcagctacaattgtaaactagttactaaacatgtatgtaaatagctaagatataatttaaacgtgatttttaaattaaataaaatttttatgtaattatatatactatatttttctcaatgtttagcagatttaagatatgtaacaacaattatttgaagatttaattacttcttagtatgtgcatttaattagaaaaagagaataaaaaatgtaagtgta

SEQ ID NO: 30267 - DNA, 5710 bp, Homo sapiens
  source 1..5710: mol_type = unassigned DNA
aggttacttgactgggagttctcagacctccagtttcagccctgccctcagcctccaatccgtaagagacacccagccccagcaattggattgggcagcccgtcttgacacaccactgtgctgagtgcttgaggacgtgtttcaacagatggttggggttagtgtgtgtcatcacattcgagtggggattaagagaaggaaggctgccttgctggagctgtgtggtcttctccaagtgagagtcgcaggcaatagaactactttgcttttggaggaaaaggaggaattcattttcagcagacacaagaaaagcagtttttttttcagggattcttcacttctcttgaacaaggaactcactcagagactaacacaaaggaagtaatttcttacctggtcattatttagtctacaataagttcatccttcttcagtgtgaccagtaaattcttcccatactcttgaagagagcataattggaatggagaggtgctgacggccacccaccatcatctaaagaagataaacttggcaaatgacatgcaggttcttcaaggcagaataattgcagaaaatcttcaaaggaccctatctgcagatgttctgaatacctctgagaatagagattgattattcaaccaggatacctaattcaagaactccagaaatcaggagacggagacattttgtcagttttgcaacattggaccaaatacaatgaagtattcttgctgtgctctggttttggctgtcctgggcacagaattgctgggaagcctctgttcgactgtcagatccccgaggttcagaggacggatacagcaggaacgaaaaaacatccgacccaacattattcttgtgcttaccgatgatcaagatgtggagctggggtccctgcaagtcatgaacaaaacgagaaagattatggaacatgggggggccaccttcatcaatgcctttgtgactacacccatgtgctgcccgtcacggtcctccatgctcaccgggaagtatgtgcacaatcacaatgtctacaccaacaacgagaactgctcttccccctcgtggcaggccatgcatgagcctcggacttttgctgtatatcttaacaacactggctacagaacagccttttttggaaaatacctcaatgaatataatggcagctacatcccccctgggtggcgagaatggcttggattaatcaagaattctcgcttctataattacactgtttgtcgcaatggcatcaaagaaaagcatggatttgattatgcaaaggactacttcacagacttaatcactaacgagagcattaattacttcaaaatgtctaagagaatgtatccccataggcccgttatgatggtgatcagccacgctgcgccccacggccccgaggactcagccccacagttttctaaactgtaccccaatgcttcccaacacataactcctagttataactatgcaccaaatatggataaacactggattatgcagtacacaggaccaatgctgcccatccacatggaatttacaaacattctacagcgcaaaaggctccagactttgatgtcagtggatgattctgtggagaggctgtataacatgctcgtggagacgggggagctggagaatacttacatcatttacaccgccgaccatggttaccatattgggcagtttggactggtcaaggggaaatccatgccatatgactttgatattcgtgtgcctttttttattcgtggtccaagtgtagaaccaggatcaatagtcccacagatcgttctcaacattgacttggcccccacgatcctggatattgctgggctcgacacacctcctgatgtggacggcaagtctgtcctcaaacttctggacccagaaaagccaggtaacaggtttcgaacaaacaagaaggccaaaatttggcgtgatacattcctagtggaaagaggcaaatttctacgtaagaaggaagaatccagcaagaatatccaacagtcaaatcacttgcccaaatatgaacgggtcaaagaactatgccagcaggccaggtaccagacagcctgtgaacaaccggggcagaagtggcaatgcattgaggatacatctggcaagcttcgaattcacaagtgtaaaggacccagtgacctgctcacagtccggcagagcacgcggaacctctacgctcgcggcttccatgacaaagacaaagagtgcagttgtagggagtctggttaccgtgccagcagaagccaaagaaagagtcaacggcaattcttgagaaaccaggggactccaaagtacaagcccagatttgtccatactcggcagacacgttccttgtccgtcgaatttgaaggtgaaatatatgacataaatctggaagaagaagaagaattgcaagtgttgcaaccaagaaacattgctaagcgtcatgatgaaggccacaaggggccaagagatctccaggcttccagtggtggcaacaggggcaggatgctggcagatagcagcaacgccgtgggcccacctaccactgtccgagtgacacacaagtgttttattcttcccaatgactctatccattgtgagagagaactgtaccaatcggccagagcgtggaaggaccataaggcatacattgacaaagagattgaagctctgcaagataaaattaagaatttaagagaagtgagaggacatctgaagagaaggaagcctgaggaatgtagctgcagtaaacaaagctattacaataaagagaaaggtgtaaaaaagcaagagaaattaaagagccatcttcacccattcaaggaggctgctcaggaagtagatagcaaactgcaacttttcaaggagaacaaccgtaggaggaagaaggagaggaaggagaagagacggcagaggaagggggaagagtgcagcctgcctggcctcacttgcttcacgcatgacaacaaccactggcagacagccccgttctggaacctgggatctttctgtgcttgcacgagttctaacaataacacctactggtgtttgcgtacagttaatgagacgcataattttcttttctgtgagtttgctactggctttttggagtattttgatatgaatacagatccttatcagctcacaaatacagtgcacacggtagaacgaggcattttgaatcagctacacgtacaactaatggagctcagaagctgtcaaggatataagcagtgcaacccaagacctaagaatcttgatgttggaaataaagatggaggaagctatgacctacacagaggacagttatgggatggatgggaaggttaatcagccccgtctcactgcagacatcaactggcaaggcctagaggagctacacagtgtgaatgaaaacatctatgagtacagacaaaactacagacttagtctggtggactggactaattacttgaaggatttagatagagtatttgcactgctgaagagtcactatgagcaaaataaaacaaataagactcaaactgctcaaagtgacgggttcttggttgtctctgctgagcacgctgtgtcaatggagatggcctctgctgactcagatgaagacccaaggcataaggttgggaaaacacctcatttgaccttgccagctgaccttcaaaccctgcatttgaaccgaccaacattaagtccagagagtaaacttgaatggaataacgacattccagaagttaatcatttgaattctgaacactggagaaaaaccgaaaaatggacggggcatgaagagactaatcatctggaaaccgatttcagtggcgatggcatgacagagctagagctcgggcccagccccaggctgcagcccattcgcaggcacccgaaagaacttccccagtatggtggtcctggaaaggacatttttgaagatcaactatatcttcctgtgcattccgatggaatttcagttcatcagatgttcaccatggccaccgcagaacaccgaagtaattccagcatagcggggaagatgttgaccaaggtggagaagaatcacgaaaaggagaagtcacagcacctagaaggcagcgcctcctcttcactctcctctgattagatgaaactgttaccttaccctaaacacagtatttctttttaacttttttatttgtaaactaataaaggtaatcacagccaccaacattccaagctaccctgggtacctttgtgcagtagaagctagtgagcatgtgagcaagcggtgtgcacacggagactcatcgttataatttactatctgccaagagtagaaagaaaggctggggatatttgggttggcttggttttgattttttgcttgtttgtttgttttgtactaaaacagtattatcttttgaatatcgtagggacataagtatatacatgttatccaatcaagatggctagaatggtgcctttctgagtgtctaaaacttgacacccctggtaaatctttcaacacacttccactgcctgcgtaatgaagttttgattcatttttaaccactggaatttttcaatgccgtcattttcagttagatgattttgcactttgagattaaaatgccatgtctatttgattagtcttatttttttatttttacaggcttatcagtctcactgttggctgtcattgtgacaaagtcaaataaacccccaaggacgacacacagtatggatcacatattgtttgacattaagcttttgccagaaaatgttgcatgtgttttacctcgacttgctaaaatcgattagcagaaaggcatggctaataatgttggtggtgaaaataaataaataagtaaacaaaatgaagattgcctgctctctctgtgcctagcctcaaagcgttcatcatacatcatacctttaagattgctatattttgggttattttcttgacaggagaaaaagatctaaagatcttttattttcatcttttttggttttcttggcatgactaagaagcttaaatgttgataaaatatgactagttttgaatttacaccaagaacttctcaataaaagaaaatcatgaatgctccacaatttcaacataccacaagagaagttaatttcttaacattgtgttctatgattatttgtaagaccttcaccaagttctgatatcttttaaagacatagttcaaaattgcttttgaaaatctgtattcttgaaaatatccttgttgtgtattaggtttttaaataccagctaaaggattacctcactgagtcatcagtaccctcctattcagctccccaagatgatgtgtttttgcttaccctaagagaggttttcttcttatttttagataattcaagtgcttagataaattatgttttctttaagtgtttatggtaaactcttttaaagaaaatttaatatgttatagctgaatctttttggtaactttaaatctttatcatagactctgtacatatgttcaaattagctgcttgcctgatgtgtgtatcatcggtgggatgacagaacaaacatatttatgatcatgaataatgtgctttgtaaaaagatttcaagttattaggaagcatactctgttttttaatcatgtataatattccatgatacttttatagaacaattctggcttcaggaaagtctagaagcaatatttcttcaaataaaaggtgtttaaacttt

SEQ ID NO: 30268 - DNA, 4891 bp, Homo sapiens
  source 1..4891: mol_type = unassigned DNA
tttgtctggcagcgttggttctatgggggtgtgtgatgataataatacgcgggcttatataaccgtcttcatcttgcgagcacttcgcagaccgtcgctaatgaatcttggggccggtgtcgggccggggcggcttgatcggcaactaggaaaccccaggcgcagaggccaggagcgagggcagcgaggatcagaggccaggccttcccggctgccggcgctcctcggaggtcagggcagatgaggaacatgactctcccccttcggaggaggaaggaagtcccgctgccaccttatctctgctcctctgcctcctccctgttcccagagctttttctctagagaagattttgaaggcggcttttggattcttcacttctcttgaacaaggaactcactcagagactaacacaaaggaagtaatttcttacctggtcattatttagtctacaataagttcatccttcttcagtgtgaccagtaaattcttcccatactcttgaagagagcataattggaatggagaggtgctgacggccacccaccatcatctaaagaagataaacttggcaaatgacatgcaggttcttcaaggcagaataattgcagaaaatcttcaaaggaccctatctgcagatgttctgaatacctctgagaatagagattgattattcaaccaggatacctaattcaagaactccagaaatcaggagacggagacattttgtcagttttgcaacattggaccaaatacaatgaagtattcttgctgtgctctggttttggctgtcctgggcacagaattgctgggaagcctctgttcgactgtcagatccccgaggttcagaggacggatacagcaggaacgaaaaaacatccgacccaacattattcttgtgcttaccgatgatcaagatgtggagctggggtccctgcaagtcatgaacaaaacgagaaagattatggaacatgggggggccaccttcatcaatgcctttgtgactacacccatgtgctgcccgtcacggtcctccatgctcaccgggaagtatgtgcacaatcacaatgtctacaccaacaacgagaactgctcttccccctcgtggcaggccatgcatgagcctcggacttttgctgtatatcttaacaacactggctacagaacagccttttttggaaaatacctcaatgaatataatggcagctacatcccccctgggtggcgagaatggcttggattaatcaagaattctcgcttctataattacactgtttgtcgcaatggcatcaaagaaaagcatggatttgattatgcaaaggactacttcacagacttaatcactaacgagagcattaattacttcaaaatgtctaagagaatgtatccccataggcccgttatgatggtgatcagccacgctgcgccccacggccccgaggactcagccccacagttttctaaactgtaccccaatgcttcccaacacataactcctagttataactatgcaccaaatatggataaacactggattatgcagtacacaggaccaatgctgcccatccacatggaatttacaaacattctacagcgcaaaaggctccagactttgatgtcagtggatgattctgtggagaggctgtataacatgctcgtggagacgggggagctggagaatacttacatcatttacaccgccgaccatggttaccatattgggcagtttggactggtcaaggggaaatccatgccatatgactttgatattcgtgtgcctttttttattcgtggtccaagtgtagaaccaggatcaatagtcccacagatcgttctcaacattgacttggcccccacgatcctggatattgctgggctcgacacacctcctgatgtggacggcaagtctgtcctcaaacttctggacccagaaaagccaggtaacaggtttcgaacaaacaagaaggccaaaatttggcgtgatacattcctagtggaaagaggcaaatttctacgtaagaaggaagaatccagcaagaatatccaacagtcaaatcacttgcccaaatatgaacgggtcaaagaactatgccagcaggccaggtaccagacagcctgtgaacaaccggggcagaagtggcaatgcattgaggatacatctggcaagcttcgaattcacaagtgtaaaggacccagtgacctgctcacagtccggcagagcacgcggaacctctacgctcgcggcttccatgacaaagacaaagagtgcagttgtagggagtctggttaccgtgccagcagaagccaaagaaagagtcaacggcaattcttgagaaaccaggggactccaaagtacaagcccagatttgtccatactcggcagacacgttccttgtccgtcgaatttgaaggtgaaatatatgacataaatctggaagaagaagaagaattgcaagtgttgcaaccaagaaacattgctaagcgtcatgatgaaggccacaaggggccaagagatctccaggcttccagtggtggcaacaggggcaggatgctggcagatagcagcaacgccgtgggcccacctaccactgtccgagtgacacacaagtgttttattcttcccaatgactctatccattgtgagagagaactgtaccaatcggccagagcgtggaaggaccataaggcatacattgacaaagagattgaagctctgcaagataaaattaagaatttaagagaagtgagaggacatctgaagagaaggaagcctgaggaatgtagctgcagtaaacaaagctattacaataaagagaaaggtgtaaaaaagcaagagaaattaaagagccatcttcacccattcaaggaggctgctcaggaagtagatagcaaactgcaacttttcaaggagaacaaccgtaggaggaagaaggagaggaaggagaagagacggcagaggaagggggaagagtgcagcctgcctggcctcacttgcttcacgcatgacaacaaccactggcagacagccccgttctggaacctgggatctttctgtgcttgcacgagttctaacaataacacctactggtgtttgcgtacagttaatgagacgcataattttcttttctgtgagtttgctactggctttttggagtattttgatatgaatacagatccttatcagctcacaaatacagtgcacacggtagaacgaggcattttgaatcagctacacgtacaactaatggagctcagaagctgtcaaggatataagcagtgcaacccaagacctaagaatcttgatgttggaaataaagatggaggaagctatgacctacacagaggacagttatgggatggatgggaaggttaatcagccccgtctcactgcagacatcaactggcaaggcctagaggagctacacagtgtgaatgaaaacatctatgagtacagacaaaactacagacttagtctggtggactggactaattacttgaaggatttagatagagtatttgcactgctgaagagtcactatgagcaaaataaaacaaataagactcaaactgctcaaagtgacgggttcttggttgtctctgctgagcacgctgtgtcaatggagatggcctctgctgactcagatgaagacccaaggcataaggttgggaaaacacctcatttgaccttgccagctgaccttcaaaccctgcatttgaaccgaccaacattaagtccagagagtaaacttgaatggaataacgacattccagaagttaatcatttgaattctgaacactggagaaaaaccgaaaaatggacggggcatgaagagactaatcatctggaaaccgatttcagtggcgatggcatgacagagctagagctcgggcccagccccaggctgcagcccattcgcaggcacccgaaagaacttccccagtatggtggtcctggaaaggacatttttgaagatcaactatatcttcctgtgcattccgatggaatttcagttcatcagatgttcaccatggccaccgcagaacaccgaagtaattccagcatagcggggaagatgttgaccaaggtggagaagaatcacgaaaaggagaagtcacagcacctagaaggcagcgcctcctcttcactctcctctgattagatgaaactgttaccttaccctaaacacagtatttctttttaacttttttatttgtaaactaataaaggtaatcacagccaccaacattccaagctaccctgggtacctttgtgcagtagaagctagtgagcatgtgagcaagcggtgtgcacacggagactcatcgttataatttactatctgccaagagtagaaagaaaggctggggatatttgggttggcttggttttgattttttgcttgtttgtttgttttgtactaaaacagtattatcttttgaatatcgtagggacataagtatatacatgttatccaatcaagatggctagaatggtgcctttctgagtgtctaaaacttgacacccctggtaaatctttcaacacacttccactgcctgcgtaatgaagttttgattcatttttaaccactggaatttttcaatgccgtcattttcagttagatgattttgcactttgagattaaaatgccatgtctatttgattagtcttatttttttatttttacaggcttatcagtctcactgttggctgtcattgtgacaaagtcaaataaacccccaaggacgacacacagtatggatcacatattgtttgacattaagcttttgccagaaaatgttgcatgtgttttacctcgacttgctaaaatcgattagcagaaaggcatggctaataatgttggtggtgaaaataaataaataagtaaacaaaa

SEQ ID NO: 30269 - DNA, 4697 bp, Homo sapiens
  source 1..4697: mol_type = unassigned DNA
gtgatgataataatacgcgggcttatataaccgtcttcatcttgcgagcacttcgcagaccgtcgctaatgaatcttggggccggtgtcgggccggggcggcttgatcggcaactaggaaaccccaggcgcagaggccaggagcgagggcagcgaggatcagaggccaggccttcccggctgccggcgctcctcggaggtcagggcagatgaggaacatgactctcccccttcggaggaggaaggaagtcccgctgccaccttatctctgctcctctgcctcctccctgttcccagagctttttctctagagaagattttgaaggcggcttttgtgctgacggccacccaccatcatctaaagaagataaacttggcaaatgacatgcaggttcttcaaggcagaataattgcagaaaatcttcaaaggaccctatctgcagatgttctgaatacctctgagaatagagattgattattcaaccaggatacctaattcaagaactccagaaatcaggagacggagacattttgtcagttttgcaacattggaccaaatacaatgaagtattcttgctgtgctctggttttggctgtcctgggcacagaattgctgggaagcctctgttcgactgtcagatccccgaggttcagaggacggatacagcaggaacgaaaaaacatccgacccaacattattcttgtgcttaccgatgatcaagatgtggagctggggtccctgcaagtcatgaacaaaacgagaaagattatggaacatgggggggccaccttcatcaatgcctttgtgactacacccatgtgctgcccgtcacggtcctccatgctcaccgggaagtatgtgcacaatcacaatgtctacaccaacaacgagaactgctcttccccctcgtggcaggccatgcatgagcctcggacttttgctgtatatcttaacaacactggctacagaacagccttttttggaaaatacctcaatgaatataatggcagctacatcccccctgggtggcgagaatggcttggattaatcaagaattctcgcttctataattacactgtttgtcgcaatggcatcaaagaaaagcatggatttgattatgcaaaggactacttcacagacttaatcactaacgagagcattaattacttcaaaatgtctaagagaatgtatccccataggcccgttatgatggtgatcagccacgctgcgccccacggccccgaggactcagccccacagttttctaaactgtaccccaatgcttcccaacacataactcctagttataactatgcaccaaatatggataaacactggattatgcagtacacaggaccaatgctgcccatccacatggaatttacaaacattctacagcgcaaaaggctccagactttgatgtcagtggatgattctgtggagaggctgtataacatgctcgtggagacgggggagctggagaatacttacatcatttacaccgccgaccatggttaccatattgggcagtttggactggtcaaggggaaatccatgccatatgactttgatattcgtgtgcctttttttattcgtggtccaagtgtagaaccaggatcaatagtcccacagatcgttctcaacattgacttggcccccacgatcctggatattgctgggctcgacacacctcctgatgtggacggcaagtctgtcctcaaacttctggacccagaaaagccaggtaacaggtttcgaacaaacaagaaggccaaaatttggcgtgatacattcctagtggaaagaggcaaatttctacgtaagaaggaagaatccagcaagaatatccaacagtcaaatcacttgcccaaatatgaacgggtcaaagaactatgccagcaggccaggtaccagacagcctgtgaacaaccggggcagaagtggcaatgcattgaggatacatctggcaagcttcgaattcacaagtgtaaaggacccagtgacctgctcacagtccggcagagcacgcggaacctctacgctcgcggcttccatgacaaagacaaagagtgcagttgtagggagtctggttaccgtgccagcagaagccaaagaaagagtcaacggcaattcttgagaaaccaggggactccaaagtacaagcccagatttgtccatactcggcagacacgttccttgtccgtcgaatttgaaggtgaaatatatgacataaatctggaagaagaagaagaattgcaagtgttgcaaccaagaaacattgctaagcgtcatgatgaaggccacaaggggccaagagatctccaggcttccagtggtggcaacaggggcaggatgctggcagatagcagcaacgccgtgggcccacctaccactgtccgagtgacacacaagtgttttattcttcccaatgactctatccattgtgagagagaactgtaccaatcggccagagcgtggaaggaccataaggcatacattgacaaagagattgaagctctgcaagataaaattaagaatttaagagaagtgagaggacatctgaagagaaggaagcctgaggaatgtagctgcagtaaacaaagctattacaataaagagaaaggtgtaaaaaagcaagagaaattaaagagccatcttcacccattcaaggaggctgctcaggaagtagatagcaaactgcaacttttcaaggagaacaaccgtaggaggaagaaggagaggaaggagaagagacggcagaggaagggggaagagtgcagcctgcctggcctcacttgcttcacgcatgacaacaaccactggcagacagccccgttctggaacctgggatctttctgtgcttgcacgagttctaacaataacacctactggtgtttgcgtacagttaatgagacgcataattttcttttctgtgagtttgctactggctttttggagtattttgatatgaatacagatccttatcagctcacaaatacagtgcacacggtagaacgaggcattttgaatcagctacacgtacaactaatggagctcagaagctgtcaaggatataagcagtgcaacccaagacctaagaatcttgatgttggaaataaagatggaggaagctatgacctacacagaggacagttatgggatggatgggaaggttaatcagccccgtctcactgcagacatcaactggcaaggcctagaggagctacacagtgtgaatgaaaacatctatgagtacagacaaaactacagacttagtctggtggactggactaattacttgaaggatttagatagagtatttgcactgctgaagagtcactatgagcaaaataaaacaaataagactcaaactgctcaaagtgacgggttcttggttgtctctgctgagcacgctgtgtcaatggagatggcctctgctgactcagatgaagacccaaggcataaggttgggaaaacacctcatttgaccttgccagctgaccttcaaaccctgcatttgaaccgaccaacattaagtccagagagtaaacttgaatggaataacgacattccagaagttaatcatttgaattctgaacactggagaaaaaccgaaaaatggacggggcatgaagagactaatcatctggaaaccgatttcagtggcgatggcatgacagagctagagctcgggcccagccccaggctgcagcccattcgcaggcacccgaaagaacttccccagtatggtggtcctggaaaggacatttttgaagatcaactatatcttcctgtgcattccgatggaatttcagttcatcagatgttcaccatggccaccgcagaacaccgaagtaattccagcatagcggggaagatgttgaccaaggtggagaagaatcacgaaaaggagaagtcacagcacctagaaggcagcgcctcctcttcactctcctctgattagatgaaactgttaccttaccctaaacacagtatttctttttaacttttttatttgtaaactaataaaggtaatcacagccaccaacattccaagctaccctgggtacctttgtgcagtagaagctagtgagcatgtgagcaagcggtgtgcacacggagactcatcgttataatttactatctgccaagagtagaaagaaaggctggggatatttgggttggcttggttttgattttttgcttgtttgtttgttttgtactaaaacagtattatcttttgaatatcgtagggacataagtatatacatgttatccaatcaagatggctagaatggtgcctttctgagtgtctaaaacttgacacccctggtaaatctttcaacacacttccactgcctgcgtaatgaagttttgattcatttttaaccactggaatttttcaatgccgtcattttcagttagatgattttgcactttgagattaaaatgccatgtctatttgattagtcttatttttttatttttacaggcttatcagtctcactgttggctgtcattgtgacaaagtcaaataaacccccaaggacgacacacagtatggatcacatattgtttgacattaagcttttgccagaaaatgttgcatgtgttttacctcgacttgctaaaatcgattagcagaaaggcatggctaataatgttggtggtgaaaataaataaataagtaaacaaaa

SEQ ID NO: 30270 - DNA, 5551 bp, Homo sapiens
  source 1..5551: mol_type = unassigned DNA
aggttacttgactgggagttctcagacctccagtttcagccctgccctcagcctccaatccgtaagagacacccagccccagcaattggattgggcagcccgtcttgacacaccactgtgctgagtgcttgaggacgtgtttcaacagatggttggggttagtgtgtgtcatcacattcgagtggggattaagagaaggaaggctgccttgctggagctgtgtggtcttctccaagtgagagtcgcaggcaatagaactactttgcttttggaggaaaaggaggaattcattttcagcagacacaagaaaagcagtttttttttcaggtgctgacggccacccaccatcatctaaagaagataaacttggcaaatgacatgcaggttcttcaaggcagaataattgcagaaaatcttcaaaggaccctatctgcagatgttctgaatacctctgagaatagagattgattattcaaccaggatacctaattcaagaactccagaaatcaggagacggagacattttgtcagttttgcaacattggaccaaatacaatgaagtattcttgctgtgctctggttttggctgtcctgggcacagaattgctgggaagcctctgttcgactgtcagatccccgaggttcagaggacggatacagcaggaacgaaaaaacatccgacccaacattattcttgtgcttaccgatgatcaagatgtggagctggggtccctgcaagtcatgaacaaaacgagaaagattatggaacatgggggggccaccttcatcaatgcctttgtgactacacccatgtgctgcccgtcacggtcctccatgctcaccgggaagtatgtgcacaatcacaatgtctacaccaacaacgagaactgctcttccccctcgtggcaggccatgcatgagcctcggacttttgctgtatatcttaacaacactggctacagaacagccttttttggaaaatacctcaatgaatataatggcagctacatcccccctgggtggcgagaatggcttggattaatcaagaattctcgcttctataattacactgtttgtcgcaatggcatcaaagaaaagcatggatttgattatgcaaaggactacttcacagacttaatcactaacgagagcattaattacttcaaaatgtctaagagaatgtatccccataggcccgttatgatggtgatcagccacgctgcgccccacggccccgaggactcagccccacagttttctaaactgtaccccaatgcttcccaacacataactcctagttataactatgcaccaaatatggataaacactggattatgcagtacacaggaccaatgctgcccatccacatggaatttacaaacattctacagcgcaaaaggctccagactttgatgtcagtggatgattctgtggagaggctgtataacatgctcgtggagacgggggagctggagaatacttacatcatttacaccgccgaccatggttaccatattgggcagtttggactggtcaaggggaaatccatgccatatgactttgatattcgtgtgcctttttttattcgtggtccaagtgtagaaccaggatcaatagtcccacagatcgttctcaacattgacttggcccccacgatcctggatattgctgggctcgacacacctcctgatgtggacggcaagtctgtcctcaaacttctggacccagaaaagccaggtaacaggtttcgaacaaacaagaaggccaaaatttggcgtgatacattcctagtggaaagaggcaaatttctacgtaagaaggaagaatccagcaagaatatccaacagtcaaatcacttgcccaaatatgaacgggtcaaagaactatgccagcaggccaggtaccagacagcctgtgaacaaccggggcagaagtggcaatgcattgaggatacatctggcaagcttcgaattcacaagtgtaaaggacccagtgacctgctcacagtccggcagagcacgcggaacctctacgctcgcggcttccatgacaaagacaaagagtgcagttgtagggagtctggttaccgtgccagcagaagccaaagaaagagtcaacggcaattcttgagaaaccaggggactccaaagtacaagcccagatttgtccatactcggcagacacgttccttgtccgtcgaatttgaaggtgaaatatatgacataaatctggaagaagaagaagaattgcaagtgttgcaaccaagaaacattgctaagcgtcatgatgaaggccacaaggggccaagagatctccaggcttccagtggtggcaacaggggcaggatgctggcagatagcagcaacgccgtgggcccacctaccactgtccgagtgacacacaagtgttttattcttcccaatgactctatccattgtgagagagaactgtaccaatcggccagagcgtggaaggaccataaggcatacattgacaaagagattgaagctctgcaagataaaattaagaatttaagagaagtgagaggacatctgaagagaaggaagcctgaggaatgtagctgcagtaaacaaagctattacaataaagagaaaggtgtaaaaaagcaagagaaattaaagagccatcttcacccattcaaggaggctgctcaggaagtagatagcaaactgcaacttttcaaggagaacaaccgtaggaggaagaaggagaggaaggagaagagacggcagaggaagggggaagagtgcagcctgcctggcctcacttgcttcacgcatgacaacaaccactggcagacagccccgttctggaacctgggatctttctgtgcttgcacgagttctaacaataacacctactggtgtttgcgtacagttaatgagacgcataattttcttttctgtgagtttgctactggctttttggagtattttgatatgaatacagatccttatcagctcacaaatacagtgcacacggtagaacgaggcattttgaatcagctacacgtacaactaatggagctcagaagctgtcaaggatataagcagtgcaacccaagacctaagaatcttgatgttggaaataaagatggaggaagctatgacctacacagaggacagttatgggatggatgggaaggttaatcagccccgtctcactgcagacatcaactggcaaggcctagaggagctacacagtgtgaatgaaaacatctatgagtacagacaaaactacagacttagtctggtggactggactaattacttgaaggatttagatagagtatttgcactgctgaagagtcactatgagcaaaataaaacaaataagactcaaactgctcaaagtgacgggttcttggttgtctctgctgagcacgctgtgtcaatggagatggcctctgctgactcagatgaagacccaaggcataaggttgggaaaacacctcatttgaccttgccagctgaccttcaaaccctgcatttgaaccgaccaacattaagtccagagagtaaacttgaatggaataacgacattccagaagttaatcatttgaattctgaacactggagaaaaaccgaaaaatggacggggcatgaagagactaatcatctggaaaccgatttcagtggcgatggcatgacagagctagagctcgggcccagccccaggctgcagcccattcgcaggcacccgaaagaacttccccagtatggtggtcctggaaaggacatttttgaagatcaactatatcttcctgtgcattccgatggaatttcagttcatcagatgttcaccatggccaccgcagaacaccgaagtaattccagcatagcggggaagatgttgaccaaggtggagaagaatcacgaaaaggagaagtcacagcacctagaaggcagcgcctcctcttcactctcctctgattagatgaaactgttaccttaccctaaacacagtatttctttttaacttttttatttgtaaactaataaaggtaatcacagccaccaacattccaagctaccctgggtacctttgtgcagtagaagctagtgagcatgtgagcaagcggtgtgcacacggagactcatcgttataatttactatctgccaagagtagaaagaaaggctggggatatttgggttggcttggttttgattttttgcttgtttgtttgttttgtactaaaacagtattatcttttgaatatcgtagggacataagtatatacatgttatccaatcaagatggctagaatggtgcctttctgagtgtctaaaacttgacacccctggtaaatctttcaacacacttccactgcctgcgtaatgaagttttgattcatttttaaccactggaatttttcaatgccgtcattttcagttagatgattttgcactttgagattaaaatgccatgtctatttgattagtcttatttttttatttttacaggcttatcagtctcactgttggctgtcattgtgacaaagtcaaataaacccccaaggacgacacacagtatggatcacatattgtttgacattaagcttttgccagaaaatgttgcatgtgttttacctcgacttgctaaaatcgattagcagaaaggcatggctaataatgttggtggtgaaaataaataaataagtaaacaaaatgaagattgcctgctctctctgtgcctagcctcaaagcgttcatcatacatcatacctttaagattgctatattttgggttattttcttgacaggagaaaaagatctaaagatcttttattttcatcttttttggttttcttggcatgactaagaagcttaaatgttgataaaatatgactagttttgaatttacaccaagaacttctcaataaaagaaaatcatgaatgctccacaatttcaacataccacaagagaagttaatttcttaacattgtgttctatgattatttgtaagaccttcaccaagttctgatatcttttaaagacatagttcaaaattgcttttgaaaatctgtattcttgaaaatatccttgttgtgtattaggtttttaaataccagctaaaggattacctcactgagtcatcagtaccctcctattcagctccccaagatgatgtgtttttgcttaccctaagagaggttttcttcttatttttagataattcaagtgcttagataaattatgttttctttaagtgtttatggtaaactcttttaaagaaaatttaatatgttatagctgaatctttttggtaactttaaatctttatcatagactctgtacatatgttcaaattagctgcttgcctgatgtgtgtatcatcggtgggatgacagaacaaacatatttatgatcatgaataatgtgctttgtaaaaagatttcaagttattaggaagcatactctgttttttaatcatgtataatattccatgatacttttatagaacaattctggcttcaggaaagtctagaagcaatatttcttcaaataaaaggtgtttaaactttttt

SEQ ID NO: 30271 - DNA, 806 bp, Homo sapiens
  source 1..806: mol_type = unassigned DNA
aggttacttgactgggagttctcagacctccagtttcagccctgccctcagcctccaatccgtaagagacacccagccccagcaattggattgggcagcccgtcttgacacaccactgtgctgagtgcttgaggacgtgtttcaacagatggttggggttagtgtgtgtcatcacattcgagtggggattaagagaaggaaggctgccttgctggagctgtgtggtcttctccaagtgagagtcgcaggcaatagaactactttgcttttggaggaaaaggaggaattcattttcagcagacacaagaaaagcagtttttttttcagggattcttcacttctcttgaacaaggaactcactcagagactaacacaaaggaagtaatttcttacctggtcattatttagtctacaataagttcatccttcttcagtgtgaccagtaaattcttcccatactcttgaagagagcataattggaatggagaggtgctgacggccacccaccatcatctaaagaagataaacttggcaaatgacatgcaggttcttcaaggcagaataattgcagaaaatcttcaaaggaccctatctgcagatgttctgaatacctctgagaatagagattgattattcaaccaggatacctaattcaagaactccagaaatcaggagacggagacattttgtcagttttgcaacattggaccaaatacaatgaagtattcttgctgtgctctggttttggctgtcctgggcacagaattgctgggaagcctctgttcgactgtcagatccccgaggtt

SEQ ID NO: 30272 - DNA, 630 bp, Homo sapiens
  source 1..630: mol_type = unassigned DNA
ggagtttggatttcattttagtctcaccgtctccgtttttctctgactgcccagaactccagaaatcaggagacggagacattttgtcagttttgcaacattggaccaaatacaatgaagtattcttgctgtgctctggttttggctgtcctgggcacagaattgctgggaagcctctgttcgactgtcagatccccgaggttcagaggacggatacagcaggaacgaaaaaacatccgacccaacattattcttgtgcttaccgatgatcaagatgtggagctggggtccctgcaagtcatgaacaaaacgagaaagattatggaacatgggggggccaccttcatcaatgcctttgtgactacacccatgtgctgcccgtcacggtcctccatgctcaccgggaagtatgtgcacaatcacaatgtctacaccaacaacgagaactgctcttccccctcgtggcaggccatgcatgagcctcggacttttgctgtatatcttaacaacactggctacagaacagccttttttggaaaatacctcaatgaatataatggcagctacatcccccctgggtggcgagaatggcttggattaatcaagaattctcgcttctataattacact

SEQ ID NO: 30273 - DNA, 460 bp, Homo sapiens
  source 1..460: mol_type = unassigned DNA
atataatatgctgttgcaagagactacttcagatcgaaaatctgtttttaaaatcattgactgatatttcctttgtatttttttctcccccttccaggaccctatctgcagatgttctgaatacctctgagaatagagattgattattcaaccaggatacctaattcaagaactccagaaatcaggagacggagacattttgtcagttttgcaacattggaccaaatacaatgaagtattcttgctgtgctctggttttggctgtcctgggcacagaattgctgggaagcctctgttcgactgtcagatccccgaggttcagaggacggatacagcaggaacgaaaaaacatccgacccaacattattcttgtgcttaccgatgatcaagatgtggagctggggtccctgcaagtcatgaacaaaacgagaaagattatggaacatgggggggccacctt

SEQ ID NO: 30274 - DNA, 585 bp, Homo sapiens
  source 1..585: mol_type = unassigned DNA
tctcttttagcatagttttgaatggaatgctagcacggcacacttgtcaaagccagttgttgctgtcctatcaatgctgctattgtacggctgacagatgacggtgctgacggccacccaccatcatctaaagaagataaacttggcaaatgacatgcaggttcttcaaggcagaataattgcagaaaatcttcaaaggaccctatctgcagatgttctgaatacctctgagaatagagattgattattcaaccaggatacctaattcaagaactccagaaatcaggagacggagacattttgtcagttttgcaacattggaccaaatacaatgaagtattcttgctgtgctctggttttggctgtcctgggcacagaattgctgggaagcctctgttcgactgtcagatccccgaggttcagaggacggatacagcaggaacgaaaaaacatccgacccaacattattcttgtgcttaccgatgatcaagatgtggagctggggtccctgcaagtcatgaacaaaacgagaaagattatggaacatgggggggccaccttcatcaatgcctttgtgactacacc

SEQ ID NO: 30275 - DNA, 593 bp, Homo sapiens
  source 1..593: mol_type = unassigned DNA
cctgtgctatctgtgccttaccagtctcaccaacaataagcctggtgactgacaatcgagagggggctctgtccacgtaggtgccggcacaagctgaggacatgagtgggacagaggaaccagccttgcacggaggaagcaccttttccttctggtgattgattgatgggggacagtgaggaggttttcagagactggaaaaaattgtcccagtcacttactatgaagtctttgtcagcagaaaagactctccggggtagagaatgatataatgcagatgacaaatgacaggaccctatctgcagatgttctgaatacctctgagaatagagattgattattcaaccaggatacctaattcaagaactccagaaatcaggagacggagacattttgtcagttttgcaacattggaccaaatacaatgaagtattcttgctgtgctctggttttggctgtcctgggcacagaattgctgggaagcctctgttcgactgtcagatccccgaggttcagaggacggatacagcaggaacgaaaaaacatccgacccaacattattcttgtgcttaccgatgatcaagatgtggagc

SEQ ID NO: 30276 - DNA, 4915 bp, Homo sapiens
  source 1..4915: mol_type = unassigned DNA
cacttgagccgaagttaatttctcggggagttctcgggcgcgcacaggcagctcggtttgccctgcgattgagctgcgggtcgcggccggcgccggcctctccaatggcaaatgtgtgtggctggaggcgagcgcgaggctttcggcaaaggcagtcgagtgtttgcagaccggggcgagtcctgtgaaagcagataaaagaaaacatttattaacgtgtcattacgaggggagcgcccggccggggctgtcgcactccccgcggaacatttggctccctccagctccgagagaggagaagaagaaagcggaaaagaggcagattcacgtcgtttccagccaagtggacctgatcgatggccctcctgaatttatcacgatatttgatttattagcgatgccccctggtttgtgtgttacgcacacacacgtgcacacaaggctctggctcgcttccctccctcgtttccagctcctgggcgaatcccacatctgtttcaactctccgccgagggcgagcaggagcgagagtgtgtcgagtgagtgtgcgtctgtgtgtcccggcgagggtgcgcgctcggcgccgggagcgcggccagccgagtccggaggcatcgggaggtcgagagccgccgggaccccagctctgcgttcactgccccgtccggagctggacttcggggccggggccggggccgtgcgccggggacaggcagggccgggtcgcgggccgcgcgtcccccaggccggagatctgcgagtgaagagggacgagggaaaagaaacaaagccacagacgcaacttgagactcccgcatcccaaaagaagcaccagatcagcaaaaaaagaagatgggccccccgagcctcgtgctgtgcttgctgtccgcaactgtgttctccctgctgggtggaagctcggccttcctgtcgcaccaccgcctgaaaggcaggtttcagagggaccgcaggaacatccgccccaacatcatcctggtgctgacggacgaccaggatgtggagctgggttccatgcaggtgatgaacaagacccggcgcatcatggagcagggcggggcgcacttcatcaacgccttcgtgaccacacccatgtgctgcccctcacgctcctccatcctcactggcaagtacgtccacaaccacaacacctacaccaacaatgagaactgctcctcgccctcctggcaggcacagcacgagagccgcacctttgccgtgtacctcaatagcactggctaccggacagctttcttcgggaagtatcttaatgaatacaacggctcctacgtgccacccggctggaaggagtgggtcggactccttaaaaactcccgcttttataactacacgctgtgtcggaacggggtgaaagagaagcacggctccgactactccaaggattacctcacagacctcatcaccaatgacagcgtgagcttcttccgcacgtccaagaagatgtacccgcacaggccagtcctcatggtcatcagccatgcagccccccacggccctgaggattcagccccacaatattcacgcctcttcccaaacgcatctcagcacatcacgccgagctacaactacgcgcccaacccggacaaacactggatcatgcgctacacggggcccatgaagcccatccacatggaattcaccaacatgctccagcggaagcgcttgcagaccctcatgtcggtggacgactccatggagacgatttacaacatgctggttgagacgggcgagctggacaacacgtacatcgtatacaccgccgaccacggttaccacatcggccagtttggcctggtgaaagggaaatccatgccatatgagtttgacatcagggtcccgttctacgtgaggggccccaacgtggaagccggctgtctgaatccccacatcgtcctcaacattgacctggcccccaccatcctggacattgcaggcctggacatacctgcggatatggacgggaaatccatcctcaagctgctggacacggagcggccggtgaatcggtttcacttgaaaaagaagatgagggtctggcgggactccttcttggtggagagaggcaagctgctacacaagagagacaatgacaaggtggacgcccaggaggagaactttctgcccaagtaccagcgtgtgaaggacctgtgtcagcgtgctgagtaccagacggcgtgtgagcagctgggacagaagtggcagtgtgtggaggacgccacggggaagctgaagctgcataagtgcaagggccccatgcggctgggcggcagcagagccctctccaacctcgtgcccaagtactacgggcagggcagcgaggcctgcacctgtgacagcggggactacaagctcagcctggccggacgccggaaaaaactcttcaagaagaagtacaaggccagctatgtccgcagtcgctccatccgctcagtggccatcgaggtggacggcagggtgtaccacgtaggcctgggtgatgccgcccagccccgaaacctcaccaagcggcactggccaggggcccctgaggaccaagatgacaaggatggtggggacttcagtggcactggaggccttcccgactactcagccgccaaccccattaaagtgacacatcggtgctacatcctagagaacgacacagtccagtgtgacctggacctgtacaagtccctgcaggcctggaaagaccacaagctgcacatcgaccacgagattgaaaccctgcagaacaaaattaagaacctgagggaagtccgaggtcacctgaagaaaaagcggccagaagaatgtgactgtcacaaaatcagctaccacacccagcacaaaggccgcctcaagcacagaggctccagtctgcatcctttcaggaagggcctgcaagagaaggacaaggtgtggctgttgcgggagcagaagcgcaagaagaaactccgcaagctgctcaagcgcctgcagaacaacgacacgtgcagcatgccaggcctcacgtgcttcacccacgacaaccagcactggcagacggcgcctttctggacactggggcctttctgtgcctgcaccagcgccaacaataacacgtactggtgcatgaggaccatcaatgagactcacaatttcctcttctgtgaatttgcaactggcttcctagagtactttgatctcaacacagacccctaccagctgatgaatgcagtgaacacactggacagggatgtcctcaaccagctacacgtacagctcatggagctgaggagctgcaagggttacaagcagtgtaacccccggactcgaaacatggacctgggacttaaagatggaggaagctatgagcaatacaggcagtttcagcgtcgaaagtggccagaaatgaagagaccttcttccaaatcactgggacaactgtgggaaggctgggaaggttaagaaacaacagaggtggacctccaaaaacatagaggcatcacctgactgcacaggcaatgaaaaaccatgtgggtgatttccagcagacctgtggtattggccaggaggcctgagaaagcaagcacgcactctcagtcaacatgacagattctggaggataaccagcaggagcagagataacttcaggaagtccatttttgcccctgcttttgctttggattatacctcaccagctgcacaaaatgcattttttcgtatcaaaaagtcaccactaaccctcccccagaagctcacaaaggaaaacggagagagcgagcgagagagatttccttggaaatttctcccaagggcgaaagtcattggaatttttaaatcataggggaaaagcagtcctgttctaaatcctcttattcttttggtttgtcacaaagaaggaactaagaagcaggacagaggcaacgtggagaggctgaaaacagtgcagagacgtttgacaatgagtcagtagcacaaaagagatgacatttacctagcactataaaccctggttgcctctgaagaaactgccttcattgtatatatgtgactatttacatgtaatcaacatgggaacttttaggggaacctaataagaaatcccaattttcaggagtggtggtgtcaataaacgctctgtggccagtgtaaaagaaaatccctcgcagttgtggacatttctgttcctgtccagataccatttctcctagtatttctttgttatgtcccagaactgatgttttttttttaaggtactgaaaagaaatgaagttgatgtatgtcccaagttttgatgaaactgtatttgtaaaaaaaattttgtagtttaagtattgtcatacagtgttcaaaaccccagccaatgaccagcagttggtatgaagaacctttgacattttgtaaaaggccatttcttgggagttttttggtgtgtctgtttttttaaagtattcaagatactaccagtcaacatctttttggaagaaaatgccttgggtttagaagattttcttaaaaggggagtagatggttgtagattgactaaaaagtctaccatacttcaagggactacaggtaagtctcatagtataccagctttggtacttcattttttaaaaaagtattaatcaattgcaaagaaattcgccttggccaacccttctttgtgtatcaggtagtctaacctgatacaagtagttgacagatttcaactatcaatcaccagtccaacccatttctcatttaacagatgacggagataatccctaaaagcacccacatttgtttcaatgccccaaacaggccaaggctccctagcaactccctagtggcgttttttaacttctcagaaactgttaccattatttgaaataggcttccttaacctcctttacccttaacccaacagggattt

SEQ ID NO: 30277 - DNA, 4183 bp, Homo sapiens
  source 1..4183: mol_type = unassigned DNA
gggccatttctggacaacagctgctattttcacttgagccgaagttaatttctcggggagttctcgggcgcgcacaggcagctcggtttgccctgcgattgagctgcgggtcgcggccggcgccggcctctccaatggcaaatgtgtgtggctggaggcgagcgcgaggctttcggcaaaggcagtcgagtgtttgcagaccggggcgagtcctgtgaaagcagataaaagaaaacatttattaacgtgtcattacgaggggagcgcccggccggggctgtcgcactccccgcggaacatttggctccctccagctccgagagaggagaagaagaaagcggaaaagaggcagattcacgtcgtttccagccaagtggacctgatcgatggccctcctgaatttatcacgatatttgatttattagcgatgccccctggtttgtgtgttacgcacacacacgtgcacacaaggctctggctcgcttccctccctcgtttccagctcctgggcgaatcccacatctgtttcaactctccgccgagggcgagcaggagcgagagtgtgtcgaatctgcgagtgaagagggacgagggaaaagaaacaaagccacagacgcaacttgagactcccgcatcccaaaagaagcaccagatcagcaaaaaaagaagatgggccccccgagcctcgtgctgtgcttgctgtccgcaactgtgttctccctgctgggtggaagctcggccttcctgtcgcaccaccgcctgaaaggcaggtttcagagggaccgcaggaacatccgccccaacatcatcctggtgctgacggacgaccaggatgtggagctgggttccatgcaggtgatgaacaagacccggcgcatcatggagcagggcggggcgcacttcatcaacgccttcgtgaccacacccatgtgctgcccctcacgctcctccatcctcactggcaagtacgtccacaaccacaacacctacaccaacaatgagaactgctcctcgccctcctggcaggcacagcacgagagccgcacctttgccgtgtacctcaatagcactggctaccggacagctttcttcgggaagtatcttaatgaatacaacggctcctacgtgccacccggctggaaggagtgggtcggactccttaaaaactcccgcttttataactacacgctgtgtcggaacggggtgaaagagaagcacggctccgactactccaaggattacctcacagacctcatcaccaatgacagcgtgagcttcttccgcacgtccaagaagatgtacccgcacaggccagtcctcatggtcatcagccatgcagccccccacggccctgaggattcagccccacaatattcacgcctcttcccaaacgcatctcagcacatcacgccgagctacaactacgcgcccaacccggacaaacactggatcatgcgctacacggggcccatgaagcccatccacatggaattcaccaacatgctccagcggaagcgcttgcagaccctcatgtcggtggacgactccatggagacgatttacaacatgctggttgagacgggcgagctggacaacacgtacatcgtatacaccgccgaccacggttaccacatcggccagtttggcctggtgaaagggaaatccatgccatatgagtttgacatcagggtcccgttctacgtgaggggccccaacgtggaagccggctgtctgaatccccacatcgtcctcaacattgacctggcccccaccatcctggacattgcaggcctggacatacctgcggatatggacgggaaatccatcctcaagctgctggacacggagcggccggtgaatcggtttcacttgaaaaagaagatgagggtctggcgggactccttcttggtggagagaggcaagctgctacacaagagagacaatgacaaggtggacgcccaggaggagaactttctgcccaagtaccagcgtgtgaaggacctgtgtcagcgtgctgagtaccagacggcgtgtgagcagctgggacagaagtggcagtgtgtggaggacgccacggggaagctgaagctgcataagtgcaagggccccatgcggctgggcggcagcagagccctctccaacctcgtgcccaagtactacgggcagggcagcgaggcctgcacctgtgacagcggggactacaagctcagcctggccggacgccggaaaaaactcttcaagaagaagtacaaggccagctatgtccgcagtcgctccatccgctcagtggccatcgaggtggacggcagggtgtaccacgtaggcctgggtgatgccgcccagccccgaaacctcaccaagcggcactggccaggggcccctgaggaccaagatgacaaggatggtggggacttcagtggcactggaggccttcccgactactcagccgccaaccccattaaagtgacacatcggtgctacatcctagagaacgacacagtccagtgtgacctggacctgtacaagtccctgcaggcctggaaagaccacaagctgcacatcgaccacgagattgaaaccctgcagaacaaaattaagaacctgagggaagtccgaggtcacctgaagaaaaagcggccagaagaatgtgactgtcacaaaatcagctaccacacccagcacaaaggccgcctcaagcacagaggctccagtctgcatcctttcaggaagggcctgcaagagaaggacaaggtgtggctgttgcgggagcagaagcgcaagaagaaactccgcaagctgctcaagcgcctgcagaacaacgacacgtgcagcatgccaggcctcacgtgcttcacccacgacaaccagcactggcagacggcgcctttctggacactggggcctttctgtgcctgcaccagcgccaacaataacacgtactggtgcatgaggaccatcaatgagactcacaatttcctcttctgtgaatttgcaactggcttcctagagtactttgatctcaacacagacccctaccagctgatgaatgcagtgaacacactggacagggatgtcctcaaccagctacacgtacagctcatggagctgaggagctgcaagggttacaagcagtgtaacccccggactcgaaacatggacctgggacttaaagatggaggaagctatgagcaatacaggggacaactgtgggaaggctgggaaggttaagaaacaacagaggtggacctccaaaaacatagaggcatcacctgactgcacaggcaatgaaaaaccatgtgggtgatttccagcagacctgtggtattggccaggaggcctgagaaagcaagcacgcactctcagtcaacatgacagattctggaggataaccagcaggagcagagataacttcaggaagtccatttttgcccctgcttttgctttggattatacctcaccagctgcacaaaatgcattttttcgtatcaaaaagtcaccactaaccctcccccagaagctcacaaaggaaaacggagagagcgagcgagagagatttccttggaaatttctcccaagggcgaaagtcattggaatttttaaatcataggggaaaagcagtcctgttctaaatcctcttattcttttggtttgtcacaaagaaggaactaagaagcaggacagaggcaacgtggagaggctgaaaacagtgcagagacgtttgacaatgagtcagtagcacaaaagagatgacatttacctagcactataaaccctggttgcctctgaagaaactgccttcattgtatatatgtgactatttacatgtaatcaacatgggaacttttaggggaacctaataagaaatcccaattttcaggagtggtggtgtcaataaacgctctgtggccagtgtaaaagaaaatccctcgcagttgtggacatttctgttcctgtccagataccatttctcctagtatttctttgttatgtcccagaactgatgttttttttttaaggtactgaaaagaaatgaagttgatgtatgtcccaagttttgatgaaactgtatttgtaaaaaaaattttgtagtttaagtattgtcatacagtgttcaaaaccccagccaatgaccagcagttggtatgaagaacctttgacattttgtaaaaggccatttcttggg

SEQ ID NO: 30278 - DNA, 1825 bp, Homo sapiens
  source 1..1825: mol_type = unassigned DNA
ttcagtggcactggaggccttcccgactattcagccgccaaccccattaaagtgacacatcggtgctacatcctagagaacgacacagtccagtgtgacctggacctgtacaagtccctgcaggcctggaaagaccacaagctgcacatcgaccacgagattgaaaccctgcagaacaaaattaagaacctgagggaagtccgaggtcacctgaagaaaaagcggccagaagaatgtgactgtcacaaaatcagctaccacacccagcacaaaggccgcctcaagcacagaggctccagtctgcatcctttcaggaagggcctgcaagagaaggacaaggtgtggctgttgcgggagcagaagcgcaagaagaaactccgcaagctgctcaagcgcctgcagaacaacgacacgtgcagcatgccaggcctcacgtgcttcacccacgacaaccagcactggcagacggcgcctttctggacactggggcctttctgtgcctgcaccagcgccaacaataacacgtactggtgcatgaggaccatcaatgagactcacaatttcctcttctgtgaatttgcaactggcttcctagagtactttgatctcaacacagacccctaccagctgatgaatgcagtgaacacactggacagggatgtcctcaaccagctacacgtacagctcatggagctgaggagctgcaagggttacaagcagtgtaacccccggactcgaaacatggacctgggacttaaagatggaggaagctatgagcaatacaggcagtttcagcgtcgaaagtggccagaaatgaagagaccttcttccaaatcactgggacaactgtgggaaggctgggaaggttaagaaacaacagaggtggacctccaaaaacatagaggcatcacctgactgcacaggcaatgaaaaaccatgtgggtgatttccagcagacctgtggtattggccaggaggcctgagaaagcaagcacgcactctcagtcaacatgacagattctggaggataaccagcaggagcagagataacttcaggaagtccatttttgcccctgcttttgctttggattatacctcaccagctgcacaaaatgcattttttcgtatcaaaaagtcaccactaaccctcccccagaagctcacaaaggaaaacggagagagcgagcgagagagatttccttggaaatttctcccaagggcgaaagtcattggaatttttaaatcataggggaaaagcagtcctgttctaaatcctcttattcttttggtttgtcacaaagaaggaactaagaagcaggacagaggcaacgtggagaggctgaaaacagtgcagagacgtttgacaatgagtcagtagcacaaaagagatgacatttacctagcactataaaccctggttgcctctgaagaaactgccttcattgtatatatgtgactatttacatgtaatcaacatgggaacttttaggggaacctaataagaaatcccaattttcaggagtggtggtgtcaataaacgctctgtggccagtgtaaaagaaaatccctcgcagttgtggacatttctgttcctgtccagataccatttctcctagtatttctttgttatgtcccagaactgatgttttttttttaaggtactgaaaagaaatgaagttgatgtatgtcccaagttttgatgaaactgtatttgtaaaaaaaattttgtagtttaagtattgtcatacagtgttcaaaaccccagccaatgaccagcagttggtatgaagaacctttgacattttgtaaaaggccatttcttggg

SEQ ID NO: 30279 - DNA, 3905 bp, Homo sapiens
  source 1..3905: mol_type = unassigned DNA
ctcgggcgcgcacaggcagctcggtttgccctgcgattgagctgcgggtcgcggccggcgccggcctctccaatggcaaatgtgtgtggctggaggcgagcgcgaggctttcggcaaaggcagtcgagtgtttgcagaccggggcgagtcctgtgaaagcagataaaagaaaacatttattaacgtgtcattacgaggggagcgcccggccggggctgtcgcactccccgcggaacatttggctccctccagctccgagagaggagaagaagaaagcggaaaagaggcagattcacgtcgtttccagccaagtggacctgatcgatggccctcctgaatttatcacgatatttgatttattagcgatgccccctggtttgtgtgttacgcacacacacgtgcacacaaggctctggctcgcttccctccctcgtttccagctcctgggcgaatcccacatctgtttcaactctccgccgagggcgagcaggagcgagagtgtgtcgaatctgcgagtgaagagggacgagggaaaagaaacaaagccacagacgcaacttgagactcccgcatcccaaaagaagcaccagatcagcaaaaaaagaagatgggccccccgagcctcgtgctgtgcttgctgtccgcaactgtgttctccctgctgggtggaagctcggccttcctgtcgcaccaccgcctgaaaggcaggtttcagagggaccgcaggaacatccgccccaacatcatcctggtgctgacggacgaccaggatgtggagctgggttccatgcaggtgatgaacaagacccggcgcatcatggagcagggcggggcgcacttcatcaacgccttcgtgaccacacccatgtgctgcccctcacgctcctccatcctcactggcaagtacgtccacaaccacaacacctacaccaacaatgagaactgctcctcgccctcctggcaggcacagcacgagagccgcacctttgccgtgtacctcaatagcactggctaccggacagctttcttcgggaagtatcttaatgaatacaacggctcctacgtgccacccggctggaaggagtgggtcggactccttaaaaactcccgcttttataactacacgctgtgtcggaacggggtgaaagagaagcacggctccgactactccaaggattacctcacagacctcatcaccaatgacagcgtgagcttcttccgcacgtccaagaagatgtacccgcacaggccagtcctcatggtcatcagccatgcagccccccacggccctgaggattcagccccacaatattcacgcctcttcccaaacgcatctcagcacatcacgccgagctacaactacgcgcccaacccggacaaacactggatcatgcgctacacggggcccatgaagcccatccacatggaattcaccaacatgctccagcggaagcgcttgcagaccctcatgtcggtggacgactccatggagacgatttacaacatgctggttgagacgggcgagctggacaacacgtacatcgtatacaccgccgaccacggttaccacatcggccagtttggcctggtgaaagggaaatccatgccatatgagtttgacatcagggtcccgttctacgtgaggggccccaacgtggaagccggctgtctgaatccccacatcgtcctcaacattgacctggcccccaccatcctggacattgcaggcctggacatacctgcggatatggacgggaaatccatcctcaagctgctggacacggagcggccggtgaatcggtttcacttgaaaaagaagatgagggtctggcgggactccttcttggtggagagaggcaagctgctacacaagagagacaatgacaaggtggacgcccaggaggagaactttctgcccaagtaccagcgtgtgaaggacctgtgtcagcgtgctgagtaccagacggcgtgtgagcagctgggacagaagtggcagtgtgtggaggacgccacggggaagctgaagctgcataagtgcaagggccccatgcggctgggcggcagcagagccctctccaacctcgtgcccaagtactacgggcagggcagcgaggcctgcacctgtgacagcggggactacaagctcagcctggccggacgccggaaaaaactcttcaagaagaagtacaaggccagctatgtccgcagtcgctccatccgctcagtggccatcgaggtggacggcagggtgtaccacgtaggcctgggtgatgccgcccagccccgaaacctcaccaagcggcactggccaggggcccctgaggaccaagatgacaaggatggtggggacttcagtggcactggaggccttcccgactactcagccgccaaccccattaaagtgacacatcggtgctacatcctagagaacgacacagtccagtgtgacctggacctgtacaagtccctgcaggcctggaaagaccacaagctgcacatcgaccacgagattgaaaccctgcagaacaaaattaagaacctgagggaagtccgaggtcacctgaagaaaaagcggccagaagaatgtgactgtcacaaaatcagctaccacacccagcacaaaggccgcctcaagcacagaggctccagtctgcatcctttcaggaagggcctgcaagagaaggacaaggtgtggctgttgcgggagcagaagcgcaagaagaaactccgcaagctgctcaagcgcctgcagaacaacgacacgtgcagcatgccaggcctcacgtgcttcacccacgacaaccagcactggcagacggcgcctttctggacactggggcctttctgtgcctgcaccagcgccaacaataacacgtactggtgcatgaggaccatcaatgagactcacaatttcctcttctgtgaatttgcaactggcttcctagagtactttgatctcaacacagacccctaccagctgatgaatgcagtgaacacactggacagggatgtcctcaaccagctacacgtacagctcatggagctgaggagctgcaagggttacaagcagtgtaacccccggactcgaaacatggacctggatggaggaagctatgagcaatacaggcagtttcagcgtcgaaagtggccagaaatgaagagaccttcttccaaatcactgggacaactgtgggaaggctgggaaggttaagaaacaacagaggtggacctccaaaaacatagaggcatcacctgactgcacaggcaatgaaaaaccatgtgggtgatttccagcagacctgtggtattggccaggaggcctgagaaagcaagcacgcactctcagtcaacatgacagattctggaggataaccagcaggagcagagataacttcaggaagtccatttttgcccctgcttttgctttggattatacctcaccagctgcacaaaatgcattttttcgtatcaaaaagtcaccactaaccctcccccagaagctcacaaaggaaaacggagagagcgagcgagagagatttccttggaaatttctcccaagggcgaaagtcattggaatttttaaatcataggggaaaagcagtcctgttctaaatcctcttattcttttggtttgtcacaaagaaggaactaagaagcaggacagaggcaacgtggagaggctgaaaacagtgcagagacgtttgacaatgagtcagtagcacaaaagagatgacatttacctagcactataaaccctggttgcctctgaagaaactgccttcattgtatatatgtgactatttacatgtaatcaacatgggaacttttaggggaacctaataagaaatcccaattttcaggagtggtggtgtcaataaacgctctgtggccagtgtaaaagaaaa

SEQ ID NO: 30280 - DNA, 4238 bp, Homo sapiens
  source 1..4238: mol_type = unassigned DNA
gggccatttctggacaacagctgctattttcacttgagccgaagttaatttctcggggagttctcgggcgcgcacaggcagctcggtttgccctgcgattgagctgcgggtcgcggccggcgccggcctctccaatggcaaatgtgtgtggctggaggcgagcgcgaggctttcggcaaaggcagtcgagtgtttgcagaccggggcgagtcctgtgaaagcagataaaagaaaacatttattaacgtgtcattacgaggggagcgcccggccggggctgtcgcactccccgcggaacatttggctccctccagctccgagagaggagaagaagaaagcggaaaagaggcagattcacgtcgtttccagccaagtggacctgatcgatggccctcctgaatttatcacgatatttgatttattagcgatgccccctggtttgtgtgttacgcacacacacgtgcacacaaggctctggctcgcttccctccctcgtttccagctcctgggcgaatcccacatctgtttcaactctccgccgagggcgagcaggagcgagagtgtgtcgaatctgcgagtgaagagggacgagggaaaagaaacaaagccacagacgcaacttgagactcccgcatcccaaaagaagcaccagatcagcaaaaaaagaagatgggccccccgagcctcgtgctgtgcttgctgtccgcaactgtgttctccctgctgggtggaagctcggccttcctgtcgcaccaccgcctgaaaggcaggtttcagagggaccgcaggaacatccgccccaacatcatcctggtgctgacggacgaccaggatgtggagctgggttccatgcaggtgatgaacaagacccggcgcatcatggagcagggcggggcgcacttcatcaacgccttcgtgaccacacccatgtgctgcccctcacgctcctccatcctcactggcaagtacgtccacaaccacaacacctacaccaacaatgagaactgctcctcgccctcctggcaggcacagcacgagagccgcacctttgccgtgtacctcaatagcactggctaccggacagctttcttcgggaagtatcttaatgaatacaacggctcctacgtgccacccggctggaaggagtgggtcggactccttaaaaactcccgcttttataactacacgctgtgtcggaacggggtgaaagagaagcacggctccgactactccaaggattacctcacagacctcatcaccaatgacagcgtgagcttcttccgcacgtccaagaagatgtacccgcacaggccagtcctcatggtcatcagccatgcagccccccacggccctgaggattcagccccacaatattcacgcctcttcccaaacgcatctcagcacatcacgccgagctacaactacgcgcccaacccggacaaacactggatcatgcgctacacggggcccatgaagcccatccacatggaattcaccaacatgctccagcggaagcgcttgcagaccctcatgtcggtggacgactccatggagacgatttacaacatgctggttgagacgggcgagctggacaacacgtacatcgtatacaccgccgaccacggttaccacatcggccagtttggcctggtgaaagggaaatccatgccatatgagtttgacatcagggtcccgttctacgtgaggggccccaacgtggaagccggctgtctgaatccccacatcgtcctcaacattgacctggcccccaccatcctggacattgcaggcctggacatacctgcggatatggacgggaaatccatcctcaagctgctggacacggagcggccggtgaatcggtttcacttgaaaaagaagatgagggtctggcgggactccttcttggtggagagaggcaagctgctacacaagagagacaatgacaaggtggacgcccaggaggagaactttctgcccaagtaccagcgtgtgaaggacctgtgtcagcgtgctgagtaccagacggcgtgtgagcagctgggacagaagtggcagtgtgtggaggacgccacggggaagctgaagctgcataagtgcaagggccccatgcggctgggcggcagcagagccctctccaacctcgtgcccaagtactacgggcagggcagcgaggcctgcacctgtgacagcggggactacaagctcagcctggccggacgccggaaaaaactcttcaagaagaagtacaaggccagctatgtccgcagtcgctccatccgctcagtggccatcgaggtggacggcagggtgtaccacgtaggcctgggtgatgccgcccagccccgaaacctcaccaagcggcactggccaggggcccctgaggaccaagatgacaaggatggtggggacttcagtggcactggaggccttcccgactactcagccgccaaccccattaaagtgacacatcggtgctacatcctagagaacgacacagtccagtgtgacctggacctgtacaagtccctgcaggcctggaaagaccacaagctgcacatcgaccacgagattgaaaccctgcagaacaaaattaagaacctgagggaagtccgaggtcacctgaagaaaaagcggccagaagaatgtgactgtcacaaaatcagctaccacacccagcacaaaggccgcctcaagcacagaggctccagtctgcatcctttcaggaagggcctgcaagagaaggacaaggtgtggctgttgcgggagcagaagcgcaagaagaaactccgcaagctgctcaagcgcctgcagaacaacgacacgtgcagcatgccaggcctcacgtgcttcacccacgacaaccagcactggcagacggcgcctttctggacactggggcctttctgtgcctgcaccagcgccaacaataacacgtactggtgcatgaggaccatcaatgagactcacaatttcctcttctgtgaatttgcaactggcttcctagagtactttgatctcaacacagacccctaccagctgatgaatgcagtgaacacactggacagggatgtcctcaaccagctacacgtacagctcatggagctgaggagctgcaagggttacaagcagtgtaacccccggactcgaaacatggacctgggacttaaagatggaggaagctatgagcaatacaggcagtttcagcgtcgaaagtggccagaaatgaagagaccttcttccaaatcactgggacaactgtgggaaggctgggaaggttaagaaacaacagaggtggacctccaaaaacatagaggcatcacctgactgcacaggcaatgaaaaaccatgtgggtgatttccagcagacctgtggtattggccaggaggcctgagaaagcaagcacgcactctcagtcaacatgacagattctggaggataaccagcaggagcagagataacttcaggaagtccatttttgcccctgcttttgctttggattatacctcaccagctgcacaaaatgcattttttcgtatcaaaaagtcaccactaaccctcccccagaagctcacaaaggaaaacggagagagcgagcgagagagatttccttggaaatttctcccaagggcgaaagtcattggaatttttaaatcataggggaaaagcagtcctgttctaaatcctcttattcttttggtttgtcacaaagaaggaactaagaagcaggacagaggcaacgtggagaggctgaaaacagtgcagagacgtttgacaatgagtcagtagcacaaaagagatgacatttacctagcactataaaccctggttgcctctgaagaaactgccttcattgtatatatgtgactatttacatgtaatcaacatgggaacttttaggggaacctaataagaaatcccaattttcaggagtggtggtgtcaataaacgctctgtggccagtgtaaaagaaaatccctcgcagttgtggacatttctgttcctgtccagataccatttctcctagtatttctttgttatgtcccagaactgatgttttttttttaaggtactgaaaagaaatgaagttgatgtatgtcccaagttttgatgaaactgtatttgtaaaaaaaattttgtagtttaagtattgtcatacagtgttcaaaaccccagccaatgaccagcagttggtatgaagaacctttgacattttgtaaaaggccatttcttggga

SEQ ID NO: 30281 - DNA, 2159 bp, Homo sapiens
  source 1..2159: mol_type = unassigned DNA
acgtgaccaaccgggtcacatggcccgcgggacaacatggctgcgcccgcactagggctggtgtgtggacgttgccctgagctgggtctcgtcctcttgctgctgctgctctcgctgctgtgtggagcggcagggagccaggaggccgggaccggtgcgggcgcggggtcccttgcgggttcttgcggctgcggcacgccccagcggcctggcgcccatggcagttcggcagccgctcaccgatactcgcgggaggctaacgctccgggccccgtacccggagagcggcaactcgcgcactcaaagatggtccccatccctgctggagtatttacaatgggcacagatgatcctcagataaagcaggatggggaagcacctgcgaggagagttactattgatgccttttacatggatgcctatgaagtcagtaatactgaatttgagaagtttgtgaactcaactggctatttgacagaggctgagaagtttggcgactcctttgtctttgaaggcatgttgagtgagcaagtgaagaccaatattcaacaggcagttgcagctgctccctggtggttacctgtgaaaggcgctaactggagacacccagaagggcctgactctactattctgcacaggccggatcatccagttctccatgtgtcctggaatgatgcggttgcctactgcacttgggcagggaagcggctgcccacggaagctgagtgggaatacagctgtcgaggaggcctgcataatagacttttcccctggggcaacaaactgcagcccaaaggccagcattatgccaacatttggcagggcgagtttccggtgaccaacactggtgaggatggcttccaaggaactgcgcctgttgatgccttccctcccaatggttatggcttatacaacatagtggggaacgcatgggaatggacttcagactggtggactgttcatcattctgttgaagaaacgcttaacccaaaaggtcccccttctgggaaagaccgagtgaagaaaggtggatcctacatgtgccataggtcttattgttacaggtatcgctgtgctgctcggagccagaacacacctgatagctctgcttcgaatctgggattccgctgtgcagccgaccgcctgcccactatggactgacaaccaaggaaagtcttccccagtccaaggagcagtcgtgtctgacctacattgggcttttctcagaactttgaacgatcccatgcaaagaattcccaccctgaggtgggttacatacctgcccaatggccaaaggaaccgccttgtgagaccaaattgctgacctgggtcagtgcatgtgctttatggtgtggtgcatctttggagatcatcaccatattttacttttgagagtctttaaagaggaaggggagtggagggaaccctgagctaggcttcaggaggcccgcgtcctacgcaggctctgccacaggggttagaccccaggtccgacgcttgaccttcctgggcctcaagtgccctcccctatcaaatgaagggatggacagcatgacctctgggtgtctctccaactcaccagttctaaaaagggtatcagattctattgtgacttcatagtgagaatttattatagattattttttagctattttttccatgtgtgaaccttgagtgatactaatcatgtaaagtaagagttctcttatgtattattttcggaagaggggtgtggtgactcctttatattcgtactgcactttgtttttccaaggaaatcagtgtcttttacgttgttatgatgaatcccacatggggccggtgatggtatgctgaagttcagccgttgaacacataggaatgtctgtggggtgactctactgtgctttatcttttaacattaagtgcctttggttcagaggggcagtcataagctctgtttccccctctccccaaagccttcagcgaacgtgaaatgtgcgctaaacggggaaacctgtttaattctagatatagggaaaaaggaacgaggaccttgaatgagctatattcagggtatccggtattttgtaatagggaataggaaaccttgttggctgtggaatatccgatgctttgaatcatgcactgtgttgaataaacgtatctgctaaatcagg

SEQ ID NO: 30282 - DNA, 1281 bp, Homo sapiens
  source 1..1281: mol_type = unassigned DNA
atggctgcgcccgcactagggctggtgtgtggacgttgccctgagctgggtctcgtcctcttgctgctgctgctctcgctgctgtgtggagcggcagggagccaggaggccgggaccggtgcgggcgcggggtcccttgcgggttcttgcggctgcggcacgccccagcggcctggcgcccatggcagttcggcagccgctcaccgatactcgcgggaggctaacgctccgggccccgtacccggagagcggcaactcgcgcactcaaagatggtccccatccctgctggagtatttacaatgggcacagatgatcctcagataaagcaggatggggaagcacctgcgaggagagttactattgatgccttttacatggatgcctatgaagtcagtaatactgaatttgagaagtttgtgaactcaactggctatttgacagaggctgagaagtttggcgactcctttgtctttgaaggcatgttgagtgagcaagtgaagaccaatattcaacaggcagttgcagctgctccctggtggttacctgtgaaaggcgctaactggagacacccagaagggcctgactctactattctgcacaggccggatcatccagttctccatgtgtcctggaatgatgcggttgcctactgcacttgggcagggaagcggctgcccacggaagctgagtgggaatacagctgtcgaggaggcctgcataatagacttttcccctggggcaacaaactgcagcccaaaggccagcattatgccaacatttggcagggcgagtttccggtgaccaacactggtgaggatggcttccaaggaactgcgcctgttgatgccttccctcccaatggttatggcttatacaacatagtggggaacgcatgggaatggacttcagactggtggactgttcatcattctgttgaagaaacgcttaacccaaaaggtcccccttctgggaaagaccgagtgaagaaaggtggatcctacatgtgccataggtcccaagagtactatgatccctattttcaagatgtggcatctgagatgttgagaagacacacagccagcaggtggaaggccttctcatctctagaaccatgctgctcaatacgtaggcatcagcaatatgcagctattgaacgtttgacatgtggcaagtttgaattgagatgtgctagtttaagaaaaatagattgcctcaacaccaacattgcctgtagctactccatgaggcaagatggacccagactccactgtgtggactga

SEQ ID NO: 30283 - DNA, 3157 bp, Homo sapiens
  source 1..3157: mol_type = unassigned DNA
atggcccgcgggacaacatggctgcgcccgcactagggctggtgtgtggacgttgccctgagctgggtctcgtcctcttgctgctgctgctctcgctgctgtgtggagcggcagggagccaggaggccgggaccggtgcgggcgcggggtcccttgcgggttcttgcggctgcggcacgccccagcggcctggcgcccatggcagttcggcagccgctcaccgatactcgcgggaggctaacgctccgggccccgtacccggagagcggcaactcgcgcactcaaagatggtccccatccctgctggagtatttacaatgggcacagatgatcctcagataaagcaggatggggaagcacctgcgaggagagttactattgatgccttttacatggatgcctatgaagtcagtaatactgaatttgagaagtttgtgaactcaactggctatttgacagaggctgagaagtttggcgactcctttgtctttgaaggcatgttgagtgagcaagtgaagaccaatattcaacaggcagttgcagctgctccctggtggttacctgtgaaaggcgctaactggagacacccagaagggcctgactctactattctgcacaggccggatcatccagttctccatgtgtcctggaatgatgcggttgcctactgcacttgggcagggaagcggctgcccacggaagctgagtgggaatacagctgtcgaggaggcctgcataatagacttttcccctggggcaacaaactgcagcccaaaggccagcattatgccaacatttggcagggcgagtttccggtgaccaacactggtgaggatggcttccaaggaactgcgcctgttgatgccttccctcccaatggttatggcttatacaacatagtggggaacgcatgggaatggacttcagactggtggactgttcatcattctgttgaagaaacgcttaacccaaaaggtcccccttctgggaaagaccgagtgaagaaaggtggattatcaaaggctcaccagaggatttcacaggagtactatgatccctattttcaagatgtggcatctgagatgttgagaagacacacagccagcaggtggaaggccttctcatctctagaaccatgctgctcaatacgtaggcatcagcaatatgcagctattgaacgtttgacatgtggcaagtttgaattgagatgtgctagtttaagaaaaatagattgcctcaacaccaacattgcctgtagctactccatgaggcaagatggacccagactccactgtgtggactgacctcccagaaggatcctcctgtccctgaaggccactctgccttcagctacaggccccagtgctgattgtgatacttaacaagggctttcagatgtctgaaacaagagtatagcataaagttaagaatgcggcttctggagagacagacttggtttcaaattcagctctgtgaccttgggtgcacagcaaagtcttcttctccccccgatgaaagaatgggaaggactcaggaaggctcaacttgcaaactccccagtatcaagtggctgccttcaaaatccaacccttctcttcccagctcatttccagtatgtattttcaaaggccatgtcatttttgaagtgcctgagaagaaaacagaactgccagcagactatgggacaaacgactaaatgccctccagacgttccagagtcctctgcctctcaggcttcagttcttcctgaaggaatctggagctggaaagcaggaagcaatttgctgtggaattttttccatcacagactccaagttcctcagcctttggactcttgaacttacaccagtgttttggcaggagcgctcgggcctttggccacagactgaaggctgcattgtcagcttccctacttttgaggttttgggactcagactgatccaccactggcttccttgctcttcaacttgaagacggcctatcgtgagactttacctcgtgattatgtgagtcaattctcctaataaactccccttcgtatgtacatataccctattacttctgtccctttagagaaccctgactaatacagtagagattgcctggacttattaataataatgactctgtttagttaatgtaacagacagataaagacaaatgagtgacacccatgcaattaaaataattttggtggggagtgagaggagttggttctccactcacagtggaaagttttagcgtatactgctgcacatgacatgggagtattttgcacttccactggaaaaaagtaaggggaataaaaacccctggattctacttgctgacttgagagtgactaaagcgatttatctgaaggttccccagggtggattcatagtggactcaggccagattctctgctgatgctttgaacttatgtccagagcatcatctccaccacaaaagagcttgcctgctctgtgtcctggccaaagagatgcacgtgctctctcactgggttgtggctcttgagtaactcctggaattacccagctggaatttctattcctttggaccacaaatttcatatcttcacctgctgcctatatcatgctaaaagatggaaatgtctcaactaaaccatgtaggtggactagcctcattaacaagataagcaatgggccattttctcactggttattaactatgtacattatctatgaaataacatatctggtcatggttactactctattctgtagggtggaatagaaaaaggtagaggatatatatttcagttgcatttttaaaattgtttattttgttttttaattgacaaataatattaggttggtgcaaaagtaattgcagtttttgccattaaaggtagacaaggctgggcacggtggctcagcacgcttgtaatcccagcactttgggaggcagaggcgggcagatcacaaggtcaggagaccgagaccatcctggctaacacggtgaaaccccatctctactaaaaatacaaaaaattagccgggtgtggtggtgggcacctgtagtcccagctactcgggaggctgaggcaggagaatggcgtgaacctgggaggtggagcttgtagtgagctgcaccactgcactccagcctgggcaacagagcaagaccccatatc

SEQ ID NO: 30284 - DNA, 1447 bp, Homo sapiens
  source 1..1447: mol_type = unassigned DNA
acatggcccgcgggacaacatggctgcgcccgcactagggctggtgtgtggacgttgccctgagctgggtctcgtcctcttgctgctgctgctctcgctgctgtgtggagcggcagggagccaggaggccgggaccggtgcgggcgcggggtcccttgcgggttcttgcggctgcggcacgccccagcggcctggcgcccatggcagttcggcagccgctcaccgatactcgcgggaggctaacgctccgggccccgtacccggagagcggcaactcgcgcactcaaagatggtccccatccctgctggagtatttacaatgggcacagatgatcctcagataaagcaggatggggaagcacctgcgaggagagttactattgatgccttttacatggatgcctatgaagtcagtaatactgaatttgagaagtttgtgaactcaactggctatttgacagaggttgcagctgctccctggtggttacctgtgaaaggcgctaactggagacacccagaagggcctgactctactattctgcacaggccggatcatccagttctccatgtgtcctggaatgatgcggttgcctactgcacttgggcagggaagcggctgcccacggaagctgagtgggaatacagctgtcgaggaggcctgcataatagacttttcccctggggcaacaaactgcagcccaaaggccagcattatgccaacatttggcagggcgagtttccggtgaccaacactggtgaggatggcttccaaggaactgcgcctgttgatgccttccctcccaatggttatggcttatacaacatagtggggaacgcatgggaatggacttcagactggtggactgttcatcattctgttgaagaaacgcttaacccaaaaggtcccccttctgggaaagaccgagtgaagaaaggtggatcctacatgtgccataggtcttattgttacaggtatcgctgtgctgctcggagccagaacacacctgatagctctgcttcgaatctgggattccgctgtgcagccgaccgcctgcccactatggactgacaaccaaggaaagtcttccccagtccaaggagcagtcgtgtctgacctacattgggcttttctcagaactttgaacgatcccatgcaaagaattcccaccctgaggtgggttacatacctgcccaatggccaaaggaaccgccttgtgagaccaaattgctgacctgggtcagtgcatgtgctttatggtgtggtgcatctttggagatcatcaccatattttacttttgagagtctttaaagaggaaggggagtggagggaaccctgagctaggcttcaggaggcccgcgtcctacgcaggctctgccacaggggttagaccccaggtccgacgcttgaccttcctgggcctcaagtgccctcccctatcaaatgaa

SEQ ID NO: 30285 - DNA, 1128 bp, Homo sapiens
  source 1..1128: mol_type = unassigned DNA
aaccgggtcacatggcccgcgggacaacatggctgcgcccgcactagggctggtgtgtggacgttgccctgagctgggtctcgtcctcttgctgctgctgctctcgctgctgtgtggagcggcagggagccaggaggccgggaccggtgcgggcgcggggtcccttgcgggttcttgcggctgcggcacgccccagcggcctggcgcccatggcagttcggcagccgctcaccgatactcgcgggaggctaacgctccgggccccgtacccggagagcggcaactcgcgcactcaaagatggtccccatccctgctggagtatttacaatgggcacagatgatcctcagataaagcaggatggggaagcacctgcgaggagagttactattgatgccttttacatggatgcctatgaagtcagtaatactgaatttgagaagtttgtgaactcaactggctatttgacagaggctgagaagtttggcgactcctttgtctttgaaggcatgttgagtgagcaagtgaagaccaatattcaacaggcagttgcagctgctccctggtggttacctgtgaaaggcgctaactggagacacccagaagggcctgactctactattctgcacaggccggatcatccagttctccatgtgtcctggaatgatgcggttgcctactgcacttgggcagggaagcggctgcccacggaagctgagtgggaatacagctgtcgaggaggcctgcataatagacttttcccctggggcaacaaactgcagcccaaaggccagcattatgccaacatttggcagggcgagtttccggtgaccaacactggtgaggatggcttccaaggaactgcgcctgttgatgccttccctcccaatggttatggcttatacaacatagtggggaacgcatgggaatggacttcagactggtggactgttcatcattctgttgaagaaacgcttaacccatcttattgttacaggtatcgctgtgctgctcggagccagaacacacctgatagctctgcttcgaatctgggattccgctgtgcagccgaccgcctgcccactatggactgacaaccaaggaaagtcttccccagtccaaggagcag

SEQ ID NO: 30286 - DNA, 2364 bp, Homo sapiens
  source 1..2364: mol_type = unassigned DNA
agtgagaggtcacttactgcagccggacataacggcgctggccccgccccttctcgagaactcgcagagctgggctggtaaaattgcagtgctgaagacactggacccgcaaaaggctgtccctcccaaacctgggattctgggctcactgagttcacctgcgagtcagccctacctgcactgctctggtctagtacaaacaggctgctggcattgaggtctgctacaatgctgctgctgcacagagctgtggtcctcaggctccaacaggcctgcagactcaagtcaatcccctcaaggatctgcattcaggcctgctccacaaatgattcatttcagccccagcgccccagcctcaccttctctggtgataactccagcacccagggatggagagtcatggggaccctattaggtctcggtgcagtgttggcctatcaggaccatcggtgtagggctgctcaggagtcaacacacatatacactaaggaggaagtgagttcccacaccagccctgagactgggatctgggtgactctgggctctgaggtctttgatgtcacagaatttgtggacctacatccaggggggccttcaaagctgatgctagcagctgggggtcccctagagcccttctgggccctctatgctgttcacaaccagtcccatgtgcgtgagttactggctcagtacaagattggggagctgaatcctgaagacaaggtagcccccaccgtggagacctctgacccttatgctgatgatcctgtacgtcacccagccctgaaggtcaacagccagcggccctttaatgcagagcctccccctgagctgctgacagaaaactacatcacacccaaccctatcttcttcacccggaaccatctgcctgtacctaacctggatccagacacctatcgcttacacgtagtaggagcacctgggggtcagtcactgtctctttccctggatgacttgcacaactttcccaggtacgagatcacagtcactctgcagtgtgccggcaaccgacgctctgagatgactcaggtcaaagaagtaaaaggtctggagtggagaacaggagccatcagcactgcacgctgggctggggcacggctctgtgatgtgttagcccaggctggccaccaactctgtgaaactgaggcccacgtctgctttgagggactggactcagaccctactgggactgcctatggagcatccatccctctggctcgggccatggaccctgaagctgaggtcctgctggcatatgagatgaatgggcagcctctgccacgtgaccacggcttccctgtgcgtgtggtggttcctggagtggtgggtgcccgccatgtcaaatggctgggcagagtgagtgtgcagccagaggaaagttacagccactggcaacggcgggattacaaaggcttctctccatctgtggactgggagactgtagattttgactctgctccatccattcaggaacttcctgtccagtcggccatcacagagccccgggatggagagactgtagaatcaggggaggtgaccatcaagggctatgcatggagtggtggtggcagggctgtgatccgggtggatgtgtctctggatgggggcctaacctggcaggtggctaagctggatggagaggaacagcgccccaggaaggcctgggcatggcgtctgtggcagttgaaagcccctgtgccagctggacaaaaggaactgaacattgtttgtaaggctgtggatgatggttacaatgtgcagccagacaccgtggccccaatctggaacctgcgaggtgttctcagcaatgcctggcatcgtgtccatgtctatgtctccccatgagcatggaaaggagccacctccacccctttccccacccattagcctcactgcttcagaaaaatctttcccacctttcaacttcttggatcacaactctggccttcctaagccatacccaagtacacatatagcacatttcacccaaggaccttccctctttggacactatgttacatacccctcttggcctttgaacctgtgccaggaagtgtgagctgttacagcaaggggctagaagtgaaaaaagtaattctggagacaagcactattttctcttcctaccccacctccatttctaatgcctactgccatcaaggccttgttttgcttttctttttggattgttcagagaaatgtgtgtggcatgtgtaagaaaagtgtatatactatcttatactacctctccaggttgccagagagttgcgaggagagcaaggggcacaaccgtctccctttatagttctacttttctaataaatagtctgtttaagatcataa

SEQ ID NO: 30287 - DNA, 2306 bp, Homo sapiens
  source 1..2306: mol_type = unassigned DNA
aatggttgagccacccgcttccagccaatggctgagggataagctgaggggagtgagaggtcacttactgcagccggacataacggcgctggccccgccccttctcgagaactcgcagagctgggctggtaaaattgcagtgctgaagacactggacccggtctgctacaatgctgctgctgcacagagctgtggtcctcaggctccaacaggcctgcagactcaagtcaatcccctcaaggatctgcattcaggcctgctccacaaatgattcatttcagccccagcgccccagcctcaccttctctggtgataactccagcacccagggatggagagtcatggggaccctattaggtctcggtgcagtgttggcctatcaggaccatcggtgtagggctgctcaggagtcaacacacatatacactaaggaggaagtgagttcccacaccagccctgagactgggatctgggtgactctgggctctgaggtctttgatgtcacagaatttgtggacctacatccaggggggccttcaaagctgatgctagcagctgggggtcccctagagcccttctgggccctctatgctgttcacaaccagtcccatgtgcgtgagttactggctcagtacaagattggggagctgaatcctgaagacaaggtagcccccaccgtggagacctctgacccttatgctgatgatcctgtacgtcacccagccctgaaggtcaacagccagcggccctttaatgcagagcctccccctgagctgctgacagaaaactacatcacacccaaccctatcttcttcacccggaaccatctgcctgtacctaacctggatccagacacctatcgcttacacgtagtaggagcacctgggggtcagtcactgtctctttccctggatgacttgcacaactttcccaggtacgagatcacagtcactctgcagtgtgccggcaaccgacgctctgagatgactcaggtcaaagaagtaaaaggtctggagtggagaacaggagccatcagcactgcacgctgggctggggcacggctctgtgatgtgttagcccaggctggccaccaactctgtgaaactgaggcccacgtctgctttgagggactggactcagaccctactgggactgcctatggagcatccatccctctggctcgggccatggaccctgaagctgaggtcctgctggcatatgagatgaatgggcagcctctgccacgtgaccacggcttccctgtgcgtgtggtggttcctggagtggtgggtgcccgccatgtcaaatggctgggcagagtgagtgtgcagccagaggaaagttacagccactggcaacggcgggattacaaaggcttctctccatctgtggactgggagactgtagattttgactctgctccatccattcaggaacttcctgtccagtcggccatcacagagccccgggatggagagactgtagaatcaggggaggtgaccatcaagggctatgcatggagtggtggtggcagggctgtgatccgggtggatgtgtctctggatgggggcctaacctggcaggtggctaagctggatggagaggaacagcgccccaggaaggcctgggcatggcgtctgtggcagttgaaagcccctgtgccagctggacaaaaggaactgaacattgtttgtaaggctgtggatgatggttacaatgtgcagccagacaccgtggccccaatctggaacctgcgaggtgttctcagcaatgcctggcatcgtgtccatgtctatgtctccccatgagcatggaaaggagccacctccacccctttccccacccattagcctcactgcttcagaaaaatctttcccacctttcaacttcttggatcacaactctggccttcctaagccatacccaagtacacatatagcacatttcacccaaggaccttccctctttggacactatgttacatacccctcttggcctttgaacctgtgccaggaagtgtgagctgttacagcaaggggctagaagtgaaaaaagtaattctggagacaagcactattttctcttcctaccccacctccatttctaatgcctactgccatcaaggccttgttttgcttttctttttggattgttcagagaaatgtgtgtggcatgtgtaagaaaagtgtatatactatcttatactacctctccaggttgccagagagttgcgaggagagcaaggggcacaaccgtctccctttatagttctacttttctaataaatagtctgtttaagatcataa

SEQ ID NO: 30288 - DNA, 2860 bp, Homo sapiens
  source 1..2860: mol_type = unassigned DNA
gtaatatagggtttggtgcaatctgtggtttcaaacatctactgggggtcgtagaacatatccccagtggataagggggtactactgtacttgttggctcttcatgttagctctgctaggcagatgtcatttcagagatgaggaagcaagttcagaacggcttggaatcttgctcaggaaatcgggctggttaatgaataacaagagatccagtttcacaaacccaaggcattttgcccccagaatctgggcttcttcacccatttaggctgtcactacttttttttcacttttttatccctgtttaagtcagtctgacccacagttgtcctctgctgacttcagaaataataatctggccagtagacatttggtttcggtcctttaggcccttcgccccaggcatcgttctctatggtggacaaagttcagaatggaagatgggagaaaggtgattctgattctagaagcacccatccctcctaccccattccccacccgcattacctgccatcctgtcagcacagtctgtctctgaagtgctccaagttttctctaagggcccatttggactcccactctcaagactcctcacttgcccagaaagctccttgctgaccttctctgtgtcttcctctcacccattcccttaggcctccctaatatcccctcccagggtctccctatcttgatcccagaatcttccttctacaggtctgctacaatgctgctgctgcacagagctgtggtcctcaggctccaacaggcctgcagactcaagtcaatcccctcaaggatctgcattcaggcctgctccacaaatgattcatttcagccccagcgccccagcctcaccttctctggtgataactccagcacccagggatggagagtcatggggaccctattaggtctcggtgcagtgttggcctatcaggaccatcggtgtagggctgctcaggagtcaacacacatatacactaaggaggaagtgagttcccacaccagccctgagactgggatctgggtgactctgggctctgaggtctttgatgtcacagaatttgtggacctacatccaggggggccttcaaagctgatgctagcagctgggggtcccctagagcccttctgggccctctatgctgttcacaaccagtcccatgtgcgtgagttactggctcagtacaagattggggagctgaatcctgaagacaaggtagcccccaccgtggagacctctgacccttatgctgatgatcctgtacgtcacccagccctgaaggtcaacagccagcggccctttaatgcagagcctccccctgagctgctgacagaaaactacatcacacccaaccctatcttcttcacccggaaccatctgcctgtacctaacctggatccagacacctatcgcttacacgtagtaggagcacctgggggtcagtcactgtctctttccctggatgacttgcacaactttcccaggtacgagatcacagtcactctgcagtgtgccggcaaccgacgctctgagatgactcaggtcaaagaagtaaaaggtctggagtggagaacaggagccatcagcactgcacgctgggctggggcacggctctgtgatgtgttagcccaggctggccaccaactctgtgaaactgaggcccacgtctgctttgagggactggactcagaccctactgggactgcctatggagcatccatccctctggctcgggccatggaccctgaagctgaggtcctgctggcatatgagatgaatgggcagcctctgccacgtgaccacggcttccctgtgcgtgtggtggttcctggagtggtgggtgcccgccatgtcaaatggctgggcagagtgagtgtgcagccagaggaaagttacagccactggcaacggcgggattacaaaggcttctctccatctgtggactgggagactgtagattttgactctgctccatccattcaggaacttcctgtccagtcggccatcacagagccccgggatggagagactgtagaatcaggggaggtgaccatcaagggctatgcatggagtggtggtggcagggctgtgatccgggtggatgtgtctctggatgggggcctaacctggcaggtggctaagctggatggagaggaacagcgccccaggaaggcctgggcatggcgtctgtggcagttgaaagcccctgtgccagctggacaaaaggaactgaacattgtttgtaaggctgtggatgatggttacaatgtgcagccagacaccgtggccccaatctggaacctgcgaggtgttctcagcaatgcctggcatcgtgtccatgtctatgtctccccatgagcatggaaaggagccacctccacccctttccccacccattagcctcactgcttcagaaaaatctttcccacctttcaacttcttggatcacaactctggccttcctaagccatacccaagtacacatatagcacatttcacccaaggaccttccctctttggacactatgttacatacccctcttggcctttgaacctgtgccaggaagtgtgagctgttacagcaaggggctagaagtgaaaaaagtaattctggagacaagcactattttctcttcctaccccacctccatttctaatgcctactgccatcaaggccttgttttgcttttctttttggattgttcagagaaatgtgtgtggcatgtgtaagaaaagtgtatatactatcttatactacctctccaggttgccagagagttgcgaggagagcaaggggcacaaccgtctccctttatagttctacttttctaataaatagtctgtttaagatcataa

SEQ ID NO: 30289 - DNA, 2394 bp, Homo sapiens
  source 1..2394: mol_type = unassigned DNA
gaactcgcagagctgggctggtaaaattgcagtgctgaagacactggacccgcaaaaggctgtccctcccaaacctgggattctgggctcactgagttcacctgcgagtcagccctacctgcactgctctggtctagtacaaacaggctgctggcattgagggacggagtctccaactcctggcctctagcagtcctcctgtgtaggtctcccaaagtgctagtgtgtccggaattggtgggttcttggtctcactgacttcaagaatgaagccgcggaccctcgcagtctgctacaatgctgctgctgcacagagctgtggtcctcaggctccaacaggcctgcagactcaagtcaatcccctcaaggatctgcattcaggcctgctccacaaatgattcatttcagccccagcgccccagcctcaccttctctggtgataactccagcacccagggatggagagtcatggggaccctattaggtctcggtgcagtgttggcctatcaggaccatcggtgtagggctgctcaggagtcaacacacatatacactaaggaggaagtgagttcccacaccagccctgagactgggatctgggtgactctgggctctgaggtctttgatgtcacagaatttgtggacctacatccaggggggccttcaaagctgatgctagcagctgggggtcccctagagcccttctgggccctctatgctgttcacaaccagtcccatgtgcgtgagttactggctcagtacaagattggggagctgaatcctgaagacaaggtagcccccaccgtggagacctctgacccttatgctgatgatcctgtacgtcacccagccctgaaggtcaacagccagcggccctttaatgcagagcctccccctgagctgctgacagaaaactacatcacacccaaccctatcttcttcacccggaaccatctgcctgtacctaacctggatccagacacctatcgcttacacgtagtaggagcacctgggggtcagtcactgtctctttccctggatgacttgcacaactttcccaggtacgagatcacagtcactctgcagtgtgccggcaaccgacgctctgagatgactcaggtcaaagaagtaaaaggtctggagtggagaacaggagccatcagcactgcacgctgggctggggcacggctctgtgatgtgttagcccaggctggccaccaactctgtgaaactgaggcccacgtctgctttgagggactggactcagaccctactgggactgcctatggagcatccatccctctggctcgggccatggaccctgaagctgaggtcctgctggcatatgagatgaatgggcagcctctgccacgtgaccacggcttccctgtgcgtgtggtggttcctggagtggtgggtgcccgccatgtcaaatggctgggcagagtgagtgtgcagccagaggaaagttacagccactggcaacggcgggattacaaaggcttctctccatctgtggactgggagactgtagattttgactctgctccatccattcaggaacttcctgtccagtcggccatcacagagccccgggatggagagactgtagaatcaggggaggtgaccatcaagggctatgcatggagtggtggtggcagggctgtgatccgggtggatgtgtctctggatgggggcctaacctggcaggtggctaagctggatggagaggaacagcgccccaggaaggcctgggcatggcgtctgtggcagttgaaagcccctgtgccagctggacaaaaggaactgaacattgtttgtaaggctgtggatgatggttacaatgtgcagccagacaccgtggccccaatctggaacctgcgaggtgttctcagcaatgcctggcatcgtgtccatgtctatgtctccccatgagcatggaaaggagccacctccacccctttccccacccattagcctcactgcttcagaaaaatctttcccacctttcaacttcttggatcacaactctggccttcctaagccatacccaagtacacatatagcacatttcacccaaggaccttccctctttggacactatgttacatacccctcttggcctttgaacctgtgccaggaagtgtgagctgttacagcaaggggctagaagtgaaaaaagtaattctggagacaagcactattttctcttcctaccccacctccatttctaatgcctactgccatcaaggccttgttttgcttttctttttggattgttcagagaaatgtgtgtggcatgtgtaagaaaagtgtatatactatcttatactacctctccaggttgccagagagttgcgaggagagcaaggggcacaaccgtctccctttata

SEQ ID NO: 30290 - DNA, 952 bp, Homo sapiens
  source 1..952: mol_type = unassigned DNA
actggacccggtaaggagactgggggtggtaaagaagctggggaggaagggctgctgagctgggcagcggagggggccttggtgtccagctgtgctccgaacctcaagggcaacaaaactatcagtacctgcctccactccttctgtctgggtgctcttgagatcgcggggtgttgccgcaagacccttttgtgcctggatgccggacgtatgttcctacctaacgtgcccatggggagtgaggggtcatcacctgcaccaacgggtggcatttctgtattacagcaaaaggctgtccctcccaaacctgggattctgggctcactgagttcacctgcgagtcagccctacctgcactgctctggtctagtacaaacaggctgctggcattgaggcccttcgccccaggcatcgttctctatggtggacaaagttcagaatggaagatgggagaaaggtctgctacaatgctgctgctgcacagagctgtggtcctcaggctccaacaggcctgcagactcaagtcaatcccctcaaggatctgcattcaggcctgctccacaaatgattcatttcagccccagcgccccagcctcaccttctctggtgataactccagcacccagggatggagagtcatggggaccctattaggtctcggtgcagtgttggcctatcaggaccatcggtgtagggctgctcaggagtcaacacacatatacactaaggaggaagtgagttcccacaccagccctgagactgggatctgggtgactctgggctctgaggtctttgatgtcacagaatttgtggacctacatccaggggggccttcaaagctgatgctagcagctgggggtcccctagagcccttctgggccctctatgctgttcacaaccagtcccatgtgcgtgagttactggctcagtacaagattggggagctgaatcc

SEQ ID NO: 30291 - DNA, 556 bp, Homo sapiens
  source 1..556: mol_type = unassigned DNA
aactcgcagagctgggctggtaaaattgcagtgctgaagacactggacccgcaaaaggctgtccctcccaaacctgggattctgggctcactgagttcacctgcgagtcagccctacctgcactgctctggtctagtacaaacaggctgctggcattgagggacggagtctccaactcctggcctctagcagtcctcctgtgtaggtctcccaaagtgctagtgtgtccggaattggtgggttcttggtctcactgacttcaagaatgaagccgcggaccctcgcagtgagtgttacagttcttaaaggcagcgtgtccggagtttgttccttctgatgttcagatgtgtttggagtttcttccttctggtgggttcgtgctcttgctggctcaggagtgaagctgcagaccttcacagtctgctacaatgctgctgctgcacagagctgtggtcctcaggctccaacaggcctgcagactcaagtcaatcccctcaaggatctgcattcaggcctgctccacaaatgattcatttcagccccagcgccccagcct

SEQ ID NO: 30292 - DNA, 2352 bp, Homo sapiens
  source 1..2352: mol_type = unassigned DNA
agctgggctggtaaaattgcagtgctgaagacactggacccgagacaggttttccccattttggccaggctggtctcaaactcctgacctcaggtgatttgcccgcctcagcctcccaaagtgctgggattacagacgtgagccactgcgccgggcattgttgttaatctcttactgtgggtaatttagtaattaaactataagaggtctgctacaatgctgctgctgcacagagctgtggtcctcaggctccaacaggcctgcagactcaagtcaatcccctcaaggatctgcattcaggcctgctccacaaatgattcatttcagccccagcgccccagcctcaccttctctggtgataactccagcacccagggatggagagtcatggggaccctattaggtctcggtgcagtgttggcctatcaggaccatcggtgtagggctgctcaggagtcaacacacatatacactaaggaggaagtgagttcccacaccagccctgagactgggatctgggtgactctgggctctgaggtctttgatgtcacagaatttgtggacctacatccaggggggccttcaaagctgatgctagcagctgggggtcccctagagcccttctgggccctctatgctgttcacaaccagtcccatgtgcgtgagttactggctcagtacaagattggggagctgaatcctgaagacaaggtagcccccaccgtggagacctctgacccttatgctgatgatcctgtacgtcacccagccctgaaggtcaacagccagcggccctttaatgcagagcctccccctgagctgctgacagaaaactacatcacacccaaccctatcttcttcacccggaaccatctgcctgtacctaacctggatccagacacctatcgcttacacgtagtaggagcacctgggggtcagtcactgtctctttccctggatgacttgcacaactttcccaggtacgagatcacagtcactctgcagtgtgccggcaaccgacgctctgagatgactcaggtcaaagaagtaaaaggtctggagtggagaacaggagccatcagcactgcacgctgggctggggcacggctctgtgatgtgttagcccaggctggccaccaactctgtgaaactgaggcccacgtctgctttgagggactggactcagaccctactgggactgcctatggagcatccatccctctggctcgggccatggaccctgaagctgaggtcctgctggcatatgagatgaatgggcagcctctgccacgtgaccacggcttccctgtgcgtgtggtggttcctggagtggtgggtgcccgccatgtcaaatggctgggcagagtgagtgtgcagccagaggaaagttacagccactggcaacggcgggattacaaaggcttctctccatctgtggactgggagactgtagattttgactctgctccatccattcaggaacttcctgtccagtcggccatcacagagccccgggatggagagactgtagaatcaggggaggtgaccatcaagggctatgcatggagtggtggtggcagggctgtgatccgggtggatgtgtctctggatgggggcctaacctggcaggtggctaagctggatggagaggaacagcgccccaggaaggcctgggcatggcgtctgtggcagttgaaagcccctgtgccagctggacaaaaggaactgaacattgtttgtaaggctgtggatgatggttacaatgtgcagccagacaccgtggccccaatctggaacctgcgaggtgttctcagcaatgcctggcatcgtgtccatgtctatgtctccccatgagcatggaaaggagccacctccacccctttccccacccattagcctcactgcttcagaaaaatctttcccacctttcaacttcttggatcacaactctggccttcctaagccatacccaagtacacatatagcacatttcacccaaggaccttccctctttggacactatgttacatacccctcttggcctttgaacctgtgccaggaagtgtgagctgttacagcaaggggctagaagtgaaaaaagtaattctggagacaagcactattttctcttcctaccccacctccatttctaatgcctactgccatcaaggccttgttttgcttttctttttggattgttcagagaaatgtgtgtggcatgtgtaagaaaagtgtatatactatcttatactacctctccaggttgccagagagttgcgaggagagcaaggggcacaaccgtctccctttatagttctacttttctaataaatagtctgtttaagatcataa

SEQ ID NO: 30293 - DNA, 2511 bp, Homo sapiens
  source 1..2511: mol_type = unassigned DNA
ctgctacaatgctgctgctgcacagagctgtggtcctcaggctccaacaggcctgcagactcaagtcaatcccctcaaggatctgcattcaggcctgctccacaaatgattcatttcagccccagcgccccagcctcaccttctctggtgataactccagcacccagggatggagagtcatggggaccctattaggtctcggtgcagtgttggcctatcaggaccatcggtgtagggctgctcaggagtcaacacacatatacactaaggaggaagtgagttcccacaccagccctgagactgggatctgggtgactctgggctctgaggtctttgatgtcacagaatttgtggacctacatccaggggggccttcaaagctgatgctagcagctgggggtcccctagagcccttctgggccctctatgctgttcacaaccagtcccatgtgcgtgagttactggctcagtacaagattggggagctgaatcctgaagacaaggtagcccccaccgtggagacctctgacccttatgctgatgatcctgtacgtcacccagccctgaaggtcaacagccagcggccctttaatgcagagcctccccctgagctgctgacagaaaactacatcacacccaaccctatcttcttcacccggaaccatctgcctgtacctaacctggatccagacacctatcgcttacacgtagtaggagcacctgggggtcagtcactgtctctttccctggatgacttgcacaactttcccaggtacgagatcacagtcactctgcagtgtgccggcaaccgacgctctgagatgactcaggtcaaagaagtaaaaggtctggagtggagaacaggagccatcagcactgcacgctgggctggggcacggctctgtgatgtgttagcccaggctggccaccaactctgtgaaactgaggcccacgtctgctttgagggactggactcagaccctactgggactgcctatggagcatccatccctctggctcgggccatggaccctgaagctgaggtcctgctggcatatgagatgaatgggcagcctctgccacgtgaccacggcttccctgtgcgtgtggtggttcctggagtggtgggtgcccgccatgtcaaatggctgggcagagtgagtgtgcagccagaggaaagttacagccactggcaacggcgggattacaaaggcttctctccatctgtggactgggagactgtagattttgactctgctccatccattcaggaacttcctgtccagtcggccatcacagagccccgggatggagagactgtagaatcaggggaggtgaccatcaagggctatgcatggagtggtggtggcagggctgtgatccgggtggatgtgtctctggatgggggcctaacctggcaggtggctaagctggatggagaggaacagcgccccaggaaggcctgggcatggcgtctgtggcagttgaaagcccctgtgccagctggacaaaaggaactgaacattgtttgtaaggctgtggatgatggttacaatgtgcagccagacaccgtggccccaatctggaacctgcgaggtgttctcagcaatgcctggcatcgtgtccatgtctatgtctccccatgagcatggaaaggagccacctccacccctttccccacccattagcctcactgcttcagaaaaatctttcccacctttcaacttcttggatcacaactctggccttcctaagccatacccaagtacacatatagcacatttcacccaaggaccttccctctttggacactatgttacatacccctcttggcctttgaacctgtgccaggaagtgtgagctgagagcaaggggcacaaccgtctccctttatagttctacttttctaataaatagtctgtttaagatcataactcttgggcctggggagtgagcctattgcaggaggaaggatgcatttgtactgggatgtataatgagattagaccaaaacaaacaaaactggggaggaagacagagaggaagtaggcttgtaggttaagaagtagggcttccggctgagcacagtggctcacgcctgtaatcccagcacttgggaggccaaggcaggtggatcacttgaggtcaggagttcgagaccagcctggccaacatggcaaaacccagtctctaccaaaaatacaaaaattagctgggtgtggtggtgggtgcctgtaatcccagctacttgggaggctgaggcaggagaatcgcttgaaccaaggaggcagagttcaagcaattctgtctcagcctcccaggtagctgggacgacaggcgcacaccgccacgcccggctaatttcttttgtattttagtagagatgggtttcaccatgttgcccaggctggtctcgaactcctgagctcaggcagtacgtctgcctcggcctcccaaagtgctaggattacaggcgtgagccaccaagcccggcttttttttttttttttt

SEQ ID NO: 30294 - DNA, 543 bp, Homo sapiens
  source 1..543: mol_type = unassigned DNA
agagctgggctggtaaaattgcagtgctgaagacactggacccgggacggagtctccaactcctggcctctagcagtcctcctgtgtaggtctcccaaagtgctagtgtgtccggaattggtgggttcttggtctcactgacttcaagaatgaagccgcggaccctcgcagtctgctacaatgctgctgctgcacagagctgtggtcctcaggctccaacaggcctgcagactcaagtcaatcccctcaaggatctgcattcaggcctgctccacaaatgattcatttcagccccagcgccccagcctcaccttctctggtgataactccagcacccagggatggagagtcatggggaccctattaggtctcggtgcagtgttggcctatcaggaccatcggtgtagggctgctcaggagtcaacacacatatacactaaggaggaagtgagttcccacaccagccctgagactgggatctgggtgactctgggctctgaggtctttgatgtcacagaatttgtggacctacatccagggggg

SEQ ID NO: 30295 - DNA, 919 bp, Homo sapiens
  source 1..919: mol_type = unassigned DNA
atgacgtcacgcctgcggagctgccgccgcgcgccggtggggcgcgagcgtgtgcggggcgcgggcgcgggcgcgggcgcgggcgcgtgcgggctgcgagccgggaggcggcggcggcgacggcgacggcggcggcatggcggagagcgaggccgagacccccagcaccccgggggagttcgagagcaagtacttcgagttccatggcgtgcggctgccgcccttctgccgcgggaagatggaggagatcgccaacttcccggtgcggcccagcgacgtgtggatcgtcacctaccccaagtccggcaccagcttgctgcaggaggtggtctacttggtgagccagggcgctgaccccgatgagatcggcttgatgaacatcgacgagcagctcccggtcctggagtacccacagccgggcctggacatcatcaaggaactgacctctccccgcctcatcaagagccacctgccctaccgctttctgccctctgacctccacaatggagactccaaggtcatctatatggctcgcaaccccaaggatctggtggtgtcttattatcagttccaccgctctctgcggaccatgagctaccgaggcacctttcaagaattctgccggaggtttatgaatgataagctgggctacggctcctggtttgagcacgtgcaggagttctgggagcaccgcatggactcgaacgtgctttttctcaagtatgaagacatgcatcgggacctggtgacgatggtggagcagctggccagattcctgggggtgtcctgtgacaaggcccagctggaagccctgacggagcactgccaccagctggtggaccagtgctgcaacgctgaggccctgcccgtgggccgggcacattgcgtctttgctcggaagatcttcttgagttggtga

SEQ ID NO: 30296 - DNA, 2468 bp, Homo sapiens
  source 1..2468: mol_type = unassigned DNA
cggagctgccgccgcgcgccggtggggcgcgagcgtgtgcggggcgcgggcgcgggcgcgggcgcgggcgcgtgcgggctgcgagccgggaggcggcggcggcgacggcgacggcggcggcatggcggagagcgaggccgagacccccagcaccccgggggagttcgagagcaagtacttcgagttccatggcgtgcggctgccgcccttctgccgcgggaagatggaggagatcgccaacttcccggtgcggcccagcgacgtgtggatcgtcacctaccccaagtccggcaccagcttgctgcaggaggtggtctacttggtgagccagggcgctgaccccgatgagatcggcttgatgaacatcgacgagcagctcccggtcctggagtacccacagccgggcctggacatcatcaaggaactgacctctccccgcctcatcaagagccacctgccctaccgctttctgccctctgacctccacaatggagactccaaggtcatctatatggctcgcaaccccaaggatctggtggtgtcttattatcagttccaccgctctctgcggaccatgagctaccgaggcacctttcaagaattctgccggaggtttatgaatgataagctgggctacggctcctggtttgagcacgtgcaggagttctgggagcaccgcatggactcgaacgtgctttttctcaagtatgaagacatgcatcgggacctggtgacgatggtggagcagctggccagattcctgggggtgtcctgtgacaaggcccagctggaagccctgacggagcactgccaccagctggtggaccagtgctgcaacgctgaggccctgcccgtgggccggggaagagttgggctgtggaaggacatcttcaccgtctccatgaatgagaagtttgacttggtgtataaacagaagatgggaaagtgtgacctcacgtttgacttttatttataataacagaaacaacaacctgcatgctcacaatacccagacagtctactagccaaaagtcctgtatgcattcatttattccttgctggacaaactctggaagcagcgtgtgaaacagcgggggaagggaagagcggcgtgagcggagggagtgtgatgattcccaaccgaaagcagctgtctcgcctttagaacgtgcagcctctccatgtctgattacaaacagtctccacattgcagttccaatggcctggaccgtaaggataaagcctgtaatatatgcaactagaatgtctgccttttcaaccccgtattattgtattttatagagcttttcactggaaatctacataaatgtcagtaaaccaaataaaagttcatttccaaggggaatcaggagcgagccacacccgaatggtagaaagatctcagggttaactctttatttttgtagttttattatctaaggcacagccattctgttctcacttggttctgagatagtggtgagaacagaggatgagttgggtctgttggggggaatctggacacttgtttattctgacggagttcacttcttcagaaccttcctgaaatgagcagaaattgttcactaggtcttcagaatggacgtccttctgccagagacttccagcgggcggctccaaaggcccaatgcagaggagcccgcggagcatgtgctgagggaagtctgcctggtgaggctggcaggtgggagtctaatgcagtcaggagcatttgcatgcagtgggtggagagtcggccaccaaaggaccgagttgcgctcggaatttgagctgaattccacagccttactttgtttcctgaagtgatagcctactaatgctggcaagcagatgcttaatagtaaatttctaaaatccccgggtctttatcattcagtttgttctgtgcacctgaggcgctcagccgtgggaggaccattttgcgagtgtagccctgtttcactcggatcaggttggcacggccgcctgcgtgtctgtccacctcatccctccgtgtatctgagggagtaaaggtgaggtctttattgcttcactgcctaattttctcacccacattcgctgaagcgatggagagtcgggggccagtagccagccaaccccgtggggaccggggttgtctgtcatttatgtggctggaaagcacccaaagtggtggtcaggagggtcgctgctgtggaaggggtctccgttcttggtgctgtatttgaaacgggtgtagagagaagcttgtgtttttgtttgtaatggggagaagcgtggccaggcaggtggcacgtggcatcgcatggtgggctcggcagcaccttgcctgtgtttctgtgagggaggctgctttctgtgaaatttcatttatatttttctatttttagtactgtatggatgttactgagcactacacatgatccttctgtgcttgcttgcatctttaataaagacatgttcccggc

SEQ ID NO: 30297 - DNA, 1100 bp, Homo sapiens
  source 1..1100: mol_type = unassigned DNA
gcgtgcgggctgcgagccgggaggcggcggcggcgacggcgacggcggcggcatggcggagagcgaggccgagacccccagcaccccgggggagttcgagagcaagtacttcgagttccatggcgtgcggctgccgcccttctgccgcgggaagatggaggagatcgccaacttcccggtgcggcccagcgacgtgtggatcgtcacctaccccaagtccgtgggctacggctcctggtttgagcacgtgcaggagttctgggagcaccgcatggactcgaacgtgctttttctcaagtatgaagacatgcatcgggacctggtgacgatggtggagcagctggccagattcctgggggtgtcctgtgacaaggcccagctggaagccctgacggagcactgccaccagctggtggaccagtgctgcaacgctgaggccctgcccgtgggccggggaagagttgggctgtggaaggacatcttcaccgtctccatgaatgagaagtttgacttggtgtataaacagaagatgggaaagtgtgacctcacgtttgacttttatttataataacagaaacaacaacctgcatgctcacaatacccagacagtctactagccaaaagtcctgtatgcattcatttattccttgctggacaaactctggaagcagcgtgtgaaacagcgggggaagggaagagcggcgtgagcggagggagtgtgatgattcccaaccgaaagcagctgtctcgcctttagaacgtgcagcctctccatgtctgattacaaacagtctccacattgcagttccaatggcctggaccgtaaggataaagcctgtaatatatgcaactagaatgtctgccttttcaaccccgtattattgtattttatagagcttttcactggaaatctacataaatgtcagtaaaccaaataaaagttcatttccaaggggaatcaggagcgagccacacccgaatggtagaaagatctcagggttaactctttatttttgtagttttattatctaaggcacagccattctgttctcacttggttctgagatagtggtgagaacagaggatgagttgggtctgtt

SEQ ID NO: 30298 - DNA, 1876 bp, Homo sapiens
  source 1..1876: mol_type = unassigned DNA
cgaggcccggaggcggtgcaggaagcctccgaccacgcgggctcctgatcgcgggcgcccacagcgcggacatggcgggctggtggccggcgttgtcgcgcacggcccggcgccacccgtggcccaccaacgtgctgctctacgttgctcgagcaacgtagctctacgctctacgagcgtgccgtagctcgctcgtctccgccggggacgtgctgcagcaacggctgcagggccgctaggccgactggcgccagacgcggcgcgtggccacgttggtggtgaccttccacgccaacttcaactacgtgtggctgggcctgctggagcgcgcgctcccgggccgagcgccgcgcgccatgctggccaagttgctgtgcgaccaggtggtcggtgcgcccatcgcggtctcggccttctacgccggtatgagcattctccagggaaaggatgacatatttttggacctgaaacagaaattctggaacacctatatgcaaactcagtcgtggctttggagatcactttaagcttgtctccagctggcacactaaggagggtaatggagaagctcccccacccccaaccccaccccttccttccggaagcaaatctaagtccagccccggctccagatccctcccacagtggacctaggaaaccctcagctcagagaacaaccctgcattccccacacaacacccacaatcagccactgcgggcgaggagggcacgaggccaggttcccaagagctcaggaacatggagctgatccaggacacctcccgcccgccactggagtacgtgaagggggtcccgctcatcaagtactttgcagaggcactggggcccctgcagagcttccaggcccggcctgatgacctgctcatcagcacctaccccaagtccggcactacctgggtaagccagattctggacatgatctaccagggtggtgacctggagaagtgtcaccgagctcccatcttcatgcgggtgcccttccttgagttcaaagccccagggattccctcagggatggagactctgaaagacacaccggccccacgactcctgaagacacacctgcccctggctctgctcccccagactctgttggatcagaaggtcaaggtggtctatgttgcccgcaacgcaaaggatgtggcagtttcctactaccacttctaccacatggccaaggtgcaccctgagcctgggacctgggacagcttcctggagaagttcatggtcggagaagtgtcctacggatcctggtaccagcacgtgcaggagtggtgggagctgagccgcacccaccctgttctctacctcttctatgaagacatgaaggagaacccgaaaagggagattcaaaagatcctggagtttgtggggcgctccctgccagaggagaccgtggacttcgtggttcagcacacgtcgttcaaggagatgaagaagaaccctatgaccaactacaccaccgtcccccaggagttcatggaccacagcatctcccccttcatgaggaaaggcatggctggggactggaagaccaccttcaccgtggcgcagaatgagcgcttcgatgcggactatgcggagaagatggcaggctgcagcctcagcttccgctctgagctgtgagaggggctcctggagtcactgcagagggagtgtgcgaatcaaacctgaccaagcggctcaagaataaaatatgaattgagggcccgggacggtaggtcatgtctgtaatcccagcaatttggaggctgaggtgggaggatcatttgagcccaggagttcgagaccaacctgggcaacatagtgagattctgttaaaaaaataaaataaaataaaaccaatttttaaaaa

SEQ ID NO: 30299 - DNA, 1155 bp, Homo sapiens
  source 1..1155: mol_type = unassigned DNA
ccactttcttgctgttgtgatggtggtaagggaacgggcctggctctggcccctgacgcaggaacatggagctgatccaggacacctcccgcccgccactggagtacgtgaagggggtcccgctcatcaagtactttgcagaggcactggggcccctgcagagcttccaggcccggcctgatgacctgctcatcagcacctaccccaagtccggcactacctgggtaagccagattctggacatgatctaccagggtggtgacctggagaagtgtcaccgagctcccatcttcatgcgggtgcccttccttgagttcaaagccccagggattccctcagggatggagactctgaaagacacaccggccccacgactcctgaagacacacctgcccctggctctgctcccccagactctgttggatcagaaggtcaaggtggtctatgttgcccgcaacgcaaaggatgtggcagtttcctactaccacttctaccacatggccaaggtgcaccctgagcctgggacctgggacagcttcctggagaagttcatggtcggagaagtgtcctacggatcctggtaccagcacgtgcaggagtggtgggagctgagccgcacccaccctgttctctacctcttctatgaagacatgaaggagaacccgaaaagggagattcaaaagatcctggagtttgtggggcgctccctgccagaggagaccgtggacttcgtggttcagcacacgtcgttcaaggagatgaagaagaaccctatgaccaactacaccaccgtcccccaggagttcatggaccacagcatctcccccttcatgaggaaaggcatggctggggactggaagaccaccttcaccgtggcgcagaatgagcgcttcgatgcggactatgcggagaagatggcaggctgcagcctcagcttccgctctgagctgtgagaggggctcctggagtcactgcagagggagtgtgcgaatcaaacctgaccaagcggctcaagaataaaatatgaattgagggcccgggacggtaggtcatgtctgtaatcccagcaatttggaggctgaggtgggaggatcatttgagcccaggagttcgagaccaacctgggcaacatagtgagattctgttaaaaaaata

SEQ ID NO: 30300 - DNA, 1245 bp, Homo sapiens
  source 1..1245: mol_type = unassigned DNA
acagtggacctaggaaaccctcagctcagagaacaaccctgcattccccacacaacacccacaatcagccactgcgggcgaggagggcacgaggccaggttcccaagagctcaggaacatggagctgatccaggacacctcccgcccgccactggagtacgtgaagggggtcccgctcatcaagtactttgcagaggcactggggcccctgcagagcttccaggcccggcctgatgacctgctcatcagcacctaccccaagtccggcactacctgggtaagccagattctggacatgatctaccagggtggtgacctggagaagtgtcaccgagctcccatcttcatgcgggtgcccttccttgagttcaaagccccagggattccctcagggatggagactctgaaagacacaccggccccacgactcctgaagacacacctgcccctggctctgctcccccagactctgttggatcagaaggtcaaggtggtctatgttgcccgcaacgcaaaggatgtggcagtttcctactaccacttctaccacatggccaaggtgcaccctgagcctgggacctgggacagcttcctggagaagttcatggtcggagaagtgtcctacggatcctggtaccagcacgtgcaggagtggtgggagctgagccgcacccaccctgttctctacctcttctatgaagacatgaaggagaacccgaaaagggagattcaaaagatcctggagtttgtggggcgctccctgccagaggagaccgtggacttcgtggttcagcacacgtcgttcaaggagatgaagaagaaccctatgaccaactacaccaccgtcccccaggagttcatggaccacagcatctcccccttcatgaggaaaggcatggctggggactggaagaccaccttcaccgtggcgcagaatgagcgcttcgatgcggactatgcggagaagatggcaggctgcagcctcagcttccgctctgagctgtgagaggggctcctggagtcactgcagagggagtgtgcgaatcaaacctgaccaagcggctcaagaataaaatatgaattgagggcccgggacggtaggtcatgtctgtaatcccagcaatttggaggctgaggtgggaggatcatttgagcccaggagttcgagaccaacctgggcaacatagtgagattctgttaaaaaaataaaataaaataaaaccaatttttaaaaagagaataaaa

SEQ ID NO: 30301 - DNA, 1282 bp, Homo sapiens
  source 1..1282: mol_type = unassigned DNA
ggctgctgcagcgcagtagctgctggaggctggcgaggcccggaggcggtgcaggaagcctccgaccacgcgggctcctgatcgcgggcgcccacagcgcggacatggcgggctggtggccggcgttgtcgcgcacggcccggcgccacccgtggcccaccaacgtgctgctctacgttgctcgagcaacgtagctctacgctctacgagcgtgccgtagctcgctcgtctccgccggggacgtgctgcagcaacggctgcagggccgctaggccgactggcgccagacgcggcgcgtggccacgttggtggtgaccttccacgccaacttcaactacgtgtggctgggcctgctggagcgcgcgctcccgggccgagcgccgcgcgccatgctggccaagttgctgtgcgaccaggtggtcggtgcgcccatcgcggtctcggccttctacgccggtatgagcattctccagggaaaggatgacatatttttggacctgaaacagaaattctggaacacctatatggtggtctatgttgcccgcaacgcaaaggatgtggcagtttcctactaccacttctaccacatggccaaggtgcaccctgagcctgggacctgggacagcttcctggagaagttcatggtcggagaagtgtcctacggatcctggtaccagcacgtgcaggagtggtgggagctgagccgcacccaccctgttctctacctcttctatgaagacatgaaggagaacccgaaaagggagattcaaaagatcctggagtttgtggggcgctccctgccagaggagaccgtggacttcgtggttcagcacacgtcgttcaaggagatgaagaagaaccctatgaccaactacaccaccgtcccccaggagttcatggaccacagcatctcccccttcatgaggaaaggcatggctggggactggaagaccaccttcaccgtggcgcagaatgagcgcttcgatgcggactatgcggagaagatggcaggctgcagcctcagcttccgctctgagctgtgagaggggctcctggagtcactgcagagggagtgtgcgaatcaaacctgaccaagcggctcaagaataaaatatgaattgagggcccgggacggtaggtcatgtctgtaatcccagcaatttggaggctgaggtgggaggatcatttgagcccaggagttcgagaccaacctgggcaacatagtgagattctgttaaaaaaataaaataaaataaaaccaatttttaaaaagagaataaaa

SEQ ID NO: 30302 - DNA, 1386 bp, Homo sapiens
  source 1..1386: mol_type = unassigned DNA
tttccacatgtgaggggctgaggggctcaaggaggggagcatctccactgggtggaggctgggggtcccagcaggaagtggtgagacaaagggcgctggctggcagggagacagcacaggaaggtcctagagcttcctcagtgcagctggactctcctggagaccttcacacaccctgacatctgggccttgcccgacgagggtgctttcactggtctgcaccatggcccaggccctgggattttgaacagctccgcaggtgaatgaaaggaacatggagctgatccaggacacctcccgcccgccactggagtacgtgaagggggtcccgctcatcaagtactttgcagaggcactggggcccctgcagagcttccaggcccggcctgatgacctgctcatcagcacctaccccaagtccggcactacctgggtaagccagattctggacatgatctaccagggtggtgacctggagaagtgtcaccgagctcccatcttcatgcgggtgcccttccttgagttcaaagccccagggattccctcagggatggagactctgaaagacacaccggccccacgactcctgaagacacacctgcccctggctctgctcccccagactctgttggatcagaaggtcaaggtggtctatgttgcccgcaacgcaaaggatgtggcagtttcctactaccacttctaccacatggccaaggtgcaccctgagcctgggacctgggacagcttcctggagaagttcatggtcggagaagtgtcctacggatcctggtaccagcacgtgcaggagtggtgggagctgagccgcacccaccctgttctctacctcttctatgaagacatgaaggagaacccgaaaagggagattcaaaagatcctggagtttgtggggcgctccctgccagaggagaccgtggacttcgtggttcagcacacgtcgttcaaggagatgaagaagaaccctatgaccaactacaccaccgtcccccaggagttcatggaccacagcatctcccccttcatgaggaaaggcatggctggggactggaagaccaccttcaccgtggcgcagaatgagcgcttcgatgcggactatgcggagaagatggcaggctgcagcctcagcttccgctctgagctgtgagaggggctcctggagtcactgcagagggagtgtgcgaatcaaacctgaccaagcggctcaagaataaaatatgaattgagggcccgggacggtaggtcatgtctgtaatcccagcaatttggaggctgaggtgggaggatcatttgagcccaggagttcgagaccaacctgggcaacatagtgagattctgttaaaaaaataaaataaaataaaaccaattttt

SEQ ID NO: 30303 - DNA, 1871 bp, Homo sapiens
  source 1..1871: mol_type = unassigned DNA
cgaggcccggaggcggtgcaggaagcctccgaccacgcgggctcctgatcgcgggcgcccacagcgcggacatggcgggctggtggccggcgttgtcgcgcacggcccggcgccacccgtggcccaccaacgtgctgctctacgttgctcgagcaacgtagctctacgctctacgagcgtgccgtagctcgctcgtctccgccggggacgtgctgcagcaacggctgcagggccgctaggccgactggcgccagacgcggcgcgtggccacgttggtggtgaccttccacgccaacttcaactacgtgtggctgggcctgctggagcgcgcgctcccgggccgagcgccgcgcgccatgctggccaagttgctgtgcgaccaggtggtcggtgcgcccatcgcggtctcggccttctacgccggtatgagcattctccagggaaaggatgacatatttttggacctgaaacagaaattctggaacacctatatgcaaactcagtcgtggctttggagatcactttaagcttgtctccagctggcacactaaggagggtaatggagaagctcccccacccccaaccccaccccttccttccggaagcaaatctaagtccagccccggctccagatccctcccacagtggacctaggaaaccctcagctcagagaacaaccctgcattccccacacaacacccacaatcagccactgcgggcgaggagggcacgaggccaggttcccaagagctcaggaacatggagctgatccaggacacctcccgcccgccactggagtacgtgaagggggtcccgctcatcaagtactttgcagaggcactggggcccctgcagagcttccaggcccggcctgatgacctgctcatcagcacctaccccaagtccggcactacctgggtaagccagattctggacatgatctaccagggtggtgacctggagaagtgtcaccgagctcccatcttcatgcgggtgcccttccttgagttcaaagccccagggattccctcagggatggagactctgaaagacacaccggccccacgactcctgaagacacacctgcccctggctctgctcccccagactctgttggatcagaaggtcaaggtggtctatgttgcccgcaacgcaaaggatgtggcagtttcctactaccacttctaccacatggccaaggtgcaccctgagcctgggacctgggacagcttcctggagaagttcatggtcggagaagtgtcctacggatcctggtaccagcacgtgcaggagtggtgggagctgagccgcacccaccctgttctctacctcttctatgaagacatgaaggagaacccgaaaagggagattcaaaagatcctggagtttgtggggcgctccctgccagaggagaccgtggacttcgtggttcagcacacgtcgttcaaggagatgaagaagaaccctatgaccaactacaccaccgtcccccaggagttcatggaccacagcatctcccccttcatgaggaaaggcatggctggggactggaagaccaccttcaccgtggcgcagaatgagcgcttcgatgcggactatgcggagaagatggcaggctgcagcctcagcttccgctctgagctgtgagaggggctcctggagtcactgcagagggagtgtgcgaatcaaacctgaccaagcggctcaagaataaaatatgaattgagggcccgggacggtaggtcatgtctgtaatcccagcaatttggaggctgaggtgggaggatcatttgagcccaggagttcgagaccaacctgggcaacatagtgagattctgttaaaaaaataaaataaaataaaaccaattttt

SEQ ID NO: 30304 - DNA, 1090 bp, Homo sapiens
  source 1..1090: mol_type = unassigned DNA
acactgacctaagaaaccctcagcacagacaacacccctgcattccccacacaacacccacactcagccactgcgggcgaggagggcacaaggccaggttcccaagagctcaggaacatggagctgatccaggacatctctcgcccgccactggagtacgtgaagggggtcccgctcatcaagtactttgcagaggcactggggcccctgcagagcttccaggcccggcctgatgacctgctcatcagcacctaccccaagtccggcaccacctgggtgagccagattctggacatgatctaccagggcggtgacctggaaaagtgtcaccgagctcccatcttcatgcgggtgcccttccttgagttcaaagtcccagggattccctcagggatggagactctgaaaaacacaccagccccacgactcctgaagacacacctgcccctggctctgctcccccagactctgttggatcagaaggtcaaggtggtctatgttgcccgcaacgcaaaggatgtggcggtttcctactaccacttctaccacatggccaaagtgtaccctcaccctgggacctgggaaagcttcctggagaagttcatggctggagaagtgtcctatgggtcctggtaccagcacgtgcaagagtggtgggagctgagccgcacccaccctgttctctacctcttctatgaagacatgaaggagaaccccaaaagggagattcaaaagatcctggagtttgtggggcgctccctgccagaggagactgtggacctcatggttgagcacacgtcgttcaaggagatgaagaagaaccctatgaccaactacaccaccgtccgccgggagttcatggaccacagcatctcccccttcatgaggaaaggcatggctggggactggaagaccaccttcaccgtggcgcagaatgagcgcttcgatgcggactatgcgaagaagatggcaggctgcagcctcagcttccgctctgagctgtgagaggggttcctggagtcactgcagagggagtgtgcgaatcaagcctgaccaagaggctccagaataaagtatgatttgtgttcaa

SEQ ID NO: 30305 - DNA, 1322 bp, Homo sapiens
  source 1..1322: mol_type = unassigned DNA
gtttgtcctggagcccagatggactgtggccgggcaagtggatcacaggcctggccagcctaggagttgccacatgtgaggggccgaggggctcaaggaggggaacatcggggagaggagcctactgggtggaggctgggggtcccagcaggaaatggtgagacaaagggcgctggctggcaggaagacagcacaggaaggtcctagaggttcctcagtgcagctggactctcctggagaccttcacacaccctgacatctgggccccgcgccacgagggtgctttcactggtctgcaccatggcccaggccctgggattttgaacagctccgcaggtgaatgaaaggaacatggagctgatccaggacatctctcgcccgccactggagtacgtgaagggggtcccgctcatcaagtactttgcagaggcactggggcccctgcagagcttccaggcccggcctgatgacctgctcatcagcacctaccccaagtccggcaccacctgggtgagccagattctggacatgatctaccagggcggtgacctggaaaagtgtcaccgagctcccatcttcatgcgggtgcccttccttgagttcaaagtcccagggattccctcagggatggagactctgaaaaacacaccagccccacgactcctgaagacacacctgcccctggctctgctcccccagactctgttggatcagaaggtcaaggtggtctatgttgcccgcaacgcaaaggatgtggcggtttcctactaccacttctaccacatggccaaagtgtaccctcaccctgggacctgggaaagcttcctggagaagttcatggctggagaagtgtcctatgggtcctggtaccagcacgtgcaagagtggtgggagctgagccgcacccaccctgttctctacctcttctatgaagacatgaaggagaaccccaaaagggagattcaaaagatcctggagtttgtggggcgctccctgccagaggagactgtggacctcatggttgagcacacgtcgttcaaggagatgaagaagaaccctatgaccaactacaccaccgtccgccgggagttcatggaccacagcatctcccccttcatgaggaaaggcatggctggggactggaagaccaccttcaccgtggcgcagaatgagcgcttcgatgcggactatgcgaagaagatggcaggctgcagcctcagcttccgctctgagctgtgagaggggttcctggagtcactgcagagggagtgtgcgaatcaagcctgaccaagaggctccagaataaagtatgatttgtgttc

SEQ ID NO: 30306 - DNA, 773 bp, Homo sapiens
  source 1..773: mol_type = unassigned DNA
agacagcacaggaaggtcctagaggttcctcagtgcagctggactctcctggagaccttcacacaccctgacatctgggccccgcgccacgagggtgctttcactggtctgcaccatggcccaggccctgggattttgaacagctccgcaggtgaatgaaagggaacgggcctggctctggcccctgacgcaggaacatggagctgatccaggacatctctcgcccgccactggagtacgtgaagggggtcccgctcatcaagtactttgcagaggcactggggcccctgcagagcttccaggcccggcctgatgacctgctcatcagcacctaccccaagtccggcaccacctgggtgagccagattctggacatgatctaccagggcggtgacctggaaaagtgtcaccgagctcccatcttcatgcgggtgcccttccttgagttcaaagtcccagggattccctcagggatggagactctgaaaaacacaccagccccacgactcctgaagacacacctgcccctggctctgctcccccagactctgttggatcagaaggtcaaggtggtctatgttgcccgcaacgcaaaggatgtggcggtttcctactaccacttctaccacatggccaaagtgtaccctcaccctgggacctgggaaagcttcctggagaagttcatggctggagaagtgtcctatgggtcctggtaccagcacgtgcaagagtggtgggagctgagccgcacccaccctgttctctacctcttc

SEQ ID NO: 30307 - DNA, 2795 bp, Homo sapiens
  source 1..2795: mol_type = unassigned DNA
agcttcgaggccagtgggaggagggaggggccaggcagctgagggccaggaaagatgtgaaaaactctagctggtgaccgagaggaggagtagagtgtgcccttagttcatatgaactagagggagttggtatttgcacagcagtcagggtcacatgagtgatcatggtacagtgagaagttctccctcccagggccaggtcacagggtttgtttctgttcaatccggattcttccagtaaaagcttcaacttcccacactgaagctgagagcctcccaaagtgctggctacctgctgagcgcccccgtaactctgacacagtagtaatttgagcctctgcaattgccgtctgcttcctgtgaaagtcctttccgtgcccactgacccttgagtgggcctttgagctgctgactttcagctggaacttgaagggaccccaaccctgagacactatggccctgacctcagacctggggaaacagataaaactgaaagaggtggaggggaccctcctgcagcctgcaactgtggacaactggagccagatccagagcttcgaggccaaaccagatgatctcctcatctgcacctaccctaaagcagggacaacgtggattcaggaaattgtggatatgattgaacagaatggggacgtggagaagtgccagcgagccatcatccaacaccgccatcctttcattgagtgggctcggccaccccaaccttctggtgtggaaaaagccaaagcaatgccctctccacggatactaaagactcacctttccactcagctgctgccaccgtctttctgggaaaacaactgcaagttcctttatgtagctcgaaatgccaaagactgtatggtttcctactaccatttccaaaggatgaaccacatgcttcctgaccctggtacctgggaagagtattttgaaaccttcatcaatggaaaagtggtttggggttcctggtttgaccacgtgaaaggatggtgggagatgaaagacagacaccagattctcttcctcttctatgaggacataaagagggacccaaagcatgaaattcggaaggtgatgcagttcatgggaaagaaggtggatgaaacagtgctagataaaattgtccaggagacgtcatttgagaaaatgaaagaaaatcccatgacaaatcgttctacagtttccaaatctatcttggaccagtcaatttcctccttcatgagaaaaggaactgtgggggattggaaaaaccacttcactgttgcccagaatgagaggtttgatgaaatctatagaagaaagatggaaggaacctccataaacttctgcatggaactctgagcaagatgtaaataaaattaaaaggtggatggcaagagtgcaaatactatcttcaatccttcagtcccagccagaagaatctctgaaagcatattgtgaatgtatacaatgtagtacaaacaatctctgtgatgattaacagtatgtcaccacttcattttttaaaaaggatcacgtctaatgcccattttcccaactattctttccaaagtaagatataaggtagcttaataaactaagtaaaacgtatgacttgagtacaaaaggattgttttaatccccattattctggaaagtgcatcctagtctcccagtctataacatcataataccttgagtataagtccaaatattaggttatatctatattaaaaacaaaatttctgtcatctgtcctggccattcaggcaactccagcctgggctcaatcctggagttctgtctggtcactatcagaaggaacactttgagggaaaccctggtgcagccagccctgaggaaacatggcctgagtgccctcactggtgggtgggaataaaatggaagtgcacagaggagatgtcagaagaccaaaacttggtgaatagtcccagtgctaggtcatataggaaacagaaagcatgacagtggccttttgggaacccaagttacgtcctggtgaaagcagaaaggaggagacaggatggctgtcaacaacgtcagcatgggcatggctcccaggcatggaggtaattgggtcttggcttcaatgccacccttttgggaagccctaaaccaagtgaggtgttcttttcccttgcttcccatatttgtcccagttgcagccctgttgttatgtatttactcttcaatttcttatttatacctctcactcaattgttaattctttgggttcagtctcatgccatatttactcctagtacctaatgcagtgcctggcacacagcaagtgcccttgagaacttgtagagggagtaaaaaagtgcatggataaatgactgcagcaaatcacaaattttgaactttgacccttttcttttagtcccaaatagtggcattccatagctgagggtagtaggagcagttcaccctgggagcagacaataagaggaagaatgaagccaactaaaattctgaatgctttttgttggatttcgtagggtattttttttaaaatagggtcttgctatgttgcccaggctggtcttaactgactgctttttattattaccatgcactggcaattccaaacaatgtcagtgttaaaatgcttctccctgaaaaagagaaaaaaaaaaggaaaaaaagaaaagaaaagtgaaaagaaaaactcttattggcctaagttctaaataatagctaggttaccactgagttttaactatatgtatatgagcttcaaataagcacctttttattatgtaaataaataaaagttatctgtatcccca

SEQ ID NO: 30308 - DNA, 2828 bp, Homo sapiens
  source 1..2828: mol_type = unassigned DNA
agcttcgaggccagtgggaggagggaggggccaggcagctgagggccaggaaagatgtgaaaaactctagctggtgaccgagaggaggagtagagtgtgcccttagttcatatgaactagagggagttggtatttgcacagcagtcagggtcacatgagtgatcatggtacagtgagaagttctccctcccagggccaggtcacagggtttgtttctgttcaatccggattcttccagtaaaagcttcaacttcccacactgaagctgagagcctcccaaagtgctggctacctgctgagcgcccccgtaactctgacacagtagtaatttgagcctctgcaattgccgtctgcttcctgtgaaagtcctttccgtgcccactgacccttgagtgggcctttgagctgctgactttcagctggaacttgaagggaccccaaccctgagacactatggccctgacctcagacctggggaaacagataaaactgaaagaggtggaggggaccctcctgcagcctgcaactgtggacaactggagccagatccagagcttcgaggccaaaccagatgatctcctcatctgcacctaccctaaagcagggacaacgtggattcaggaaattgtggatatgattgaacagaatggggacgtggagaagtgccagcgagccatcatccaacaccgccatcctttcattgagtgggctcggccaccccaaccttctgagacaggatttcaccatgttgcccaggctggtctcaaactcctgagctcaagcaatccacctgcctcaacctcccaaagtgccaagattacagacctgctgccaccgtctttctgggaaaacaactgcaagttcctttatgtagctcgaaatgccaaagactgtatggtttcctactaccatttccaaaggatgaaccacatgcttcctgaccctggtacctgggaagagtattttgaaaccttcatcaatggaaaagtggtttggggttcctggtttgaccacgtgaaaggatggtgggagatgaaagacagacaccagattctcttcctcttctatgaggacataaagagggacccaaagcatgaaattcggaaggtgatgcagttcatgggaaagaaggtggatgaaacagtgctagataaaattgtccaggagacgtcatttgagaaaatgaaagaaaatcccatgacaaatcgttctacagtttccaaatctatcttggaccagtcaatttcctccttcatgagaaaaggaactgtgggggattggaaaaaccacttcactgttgcccagaatgagaggtttgatgaaatctatagaagaaagatggaaggaacctccataaacttctgcatggaactctgagcaagatgtaaataaaattaaaaggtggatggcaagagtgcaaatactatcttcaatccttcagtcccagccagaagaatctctgaaagcatattgtgaatgtatacaatgtagtacaaacaatctctgtgatgattaacagtatgtcaccacttcattttttaaaaaggatcacgtctaatgcccattttcccaactattctttccaaagtaagatataaggtagcttaataaactaagtaaaacgtatgacttgagtacaaaaggattgttttaatccccattattctggaaagtgcatcctagtctcccagtctataacatcataataccttgagtataagtccaaatattaggttatatctatattaaaaacaaaatttctgtcatctgtcctggccattcaggcaactccagcctgggctcaatcctggagttctgtctggtcactatcagaaggaacactttgagggaaaccctggtgcagccagccctgaggaaacatggcctgagtgccctcactggtgggtgggaataaaatggaagtgcacagaggagatgtcagaagaccaaaacttggtgaatagtcccagtgctaggtcatataggaaacagaaagcatgacagtggccttttgggaacccaagttacgtcctggtgaaagcagaaaggaggagacaggatggctgtcaacaacgtcagcatgggcatggctcccaggcatggaggtaattgggtcttggcttcaatgccacccttttgggaagccctaaaccaagtgaggtgttcttttcccttgcttcccatatttgtcccagttgcagccctgttgttatgtatttactcttcaatttcttatttatacctctcactcaattgttaattctttgggttcagtctcatgccatatttactcctagtacctaatgcagtgcctggcacacagcaagtgcccttgagaacttgtagagggagtaaaaaagtgcatggataaatgactgcagcaaatcacaaattttgaactttgacccttttcttttagtcccaaatagtggcattccatagctgagggtagtaggagcagttcaccctgggagcagacaataagaggaagaatgaagccaactaaaattctgaatgctttttgttggatttcgtagggtattttttttaaaatagggtcttgctatgttgcccaggctggtcttaactgactgctttttattattaccatgcactggcaattccaaacaatgtcagtgttaaaatgcttctccctgaaaaagagaaaaaaaaaaggaaaaaaagaaaagaaaagtgaaaagaaaaactcttattggcctaagttctaaataatagctaggttaccactgagttttaactatatgtatatgagcttcaaataagcacctttttattatgtaaataaataaaagttatctgtatcccca

SEQ ID NO: 30309 - DNA, 1359 bp, Homo sapiens
  source 1..1359: mol_type = unassigned DNA
ccaaagtgctggctacctgctgagcgcccccgtaactctgacacagtagtaatttgagcctctgcaattgccgtctgcttcctgtgaaagtcctttccgtgcccactgacccttgagtgggcctttgagctgctgactttcagctggaacttgaagggaccccaaccctgagacactatggccctgacctcagacctggggaaacagataaaactgaaagaggtggaggggaccctcctgcagcctgcaactgtggacaactggagccagatccagagcttcgaggccaaaccagatgatctcctcatctgcacctaccctaaagcagggacaacgtggattcaggaaattgtggatatgattgaacagaatggggacgtggagaagtgccagcgagccatcatccaacaccgccatcctttcattgagtgggctcggccaccccaaccttctgtgcttgtactacgcagatgtttcctcttgagctattttaaaggtgtggaaaaagccaaagcaatgccctctccacggatactaaagactcacctttccactcagctgctgccaccgtctttctgggaaaacaactgcaagttcctttatgtagctcgaaatgccaaagactgtatggtttcctactaccatttccaaaggatgaaccacatgcttcctgaccctggtacctgggaagagtattttgaaaccttcatcaatggaaaagtggtttggggttcctggtttgaccacgtgaaaggatggtgggagatgaaagacagacaccagattctcttcctcttctatgaggacataaagagggacccaaagcatgaaattcggaaggtgatgcagttcatgggaaagaaggtggatgaaacagtgctagataaaattgtccaggagacgtcatttgagaaaatgaaagaaaatcccatgacaaatcgttctacagtttccaaatctatcttggaccagtcaatttcctccttcatgagaaaaggaactgtgggggattggaaaaaccacttcactgttgcccagaatgagaggtttgatgaaatctatagaagaaagatggaaggaacctccataaacttctgcatggaactctgagcaagatgtaaataaaattaaaaggtggatggcaagagtgcaaatactatcttcaatccttcagtcccagccagaagaatctctgaaagcatattgtgaatgtatacaatgtagtacaaacaatctctgtgatgattaacagtatgtcaccacttcattttttaaaaaggatcacgtctaatgcccattttcccaactattctttccaaagtaagatataaggtagcttaataaactaagtaaaacgta

SEQ ID NO: 30310 - DNA, 1987 bp, Homo sapiens
  source 1..1987: mol_type = unassigned DNA
acaacaaacatgtgacatgctgggacaaggttaaagatcgttttatccttgctgtaaaagctgatctgcctgtagctgccacagcctccagcggtggctacagttgaaaccctcacaccacgcaggaagaggtcatcatcatgtcggacgatttcttatggtttgaaggcatagctttccctactatgggtttcagatccgaaaccttaagaaaagtacgtgatgagtttgtgataagggatgaagatgtaataatattgacttaccccaaatcaggaacaaactggttggctgagattctctgcctgatgcactccaagggggatgccaagtggatccaatctgtgcccatctgggagcgatcaccctgggtagagagtgagattgggtatacagcactcagtgaaacggagagtccacgtttattctcctcccacctccccatccagttattccccaagtctttcttcagttccaaggccaaggtgatttatctcatgagaaatcccagagatgttttggtgtctggttattttttctggaaaaacatgaagtttattaagaaaccaaagtcatgggaagaatattttgaatggttttgtcaaggaactgtgctatatgggtcatggtttgaccacattcatggctggatgcccatgagagaggagaaaaacttcctgttactgagttatgaggagctgaaacaggacacaggaagaaccatagagaagatctgtcaattcctgggaaagacgttagaacccgaagaactgaacttaattctcaagaacagctcctttcagagcatgaaagaaaacaagatgtccaattattccctcctgagtgttgattatgtagtggacaaagcacaacttctgagaaaaggtgtatctggggactggaaaaatcacttcacagtggcccaagctgaagactttgataaattgttccaagagaagatggcagatcttcctcgagagctgttcccatgggaataacgtccaaaacactctggatcttatatggagaatgacattgattctcctgtccttgtacatgtacctgactggggtcattgtgtaagacttattattttatcctgaaaccttaaatatcaaacctctgcatctctgatcccttccttgttaaaagttaccagggttggccaggcacggtggttcatgcctgtaatcccagcactatgggaggccgagacgggcggatcacgaggtcaggagactgagaccatcctggctaacacggtgaaaccccatctctactaaaaatacaaaaaccaaaaaaaattagccaggcgcattggctcatgtctgtaatcccagcactttgggaggtcgggggggtgggggaggatcacggggtcaggagatcgagaccatcctggccaacatgatgaaaccctatctctactaaaaatacaaaaattagccgggcatggtggtgcacgcctatagtcccagctactcgggaggctgaggtaggagaatcgtttgaactcaggaggcagaggttgcaatgagccaagatcgcgccactgcactccagcctgggtgacagagcgagaccgtctcaaaaagaaagaagtgactagggttcagagaaccagggttcaaagcccagggatgcaaaggttgcagtgagttgagtcatgggatcccagacttttttaaatgtttgcaatgtttcccgtttacagaatgctacaagaataatgtacgtactacctaaaaggatgtctaaatgtttgttaataaaaataagaaatagctacagtgacagattttagagcaaaaattagtaataaaaataagaaataaaattacaggagcaattaaggttccatttcttttcatcacatgtatctccacaatttattattgctctgatcttaaggagtgtaatttgcaatctaattttatcctcttactctgtgttgttaaaccatatacaataaacggtgtttatggag

SEQ ID NO: 30311 - DNA, 1199 bp, Homo sapiens
  source 1..1199: mol_type = unassigned DNA
agacgctgtcgctgcgcacacctggcctctgtgccgcctgctccctgctcgtcctcccctccccaccctcacccacctgccatggacgggcccgccgagccccagatcccgggcttgtgggacacctatgaagatgacatctcggaaatcagccagaagttgccaggtgaatacttccggtacaagggcgtccccttccccgtcggcctgtactcgctcgagagcatcagcttggcggagaacacccaagatgtgcgggacgacgacatctttatcatcacctaccccaagtcaggcacgacctggatgatcgagatcatctgcttaatcctgaaggaaggggatccatcctggatccgctccgtgcccatctgggagcgggcaccctggtgtgagaccattgtgggtgccttcagcctcccggaccagtacagcccccgcctcatgagctcccatcttcccatccagatcttcaccaaggccttcttcagctccaaggccaaggtgatctacatgggccgcaacccccgggacgttgtggtctccctctatcattactccaagatcgccgggcagttaaaggacccgggcacacccgaccagttcctgagggacttcctcaaaggcgaagtgcagtttggctcctggttcgaccacattaagggctggcttcggatgaagggcaaagacaacttcctatttatcacctacgaggagctgcagcaggacttacagggctccgtggagcgcatctgtgggttcctgggccgtccgctgggcaaggaggcactgggctccgtcgtggcacactcaaccttcagcgccatgaaggccaacaccatgtccaactacacgctgctgcctcccagcctgctggaccaccgtcgcggggccttcctccggaaaggggtctgcggcgactggaagaaccacttcacggtggcccagagcgaagccttcgatcgtgcctaccgcaagcagatgcgggggatgccgaccttcccctgggatgaagacccggaggaggacggcagcccagatcctgagcccagccctgagcctgagcccaagcccagccttgagcccaacaccagcctggagcgtgagcccagacccaactccagccccagccccagccccggccaggcctctgagaccccgcacccacgaccctcataataaacacgtcgattctgtcc

SEQ ID NO: 30312 - DNA, 1252 bp, Homo sapiens
  source 1..1252: mol_type = unassigned DNA
ctcccaaagtgctgggattacaggagtgtgccactgcgcctgaccagctttataaagtttatagggacagtgtcaccactttacagaagagggactgaggctctgaggaggaagttccttgccagggtccgagtgtcgccaccctgagaactccagcacccacctccctactctccctcatggcgtctcccccacctttccacagccagaagttgccaggtgaatacttccggtacaagggcgtccccttccccgtcggcctgtactcgctcgagagcatcagcttggcggagaacacccaagatgtgcgggacgacgacatctttatcatcacctaccccaagtcaggcacgacctggatgatcgagatcatctgcttaatcctgaaggaaggggatccatcctggatccgctccgtgcccatctgggagcgggcaccctggtgtgagaccattgtgggtgccttcagcctcccggaccagtacagcccccgcctcatgagctcccatcttcccatccagatcttcaccaaggccttcttcagctccaaggccaaggtgatctacatgggccgcaacccccgggacgttgtggtctccctctatcattactccaagatcgccgggcagttaaaggacccgggcacacccgaccagttcctgagggacttcctcaaaggcgaagtgcagtttggctcctggttcgaccacattaagggctggcttcggatgaagggcaaagacaacttcctatttatcacctacgaggagctgcagcaggacttacagggctccgtggagcgcatctgtgggttcctgggccgtccgctgggcaaggaggcactgggctccgtcgtggcacactcaaccttcagcgccatgaaggccaacaccatgtccaactacacgctgctgcctcccagcctgctggaccaccgtcgcggggccttcctccggaaaggggtctgcggcgactggaagaaccacttcacggtggcccagagcgaagccttcgatcgtgcctaccgcaagcagatgcgggggatgccgaccttcccctgggatgaagacccggaggaggacggcagcccagatcctgagcccagccctgagcctgagcccaagcccagccttgagcccaacaccagcctggagcgtgagcccagacccaactccagccccagccccagccccggccaggcctctgagaccccgcacccacgaccctcataataaacacgtcgattctgtcc

SEQ ID NO: 30313 - DNA, 2533 bp, Homo sapiens
  source 1..2533: mol_type = unassigned DNA
atgcgcagaagcactccgggcgtgctgccggcggcggtaggtggcgcgcgggtccggcgggcggttggcttgagcgggaccggagctgaggcaggaagagccggcgccatggtggagaaggaggaggctggcggcggcattagcgaggaggaggcggcacagtatgaccggcagatccgcctgtggggactggaggcccagaaacggctgcgggcctctcgggtgcttcttgtcggcttgaaaggacttggggctgaaattgccaagaatctcatcttggcaggagtgaaaggactgaccatgctggatcacgaacaggtaactccagaagatcccggagctcagttcttgattcgtactgggtctgttggccgaaatagggctgaagcctctttggagcgagctcagaatctcaaccccatggtggatgtgaaggtggacactgaggatatagagaagaaaccagagtcatttttcactcaattcgatgctgtgtgtctgacttgctgctccagggatgtcatagttaaagttgaccagatctgtcacaaaaatagcatcaagttctttacaggagatgtttttggctaccatggatacacatttgccaatctaggagagcatgagtttgtagaggagaaaactaaagttgccaaagttagccaaggagtagaagatgggcccgacaccaagagagcaaaacttgattcttctgagacaacgatggtcaaaaagaaggtggtcttctgccctgttaaagaagccctggaggtggactggagcagtgagaaagcaaaggctgctctgaagcgcacgacctccgactactttctccttcaagtgctcttaaagttccgtacagataaaggaagagatcccagttctgatacatatgaggaagattctgagttgttgctccagatacgaaatgatgtgcttgactcactgggtattagtcctgacctgcttcctgaggactttgtcaggtactgcttctccgagatggccccagtgtgtgcggtggttggagggattttggcacaggaaattgtgaaggccctgtctcagcgggaccctcctcacaacaacttcttcttcttcgatggcatgaaggggaatgggattgtggagtgccttggccccaagtgaactcaagatttggcagccccagagatgccaactgcagcatgcccacctgtattccctgtccccttccttcatgaaggcatctccaggcaaggaaaactgaagtcattggcccgatacaaaacatttcctgcaacgaaggaggtggtgccgacgtgctgcttcccatcaccagcagctgctcgacaaggggcgcagggtggctgtctttgttccagcactgttcaggctgcctgtcatcccgggcctgccagctcccctgagtgatgagcacttccaagcacccctctgccctttctctgtccttatgctgtcccggcctcgccagccctctggggcattgtgggagatgcctgccaggaatgagcaagctctgttgctcgggagcctcttgtcaccttcttggacttattccccacctgataccttatagagaaaagtgtgaattcaggtggagagtaggcccaggccccatgaggcaccagtggaagcacagctccaagttcagacaggtgcccttagagaggaaaaccatgacaggcaaatgcatttcctctggagtttgagaccctgacaaacaacaggtggcatctggtgtgctgttcttgagttttcgtttaggattagttgagttccagctgggttttgggagaaaggagatgctaccaagtcttggatgttagggcgagaccctgcaagttgagtattagagagcttgtctttcaaggcaggttcctggggcttcagggctaggagggaggagcctgcccttttaacagaaccccagtcacatgcggctcaagtcactcagaggctgttgcatttcagggctatgttggtcctttgtttacctcctaaaccacagctgtttgtgtttcacatatgttgtgaattttccttggttctttttaaaggaatgataataaagttacttgctttaggatttgcttgtttttcttccacttcagaagcttctgagagggaatgggatgatcctaccagttgccttttcagacctgaggctctaactcaagagattcctcctctccctcaccattcctgccaccattttttctgggtgatgcagcaagagttaaattgttcacattctagaatgtgtagaagcttctggctccagttgtctaatggataattcagctaaatagtggctattttcagtggcaagaattataataataaagggaagtcaaaagtgatgcttcatatgccccaagtgccacagccgctacgggtcagagcttttattggaagaccaggtttgccttgatgcagccaaagtgcgttccagttcaccccactcttgcttgtgtttcttctttatgtaaattgtgtgatgtttcaataaatcagtctctttcctattctg

SEQ ID NO: 30314 - DNA, 2388 bp, Homo sapiens
  source 1..2388: mol_type = unassigned DNA
atgcgcagaagcactccgggcgtgctgccggcggcggtaggtggcgcgcgggtccggcgggcggttggcttgagcgggaccggagctgaggcaggaagagccggcgccatggtggagaaggaggaggctggcggcggcattagcgaggaggaggcggcacagtatgaccggcagatccgcctgtggggactggaggcccagaaacggctgcgggcctctcgggtgcttcttgtcggcttgaaaggacttggggctgaaattgccaagaatctcatcttggcaggagtgaaaggactgaccatgctggatcacgaacaggtaactccagaagatcccggagctcagttcttgattcgtactgggtctgttggccgaaatagggctgaagcctctttggagcgagctcagaatctcaaccccatggtggatgtgaaggtggacactgaggatatagagaagaaaccagagtcatttttcactcaattcgatgctgtgtgtctgacttgctgctccagggatgtcatagttaaagttgaccagatctgtcacaaaaatagcatcaagttctttacaggagatgtttttggctaccatggatacacatttgccaatctaggagagcatgagtttgtagaggagaaaactaaagttgccaaagttagccaaggagtagaagatgggcccgacaccaagagagcaaaacttgattcttctgagacaacgatggtcaaaaagaaggtggtcttctgccctgttaaagaagccctggaggtggactggagcagtgagaaagcaaaggctgctctgaagcgcacgacctccgactactttctccttcaaggtactgcttctccgagatggccccagtgtgtgcggtggttggagggattttggcacaggaaattgtgaaggccctgtctcagcgggaccctcctcacaacaacttcttcttcttcgatggcatgaaggggaatgggattgtggagtgccttggccccaagtgaactcaagatttggcagccccagagatgccaactgcagcatgcccacctgtattccctgtccccttccttcatgaaggcatctccaggcaaggaaaactgaagtcattggcccgatacaaaacatttcctgcaacgaaggaggtggtgccgacgtgctgcttcccatcaccagcagctgctcgacaaggggcgcagggtggctgtctttgttccagcactgttcaggctgcctgtcatcccgggcctgccagctcccctgagtgatgagcacttccaagcacccctctgccctttctctgtccttatgctgtcccggcctcgccagccctctggggcattgtgggagatgcctgccaggaatgagcaagctctgttgctcgggagcctcttgtcaccttcttggacttattccccacctgataccttatagagaaaagtgtgaattcaggtggagagtaggcccaggccccatgaggcaccagtggaagcacagctccaagttcagacaggtgcccttagagaggaaaaccatgacaggcaaatgcatttcctctggagtttgagaccctgacaaacaacaggtggcatctggtgtgctgttcttgagttttcgtttaggattagttgagttccagctgggttttgggagaaaggagatgctaccaagtcttggatgttagggcgagaccctgcaagttgagtattagagagcttgtctttcaaggcaggttcctggggcttcagggctaggagggaggagcctgcccttttaacagaaccccagtcacatgcggctcaagtcactcagaggctgttgcatttcagggctatgttggtcctttgtttacctcctaaaccacagctgtttgtgtttcacatatgttgtgaattttccttggttctttttaaaggaatgataataaagttacttgctttaggatttgcttgtttttcttccacttcagaagcttctgagagggaatgggatgatcctaccagttgccttttcagacctgaggctctaactcaagagattcctcctctccctcaccattcctgccaccattttttctgggtgatgcagcaagagttaaattgttcacattctagaatgtgtagaagcttctggctccagttgtctaatggataattcagctaaatagtggctattttcagtggcaagaattataataataaagggaagtcaaaagtgatgcttcatatgccccaagtgccacagccgctacgggtcagagcttttattggaagaccaggtttgccttgatgcagccaaagtgcgttccagttcaccccactcttgcttgtgtttcttctttatgtaaattgtgtgatgtttcaataaatcagtctctttcctattctg

SEQ ID NO: 30315 - DNA, 2318 bp, Homo sapiens
  source 1..2318: mol_type = unassigned DNA
atgcgcagaagcactccgggcgtgctgccggcggcggtaggtggcgcgcgggtccggcgggcggttggcttgagcgggaccggagctgaggcaggaagagccggcgccatggtggagaaggaggaggctggcggcggcattagcgaggaggaggcggcacagtatgaccggcagatccgcctgtggggactggaggcccagaaacggctgcgggcctctcgggtgcttcttgtcggcttgaaaggacttggggctgaaattgccaagaatctcatcttggcaggagtgaaaggactgaccatgctggatcacgaacaggtaactccagaagatcccggagctcagttcttgattcgtactgggtctgttggccgaaatagggctgaagcctctttggagcgagctcagaatctcaaccccatggtggatgtgaaggtggacactgaggatatagagaagaaaccagagtcatttttcactcaattcgatgctgtgtgtctgacttgctgctccagggatgtcatagttaaagttgaccagatctgtcacaaaaatagcatcaagttctttacaggagatgtttttggctaccatggatacacatttgccaatctaggagagcatgagtttgtagaggagaaaactaaagttgccaaagttagccaaggagtagaagatgggcccgacaccaagagagcaaaacttgattcttctgagacaacgatggtcaaaaagaaggtggtcttctgccctgttaaagaagccctggaggtggactggagcagtgagaaagcaaaggctgctctgaagcgcacgacctccgactactttctccttcaaggccctgtctcagcgggaccctcctcacaacaacttcttcttcttcgatggcatgaaggggaatgggattgtggagtgccttggccccaagtgaactcaagatttggcagccccagagatgccaactgcagcatgcccacctgtattccctgtccccttccttcatgaaggcatctccaggcaaggaaaactgaagtcattggcccgatacaaaacatttcctgcaacgaaggaggtggtgccgacgtgctgcttcccatcaccagcagctgctcgacaaggggcgcagggtggctgtctttgttccagcactgttcaggctgcctgtcatcccgggcctgccagctcccctgagtgatgagcacttccaagcacccctctgccctttctctgtccttatgctgtcccggcctcgccagccctctggggcattgtgggagatgcctgccaggaatgagcaagctctgttgctcgggagcctcttgtcaccttcttggacttattccccacctgataccttatagagaaaagtgtgaattcaggtggagagtaggcccaggccccatgaggcaccagtggaagcacagctccaagttcagacaggtgcccttagagaggaaaaccatgacaggcaaatgcatttcctctggagtttgagaccctgacaaacaacaggtggcatctggtgtgctgttcttgagttttcgtttaggattagttgagttccagctgggttttgggagaaaggagatgctaccaagtcttggatgttagggcgagaccctgcaagttgagtattagagagcttgtctttcaaggcaggttcctggggcttcagggctaggagggaggagcctgcccttttaacagaaccccagtcacatgcggctcaagtcactcagaggctgttgcatttcagggctatgttggtcctttgtttacctcctaaaccacagctgtttgtgtttcacatatgttgtgaattttccttggttctttttaaaggaatgataataaagttacttgctttaggatttgcttgtttttcttccacttcagaagcttctgagagggaatgggatgatcctaccagttgccttttcagacctgaggctctaactcaagagattcctcctctccctcaccattcctgccaccattttttctgggtgatgcagcaagagttaaattgttcacattctagaatgtgtagaagcttctggctccagttgtctaatggataattcagctaaatagtggctattttcagtggcaagaattataataataaagggaagtcaaaagtgatgcttcatatgccccaagtgccacagccgctacgggtcagagcttttattggaagaccaggtttgccttgatgcagccaaagtgcgttccagttcaccccactcttgcttgtgtttcttctttatgtaaattgtgtgatgtttcaataaatcagtctctttcctattctg

SEQ ID NO: 30316 - DNA, 2210 bp, Homo sapiens
  source 1..2210: mol_type = unassigned DNA
gtaggtggcgcgcgggtccggcgggcggttggcttgagcgggaccggagctgaggcaggaagagccggcgccatggtggagaaggaggaggctggcggcggcattagcgaggaggaggcggcacagtatgaccggcagatccgcctgtggggactggaggcccagaaacggctgcgggcctctcgggtgcttcttgtcggcttgaaaggacttggggctgaaattgccaagaatctcatcttggcaggagtgaaaggactgaccatgctggatcacgaacaggtaactccagaagatcccggagctcagttcttgattcgtactgggtctgttggccgaaatagggctgaagcctctttggagcgagctcagaatctcaaccccatggtggatgtgaaggtggacactgaggatatagagaagaaaccagagtcatttttcactcaattcgatgctgtgtgtctgacttgctgctccagggatgtcatagttaaagttgaccagatctgtcacaaaaatagcatcaagttctttacaggagatgtttttggctaccatggatacacatttgccaatctaggagagcatgagtttgtagaggagaaaactaaagttgccaaagttagccaaggagtagaagatgggcccgacaccaagagagcaaaacttgattcttctgagacaacgatggtcaaaaagaaggtggtcttctgccctgttaaagaagccctggaggtggactggagcagtgagaaagcaaaggctgctctgaagcgcacgacctccgactactttctccttcaagaattgtttcctagaattgttgagagggtttatgcccagagacatcccagaagcactgaacgcactcatgccaagatgttaatacctttcctcactaaagagaaaccagggttccttggagaaatggctgtttccagatctggggtaggaaaattacagtgctcttaaagttccgtacagataaaggaagagatcccagttctgatacatatgaggaagattctgagttgttgctccagatacgaaatgatgtgcttgactcactgggtattagtcctgacctgcttcctgaggactttgtcaggtactgcttctccgagatggccccagtgtgtgcggtggttggagggattttggcacaggaaattgtgaaggccctgtctcagcgggaccctcctcacaacaacttcttcttcttcgatggcatgaaggggaatgggattgtggagtgccttggccccaagtgaactcaagatttggcagccccagagatgccaactgcagcatgcccacctgtattccctgtccccttccttcatgaaggcatctccaggcaaggaaaactgaagtcattggcccgatacaaaacatttcctgcaacgaaggaggtggtgccgacgtgctgcttcccatcaccagcagctgctcgacaaggggcgcagggtggctgtctttgttccagcactgttcaggctgcctgtcatcccgggcctgccagctcccctgagtgatgagcacttccaagcacccctctgccctttctctgtccttatgctgtcccggcctcgccagccctctggggcattgtgggagatgcctgccaggaatgagcaagctctgttgctcgggagcctcttgtcaccttcttggacttattccccacctgataccttatagagaaaagtgtgaattcaggtggagagtaggcccaggccccatgaggcaccagtggaagcacagctccaagttcagacaggtgcccttagagaggaaaaccatgacaggcaaatgcatttcctctggagtttgagaccctgacaaacaacaggtggcatctggtgtgctgttcttgagttttcgtttaggattagttgagttccagctgggttttgggagaaaggagatgctaccaagtcttggatgttagggcgagaccctgcaagttgagtattagagagcttgtctttcaaggcaggttcctggggcttcagggctaggagggaggagcctgcccttttaacagaaccccagtcacatgcggctcaagtcactcagaggctgttgcatttcagggctatgttggtcctttgtttacctcctaaaccacagctgtttgtgtttcacatatgttgtgaattttccttggttctttttaaaggaatgataataaagttacttgctttagg

SEQ ID NO: 30317 - DNA, 941 bp, Homo sapiens
  source 1..941: mol_type = unassigned DNA
actccgggcgtgctgccggcggcggctgcgggcctctcgggtgcttcttgtcggcttgaaaggacttggggctgaaattgccaagaatctcatcttggcaggagtgaaaggactgaccatgctggatcacgaacaggtaactccagaagatcccggagctcagttcttgattcgtactgggtctgttggccgaaatagggctgaagcctctttggagcgagctcagaatctcaaccccatggtggatgtgaaggtggacactgaggatatagagaagaaaccagagtcatttttcactcaattcgatgctggagaaaactaaagttgccaaagttagccaaggagtagaagatgggcccgacaccaagagagcaaaacttgattcttctgagacaacgatggtcaaaaagaaggtggtcttctgccctgttaaagaagccctggaggtggactggagcagtgagaaagcaaaggctgctctgaagcgcacgacctccgactactttctccttcaagtgctcttaaagttccgtacagataaaggaagagatcccagttctgatacatatgaggaagattctgagttgttgctccagatacgaaatgatgtgcttgactcactgggtattagtcctgacctgcttcctgaggactttgtcaggtactgcttctccgagatggccccagtgtgtgcggtggttggagggattttggcacaggaaattgtgaaggccctgtctcagcgggaccctcctcacaacaacttcttcttcttcgatggcatgaaggggaatgggattgtggagtgccttggccccaagtgaactcaagatttggcagccccagagatgccaactgcagcatgcccacctgtattccctgtccccttccttcatgaaggcatctccaggcaaggaaaactgaagtcattggcccgatac

SEQ ID NO: 30318 - DNA, 4838 bp, Homo sapiens
  source 1..4838: mol_type = unassigned DNA
gtggccgccggtggccgttaggctacctgaggccgttccttctggtctctctctcctgggccgcggagagaccgtctccctgccgttacagcaggccccatcccagcgcccagccgtacttggggaaaggccggttgcgattccggggctttcccgccagagctgggtcttctctggggagagctgttttcaccgggaagctcggctttctgtggtaccggcttcatctcccgccttccttgagacccgagtgatatttcttgactacttctgcgtctcacgtaaacatttctccaactctcctactctgtggtatctccctgagatgtgatatcgctagtgccaccatcagaaagaaacgtctggaccctcctgctcaggttatgaaaatccccttaactgccacaatttgcttacctggctcatcgcctcctggactttgtatctttgctaaagtcagtgatgtgaaaagacttgaaatggatgatattgctgataggatgaggatggatgctggagaagtgactttagtgaaccacaactccgtattcaaaacccacctcctgccacaaacaggttttccagaggaccagctttcgctttctgaccagcagattttatcttccaggcaaggacatttggaccgatcttttacatgttccacaagaagtgcagcttataatccaagctattactcagataatccttcctcagacagttttcttggctcaggcgatttaagaacctttggccagagtgcaaatggccaatggagaaattctaccccatcgtcaagctcatctttacaaaaatcaagaaacagccgaagtctttacctcgaaacccgaaagacctcaagtggattatcaaacagttttgcgggaaagtcaaaccatcactgccatgtatctgcatatgaaaaatcttttcctattaaacctgttccaagtccatcttggagtggttcatgtcgtcgaagtcttttgagccccaagaaaactcagaggcgacatgttagtacagcagaagagacagttcaagaagaagaaagagagatttacagacagctgctacagatggtcacagggaaacagtttactatagccaaacccaccacacattttcctttacacctgtctcgatgtcttagttccagtaaaaatactttgaaagactcactgtttaaaaatggaaactcttgtgcatctcagatcattggctctgatacttcatcatctggatctgccagcattttaactaaccaggaacagctgtcccacagtgtatattccctatcttcttataccccagatgttgcatttggatccaaagattctggtactcttcatcatccccatcatcaccactctgttccacatcagccagataacttagcagcttcaaatacacaatctgaaggatcagactctgtgattttactgaaagtgaaagattcccagactccaactcccagttctactttcttccaggcagagctgtggatcaaagaattaactagtgtttatgattctcgagcacgagaaagattgcgccagattgaagaacagaaggcattggccttacagcttcaaaaccagagattgcaggagcgggaacattcagtacatgattcagtagaactacatcttcgtgtacctcttgaaaaggagattcctgttactgttgtccaagaaacacaaaaaaaaggtcataaattaactgatagtgaagatgaatttcctgaaattacagaggaaatggagaaagaaataaagaatgtatttcgtaatgggaatcaggatgaagttctcagtgaagcatttcgcctgaccattacacgcaaagatattcaaactctaaaccatctgaattggctcaatgatgagatcatcaatttctacatgaatatgctgatggagcgaagtaaagagaagggcttgccaagtgtgcatgcatttaatacctttttcttcactaaattaaaaacggctggttatcaggcagtgaaacgttggacaaagaaagtagatgtattttctgttgacattcttttggtgcccattcacctgggagtacactggtgtctagctgttgtggactttagaaagaagaatattacctattacgactccatgggtgggataaacaatgaagcctgcagaatactcttgcaatacctaaagcaagaaagcattgacaagaaaaggaaagagtttgacaccaatggctggcagcttttcagcaagaaaagccaggagattcctcagcagatgaatggaagtgactgtgggatgtttgcctgcaaatatgctgactgtattaccaaagacagaccaatcaacttcacacagcaacacatgccatacttccggaagcggatggtctgggagatcctccaccgaaaactcttgtgaagactgtctcacttagcagaccttgaccatgtgggggaccagctctttgttgtctacagccagagaccttggaaacagctgctcccagccctctgctgttgtaacacccttgatcctggaccaggccctggcgagatgcattcacaagcacatctgcctttccttttgtatctcagatactatttttgcaaagaaactttggtgctgtgaaaggggtgagggacatccctaagctgaagagagagactgcttttcacttcttcagttctgccatcttgttttcaaagggctccagcctcactcagtccctaattatgggactgagaaaagcttggaaagaatcttggtttcatataaattcttgttgttaggccttactaagaagtaggaaagggcatgggcaaaaggtagggataaaaaccaccagcatatacatggacatacacacacacccacacacacaaacacacacacacacacaattttcacgatgtatggtcaggaatgtgactgtaaactggactttggggcccaggcataagtcccttcctccaggacctttcctatttatatgtccctatacaaaatccatctgcttttatacgtagctgttttatcatctgtagcttcatcctatccggaggcacagcacatgagccctggacaggtcccaaagttccaagcagtcctttccgtgaaagcaggggtttgcatgtgctaccaacacatgatacggggaagacccacccagggagcggtttcagtggcgcaacaaagcaccacttttactgttgcctacttctgaccaagaagaaaaaggaccttagtatttagcataaaattccagcgctggatgaatgcagatctagtttggtctgtggctagtttaaatatgtttctaaccacagagaatttcatatatatatacatatatatatacacatacatatatatatatatatatgtatgtataaaatttcacagggatatgcttttttttttaaagactgaatgtgttcaccatttagcctgtagatttatttccattttccaaattccagcacacagagatcccagcccctatgagtagggtgtttgtggactacctaatggaatatttttgaggcctggatgaactttgccatatgggtagaggttacagagggaggtgatattttcagctaaaaaaaaaaacgggtggagtttggactgatcaacttgagatttaaaaactgctattccttttgttctttctagcatctctccccaccctctgagagctcctcaggcttagatagtgaagtgatcaaatgccagtgtcattttgtacttaagttccaaagtaggaacattttatacttttttctgtattgtaataggtagttttgtatgaaatcttttctcctctcccgttgtaccgcattctttccagcattgtgctttttccctgggcttatttgaaaattttactgttttatacaagctcgtttagtacatttttctatgttttaccacaagttacaatttgaaaagaaaactattttttttaaatattccattgttaactgaatgttactgtttccactccagcaactacatgtcctcccttcaactgcctgccttttggggaaagaccaccttttgtgtgtttgttttttctctctctttctttccctttctctttctatctctctttatttttctttctttttctttgtttttgagttttctataggaaataaatagctttctatatatgagttgctggggaccttcacattctcttttagaaagctgtggcatgcagtctcattgcaggactcctggaatattgtctggttcttggtatttactgtatgtaagcaacaacttgaaaggtggcaatatggtgtcgatttggactatgaatcaaaagacctttttcaggttctttcactattgtctgggggactcagaacaagattgttctctgtatttattgtttgtccatttaggtaacatctgtcttaccttcctcacagactttgtacagaccaaagcaacaaatatttattgccatgtatagcagaaaatgaaacatgcaacaaaagcactttgaaaaatatataaggaattgttgagcctgtctgaatttgggccccctttctgactaatgcagttttgcacaaggtagaagttagtgaccctgagaccatcttaccaccctggacctggtccaaatacagacttacacagtggaccattctttcctgagctagccaacaagagcaggagtagtatctggaaactttcccctttgtttaggggtaggctttgatgaccaggaaaaaaaaaaaggtatttctgcattttatggcccaaaggcatgttattaatatcttatgtaatttactttaaactaaataagacttttttctcctgtgt

SEQ ID NO: 30319 - DNA, 4969 bp, Homo sapiens
  source 1..4969: mol_type = unassigned DNA
gtggccgccggtggccgttaggctacctgaggccgttccttctggtctctctctcctgggccgcggagagaccgtctccctgccgttacagcaggccccatcccagcgcccagccgtacttggggaaaggccggttgcgattccggggctttcccgccagagctgggtcttctctggggagagctgttttcaccgggaagctcggctttctgtggtaccggcttcatctcccgccttccttgagacccgagtgatatttcttgactacttctgcgtctcacgtaaacatttctccaactctcctactctgtggtatctccctgagatgtgatatcgctagtgccaccatcagaaagaaacgtctggaccctcctgctcaggttatgaaaatccccttaactgccacaatttgcttacctggctcatcgcctcctggactttgtatctttgctaaagtcagtgatgtgaaaagacttgaaatggatgatattgctgataggatgaggatggatgctggagaagtgactttagtgaaccacaactccgtattcaaaacccacctcctgccacaaacaggttttccagaggaccagctttcgctttctgaccagcagattttatcttccaggcaaggacatttggaccgatcttttacatgttccacaagaagtgcagcttataatccaagctattactcaggcccaggcctgggagtgcttgcaagatatagttggggtaaaatgttgacttttggtggacaccacggagtcacattgatgcagataaggcacatggctgtggcaggattcagctccttcatcaattttcagataatccttcctcagacagttttcttggctcaggcgatttaagaacctttggccagagtgcaaatggccaatggagaaattctaccccatcgtcaagctcatctttacaaaaatcaagaaacagccgaagtctttacctcgaaacccgaaagacctcaagtggattatcaaacagttttgcgggaaagtcaaaccatcactgccatgtatctgcatatgaaaaatcttttcctattaaacctgttccaagtccatcttggagtggttcatgtcgtcgaagtcttttgagccccaagaaaactcagaggcgacatgttagtacagcagaagagacagttcaagaagaagaaagagagatttacagacagctgctacagatggtcacagggaaacagtttactatagccaaacccaccacacattttcctttacacctgtctcgatgtcttagttccagtaaaaatactttgaaagactcactgtttaaaaatggaaactcttgtgcatctcagatcattggctctgatacttcatcatctggatctgccagcattttaactaaccaggaacagctgtcccacagtgtatattccctatcttcttataccccagatgttgcatttggatccaaagattctggtactcttcatcatccccatcatcaccactctgttccacatcagccagataacttagcagcttcaaatacacaatctgaaggatcagactctgtgattttactgaaagtgaaagattcccagactccaactcccagttctactttcttccaggcagagctgtggatcaaagaattaactagtgtttatgattctcgagcacgagaaagattgcgccagattgaagaacagaaggcattggccttacagcttcaaaaccagagattgcaggagcgggaacattcagtacatgattcagtagaactacatcttcgtgtacctcttgaaaaggagattcctgttactgttgtccaagaaacacaaaaaaaaggtcataaattaactgatagtgaagatgaatttcctgaaattacagaggaaatggagaaagaaataaagaatgtatttcgtaatgggaatcaggatgaagttctcagtgaagcatttcgcctgaccattacacgcaaagatattcaaactctaaaccatctgaattggctcaatgatgagatcatcaatttctacatgaatatgctgatggagcgaagtaaagagaagggcttgccaagtgtgcatgcatttaatacctttttcttcactaaattaaaaacggctggttatcaggcagtgaaacgttggacaaagaaagtagatgtattttctgttgacattcttttggtgcccattcacctgggagtacactggtgtctagctgttgtggactttagaaagaagaatattacctattacgactccatgggtgggataaacaatgaagcctgcagaatactcttgcaatacctaaagcaagaaagcattgacaagaaaaggaaagagtttgacaccaatggctggcagcttttcagcaagaaaagccaggagattcctcagcagatgaatggaagtgactgtgggatgtttgcctgcaaatatgctgactgtattaccaaagacagaccaatcaacttcacacagcaacacatgccatacttccggaagcggatggtctgggagatcctccaccgaaaactcttgtgaagactgtctcacttagcagaccttgaccatgtgggggaccagctctttgttgtctacagccagagaccttggaaacagctgctcccagccctctgctgttgtaacacccttgatcctggaccaggccctggcgagatgcattcacaagcacatctgcctttccttttgtatctcagatactatttttgcaaagaaactttggtgctgtgaaaggggtgagggacatccctaagctgaagagagagactgcttttcacttcttcagttctgccatcttgttttcaaagggctccagcctcactcagtccctaattatgggactgagaaaagcttggaaagaatcttggtttcatataaattcttgttgttaggccttactaagaagtaggaaagggcatgggcaaaaggtagggataaaaaccaccagcatatacatggacatacacacacacccacacacacaaacacacacacacacacaattttcacgatgtatggtcaggaatgtgactgtaaactggactttggggcccaggcataagtcccttcctccaggacctttcctatttatatgtccctatacaaaatccatctgcttttatacgtagctgttttatcatctgtagcttcatcctatccggaggcacagcacatgagccctggacaggtcccaaagttccaagcagtcctttccgtgaaagcaggggtttgcatgtgctaccaacacatgatacggggaagacccacccagggagcggtttcagtggcgcaacaaagcaccacttttactgttgcctacttctgaccaagaagaaaaaggaccttagtatttagcataaaattccagcgctggatgaatgcagatctagtttggtctgtggctagtttaaatatgtttctaaccacagagaatttcatatatatatacatatatatatacacatacatatatatatatatatatgtatgtataaaatttcacagggatatgcttttttttttaaagactgaatgtgttcaccatttagcctgtagatttatttccattttccaaattccagcacacagagatcccagcccctatgagtagggtgtttgtggactacctaatggaatatttttgaggcctggatgaactttgccatatgggtagaggttacagagggaggtgatattttcagctaaaaaaaaaaacgggtggagtttggactgatcaacttgagatttaaaaactgctattccttttgttctttctagcatctctccccaccctctgagagctcctcaggcttagatagtgaagtgatcaaatgccagtgtcattttgtacttaagttccaaagtaggaacattttatacttttttctgtattgtaataggtagttttgtatgaaatcttttctcctctcccgttgtaccgcattctttccagcattgtgctttttccctgggcttatttgaaaattttactgttttatacaagctcgtttagtacatttttctatgttttaccacaagttacaatttgaaaagaaaactattttttttaaatattccattgttaactgaatgttactgtttccactccagcaactacatgtcctcccttcaactgcctgccttttggggaaagaccaccttttgtgtgtttgttttttctctctctttctttccctttctctttctatctctctttatttttctttctttttctttgtttttgagttttctataggaaataaatagctttctatatatgagttgctggggaccttcacattctcttttagaaagctgtggcatgcagtctcattgcaggactcctggaatattgtctggttcttggtatttactgtatgtaagcaacaacttgaaaggtggcaatatggtgtcgatttggactatgaatcaaaagacctttttcaggttctttcactattgtctgggggactcagaacaagattgttctctgtatttattgtttgtccatttaggtaacatctgtcttaccttcctcacagactttgtacagaccaaagcaacaaatatttattgccatgtatagcagaaaatgaaacatgcaacaaaagcactttgaaaaatatataaggaattgttgagcctgtctgaatttgggccccctttctgactaatgcagttttgcacaaggtagaagttagtgaccctgagaccatcttaccaccctggacctggtccaaatacagacttacacagtggaccattctttcctgagctagccaacaagagcaggagtagtatctggaaactttcccctttgtttaggggtaggctttgatgaccaggaaaaaaaaaaaggtatttctgcattttatggcccaaaggcatgttattaatatcttatgtaatttactttaaactaaataagacttttttctcctgtgt

SEQ ID NO: 30320 - DNA, 4726 bp, Homo sapiens
  source 1..4726: mol_type = unassigned DNA
cctgctgtccggtggccgcgctgtggccgccggtggccgttaggctacctgaggccgttccttctggtctctctctcctgggccgcggagagaccgtctccctgccgttacagcaggccccatcccagcgcccagccgtacttggggaaaggccggttgcgattccggggctttcccgccagagctgggtcttctctggggagagctgttttcaccgggaagctcggctttctgtggtaccggcttcatctcccgccttccttgagacccgagtgatatttcttgactacttctgcgtctcacgtaaacatttctccaactctcctactctgtggtatctccctgagatgtgatatcgctagtgccaccatcagaaagaaacgtctggaccctcctgctcaggactttgtatctttgctaaagtcagtgatgtgaaaagacttgaaatggatgatattgctgataggatgaggatggatgctggagaagtgactttagtgaaccacaactccgtattcaaaacccacctcctgccacaaacaggttttccagaggaccagctttcgctttctgaccagcagattttatcttccaggcaaggacatttggaccgatcttttacatgttccacaagaagtgcagcttataatccaagctattactcagataatccttcctcagacagttttcttggctcaggcgatttaagaacctttggccagagtgcaaatggccaatggagaaattctaccccatcgtcaagctcatctttacaaaaatcaagaaacagccgaagtctttacctcgaaacccgaaagacctcaagtggattatcaaacagttttgcgggaaagtcaaaccatcactgccatgtatctgcatatgaaaaatcttttcctattaaacctgttccaagtccatcttggagtggttcatgtcgtcgaagtcttttgagccccaagaaaactcagaggcgacatgttagtacagcagaagagacagttcaagaagaagaaagagagatttacagacagctgctacagatggtcacagggaaacagtttactatagccaaacccaccacacattttcctttacacctgtctcgatgtcttagttccagtaaaaatactttgaaagactcactgtttaaaaatggaaactcttgtgcatctcagatcattggctctgatacttcatcatctggatctgccagcattttaactaaccaggaacagctgtcccacagtgtatattccctatcttcttataccccagatgttgcatttggatccaaagattctggtactcttcatcatccccatcatcaccactctgttccacatcagccagataacttagcagcttcaaatacacaatctgaaggatcagactctgtgattttactgaaagtgaaagattcccagactccaactcccagttctactttcttccaggcagagctgtggatcaaagaattaactagtgtttatgattctcgagcacgagaaagattgcgccagattgaagaacagaaggcattggccttacagcttcaaaaccagagattgcaggagcgggaacattcagtacatgattcagtagaactacatcttcgtgtacctcttgaaaaggagattcctgttactgttgtccaagaaacacaaaaaaaaggtcataaattaactgatagtgaagatgaatttcctgaaattacagaggaaatggagaaagaaataaagaatgtatttcgtaatgggaatcaggatgaagttctcagtgaagcatttcgcctgaccattacacgcaaagatattcaaactctaaaccatctgaattggctcaatgatgagatcatcaatttctacatgaatatgctgatggagcgaagtaaagagaagggcttgccaagtgtgcatgcatttaatacctttttcttcactaaattaaaaacggctggttatcaggcagtgaaacgttggacaaagaaagtagatgtattttctgttgacattcttttggtgcccattcacctgggagtacactggtgtctagctgttgtggactttagaaagaagaatattacctattacgactccatgggtgggataaacaatgaagcctgcagaatactcttgcaatacctaaagcaagaaagcattgacaagaaaaggaaagagtttgacaccaatggctggcagcttttcagcaagaaaagccagattcctcagcagatgaatggaagtgactgtgggatgtttgcctgcaaatatgctgactgtattaccaaagacagaccaatcaacttcacacagcaacacatgccatacttccggaagcggatggtctgggagatcctccaccgaaaactcttgtgaagactgtctcacttagcagaccttgaccatgtgggggaccagctctttgttgtctacagccagagaccttggaaacagctgctcccagccctctgctgttgtaacacccttgatcctggaccaggccctggcgagatgcattcacaagcacatctgcctttccttttgtatctcagatactatttttgcaaagaaactttggtgctgtgaaaggggtgagggacatccctaagctgaagagagagactgcttttcacttcttcagttctgccatcttgttttcaaagggctccagcctcactcagtccctaattatgggactgagaaaagcttggaaagaatcttggtttcatataaattcttgttgttaggccttactaagaagtaggaaagggcatgggcaaaaggtagggataaaaaccaccagcatatacatggacatacacacacacccacacacacaaacacacacacacacacaattttcacgatgtatggtcaggaatgtgactgtaaactggactttggggcccaggcataagtcccttcctccaggacctttcctatttatatgtccctatacaaaatccatctgcttttatacgtagctgttttatcatctgtagcttcatcctatccggaggcacagcacatgagccctggacaggtcccaaagttccaagcagtcctttccgtgaaagcaggggtttgcatgtgctaccaacacatgatacggggaagacccacccagggagcggtttcagtggcgcaacaaagcaccacttttactgttgcctacttctgaccaagaagaaaaaggaccttagtatttagcataaaattccagcgctggatgaatgcagatctagtttggtctgtggctagtttaaatatgtttctaaccacagagaatttcatatatatatacatatatatatacacatacatatatatatatatatatgtatgtataaaatttcacagggatatgcttttttttttaaagactgaatgtgttcaccatttagcctgtagatttatttccattttccaaattccagcacacagagatcccagcccctatgagtagggtgtttgtggactacctaatggaatatttttgaggcctggatgaactttgccatatgggtagaggttacagagggaggtgatattttcagctaaaaaaaaaaacgggtggagtttggactgatcaacttgagatttaaaaactgctattccttttgttctttctagcatctctccccaccctctgagagctcctcaggcttagatagtgaagtgatcaaatgccagtgtcattttgtacttaagttccaaagtaggaacattttatacttttttctgtattgtaataggtagttttgtatgaaatcttttctcctctcccgttgtaccgcattctttccagcattgtgctttttccctgggcttatttgaaaattttactgttttatacaagctcgtttagtacatttttctatgttttaccacaagttacaatttgaaaagaaaactattttttttaaatattccattgttaactgaatgttactgtttccactccagcaactacatgtcctcccttcaactgcctgccttttggggaaagaccaccttttgtgtgtttgttttttctctctctttctttccctttctctttctatctctctttatttttctttctttttctttgtttttgagttttctataggaaataaatagctttctatatatgagttgctggggaccttcacattctcttttagaaagctgtggcatgcagtctcattgcaggactcctggaatattgtctggttcttggtatttactgtatgtaagcaacaacttgaaaggtggcaatatggtgtcgatttggactatgaatcaaaagacctttttcaggttctttcactattgtctgggggactcagaacaagattgttctctgtatttattgtttgtccatttaggtaacatctgtcttaccttcctcacagactttgtacagaccaaagcaacaaatatttattgccatgtatagcagaaaatgaaacatgcaacaaaagcactttgaaaaatatataaggaattgttgagcctgtctgaatttgggccccctttctgactaatgcagttttgcacaaggtagaagttagtgaccctgagaccatcttaccaccctggacctggtccaaatacagacttacacagtggaccattctttcctgagctagccaacaagagcaggagtagtatctggaaactttcccctttgtttaggggtaggctttgatgaccaggaaaaaaaaaaaggtatttctgca

SEQ ID NO: 30321 - DNA, 2260 bp, Homo sapiens
  source 1..2260: mol_type = unassigned DNA
attccgagtacgagaaagcgaaaaagcccagactgaaaagggtactgagaaattacgactagtcttaaatgctcccttcgcttctcgggcctcgccacaccgcgcaggcgccccactggtccttaactctgttctttgacctcctgccccagccccctcctcttcagccacctagcgactcttccggtgctgtgaaggcggttccggttcgcggcggttcccgggttttgcgttccgcgcccggccggaaaccccttcgcatggcagccggttccggttcggactttgtatctttgctaaagtcagtgatgtgaaaagacttgaaatggatgatattgctgataggatgaggatggatgctggagaagtgactttagtgaaccacaactccgtattcaaaacccacctcctgccacaaacaggttttccagaggaccagctttcgctttctgaccagcagattttatcttccaggcaaggacatttggaccgatcttttacatgttccacaagaagtgcagcttataatccaagctattactcagataatccttcctcagacagttttcttggctcaggcgatttaagaacctttggccagagtgcaaatggccaatggagaaattctaccccatcgtcaagctcatctttacaaaaatcaagaaacagccgaagtctttacctcgaaacccgaaagacctcaagtggattatcaaacagttttgcgggaaagtcaaaccatcactgccatgtatctgcatatgaaaaatcttttcctattaaacctgttccaagtccatcttggagtggttcatgtcgtcgaagtcttttgagccccaagaaaactcagaggcgacatgttagtacagcagaagagacagttcaagaagaagaaagagagatttacagacagctgctacagatggtcacagggaaacagtttactatagccaaacccaccacacattttcctttacacctgtctcgatgtcttagttccagtaaaaatactttgaaagactcactgtttaaaaatggaaactcttgtgcatctcagatcattggctctgatacttcatcatctggatctgccagcattttaactaaccaggaacagctgtcccacagtgtatattccctatcttcttataccccagatgttgcatttggatccaaagattctggtactcttcatcatccccatcatcaccactctgttccacatcagccagataacttagcagcttcaaatacacaatctgaaggatcagactctgtgattttactgaaagtgaaagattcccagactccaactcccagttctactttcttccaggcagagctgtggatcaaagaattaactagtgtttatgattctcgagcacgagaaagattgcgccagattgaagaacagaaggcattggccttacagcttcaaaaccagagattgcaggagcgggaacattcagtacatgattcagtagaactacatcttcgtgtacctcttgaaaaggagattcctgttactgttgtccaagaaacacaaaaaaaaggtcataaattaactgatagtgaagatgaatttcctgaaattacagaggaaatggagaaagaaataaagaatgtatttcgtaatgggaatcaggatgaagttctcagtgaagcatttcgcctgaccattacacgcaaagatattcaaactctaaaccatctgaattggctcaatgatgagatcatcaatttctacatgaatatgctgatggagcgaagtaaagagaagggcttgccaagtgtgcatgcatttaatacctttttcttcactaaattaaaaacggctggttatcaggcagtgaaacgttggacaaagaaagtagatgtattttctgttgacattcttttggtgcccattcacctgggagtacactggtgtctagctgttgtggactttagaaagaagaatattacctattacgactccatgggtgggataaacaatgaagcctgcagaatactcttgcaatacctaaagcaagaaagcattgacaagaaaaggaaagagtttgacaccaatggctggcagcttttcagcaagaaaagccaggagattcctcagcagatgaatggaagtgactgtgggatgtttgcctgcaaatatgctgactgtattaccaaagacagaccaatcaacttcacacagcaacacatgccatacttccggaagcggatggtctgggagatcctccaccgaaaactcttgtga

SEQ ID NO: 30322 - DNA, 1932 bp, Homo sapiens
  source 1..1932: mol_type = unassigned DNA
atggatgatattgctgataggatgaggatggatgctggagaagtgactttagtgaaccacaactccgtattcaaaacccacctcctgccacaaacaggttttccagaggaccagctttcgctttctgaccagcagattttatcttccaggcaaggacatttggaccgatcttttacatgttccacaagaagtgcagcttataatccaagctattactcagataatccttcctcagacagttttcttggctcaggcgatttaagaacctttggccagagtgcaaatggccaatggagaaattctaccccatcgtcaagctcatctttacaaaaatcaagaaacagccgaagtctttacctcgaaacccgaaagacctcaagtggattatcaaacagttttgcgggaaagtcaaaccatcactgccatgtatctgcatatgaaaaatcttttcctattaaacctgttccaagtccatcttggagtggttcatgtcgtcgaagtcttttgagccccaagaaaactcagaggcgacatgttagtacagcagaagagacagttcaagaagaagaaagagagatttacagacagctgctacagatggtcacagggaaacagtttactatagccaaacccaccacacattttcctttacacctgtctcgatgtcttagttccagtaaaaatactttgaaagactcactgtttaaaaatggaaactcttgtgcatctcagatcattggctctgatacttcatcatctggatctgccagcattttaactaaccaggaacagctgtcccacagtgtatattccctatcttcttataccccagatgttgcatttggatccaaagattctggtactcttcatcatccccatcatcaccactctgttccacatcagccagataacttagcagcttcaaatacacaatctgaaggatcagactctgtgattttactgaaagtgaaagattcccagactccaactcccagttctactttcttccaggcagagctgtggatcaaagaattaactagtgtttatgattctcgagcacgagaaagattgcgccagattgaagaacagaaggcattggccttacagcttcaaaaccagagattgcaggagcgggaacattcagtacatgattcagtagaactacatcttcgtgtacctcttgaaaaggagattcctgttactgttgtccaagaaacacaaaaaaaaggtcataaattaactgatagtgaagatgaatttcctgaaattacagaggaaatggagaaagaaataaagaatgtatttcgtaatgggaatcaggatgaagttctcagtgaagcatttcgcctgaccattacacgcaaagatattcaaactctaaaccatctgaattggctcaatgatgagatcatcaatttctacatgaatatgctgatggagcgaagtaaagagaagggcttgccaagtgtgcatgcatttaatacctttttcttcactaaattaaaaacggctggttatcaggcagtgaaacgttggacaaagaaagtagatgtattttctgttgacattcttttggtgcccattcacctgggagtacactggtgtctagctgttgtggactttagaaagaagaatattacctattacgactccatgggtgggataaacaatgaagcctgcagaatactcttgcaatacctaaagcaagaaagcattgacaagaaaaggaaagagtttgacaccaatggctggcagcttttcagcaagaaaagccagattcctcagcagatgaatggaagtgactgtgggatgtttgcctgcaaatatgctgactgtattaccaaagacagaccaatcaacttcacacagcaacacatgccatacttccggaagcggatggtctgggagatcctccaccgaaaactcttgtga

SEQ ID NO: 30323 - DNA, 4088 bp, Homo sapiens
  source 1..4088: mol_type = unassigned DNA
gaggccgttccttctggtctctctctcctgggccgcggagagaccgtctccctgccgttacagcaggccccatcccagcgcccagccgtacttggggaaaggccggttgcgattccggggctttcccgccagagctgggtcttctctggggagagctgttttcaccgggaagctcggctttctgtggtaccggcttcatctcccgccttccttgagacccgagtgatatttcttgactacttctgcgtctcacgtaaacatttctccaactctcctactctgtggtatctccctgagatgtgatatcgctagtgccaccatcagaaagaaacgtctggaccctcctgctcaggactttgtatctttgctaaagtcagtgatgtgaaaagacttgaaatggatgatattgctgataggatgaggatggatgctggagaagtgactttagtgaaccacaactccgtattcaaaacccacctcctgccacaaacaggttttccagaggaccagctttcgctttctgaccagcagattttatcttccaggcaaggacatttggaccgatcttttacatgttccacaagaagtgcagcttataatccaagctattactcagataatccttcctcagacagttttcttggctcaggcgatttaagaacctttggccagagtgcaaatggccaatggagaaattctaccccatcgtcaagctcatctttacaaaaatcaagaaacagccgaagtctttacctcgaaacccgaaagacctcaagtggattatcaaacagttttgcgggaaagtcaaaccatcactgccatgtatctgcatatgaaaaatcttttcctattaaacctgttccaagtccatcttggagtggttcatgtcgtcgaagtcttttgagccccaagaaaactcagaggcgacatgttagtacagcagaagagacagttcaagaagaagaaagagagatttacagacagctgctacagatggtcacagggaaacagtttactatagccaaacccaccacacattttcctttacacctgtctcgatgtcttagttccagtaaaaatactttgaaagactcactgtttaaaaatggaaactcttgtgcatctcagatcattggctctgatacttcatcatctggatctgccagcattttaactaaccaggaacagctgtcccacagtgtatattccctatcttcttataccccagatgttgcatttggatccaaagattctggtactcttcatcatccccatcatcaccactctgttccacatcagccagataacttagcagcttcaaatacacaatctgaaggatcagactctgtgattttactgaaagtgaaagattcccagactccaactcccagttctactttcttccaggcagagctgtggatcaaagaattaactagtgtttatgattctcgagcacgagaaagattgcgccagattgaagaacagaaggcattggccttacagcttcaaaaccagagattgcaggagcgggaacattcagtacatgattcagtagaactacatcttcgtgtacctcttgaaaaggagattcctgttactgttgtccaagaaacacaaaaaaaaggtcataaattaactgatagtgaagatgaatttcctgaaattacagaggaaatggagaaagaaataaagaatgtatttcgtaatgggaatcaggatgaagttctcagtgaagcatttcgcctgaccattacacgcaaagatattcaaactctaaaccatctgaattggctcaatgatgagatcatcaatttctacatgaatatgctgatggagcgaagtaaagagaagggcttgccaagtgtgcatgcatttaatacctttttcttcactaaattaaaaacggctggttatcaggcagtgaaacgttggacaaagaaagtagatgtattttctgttgacattcttttggtgcccattcacctgggagtacactggtgtctagctgttgtggactttagaaagaagaatattacctattacgactccatgggtgggataaacaatgaagcctgcagaatactcttgcaatacctaaagcaagaaagcattgacaagaaaaggaaagagtttgacaccaatggctggcagcttttcagcaagaaaagccaggagattcctcagcagatgaatggaagtgactgtgggatgtttgcctgcaaatatgctgactgtattaccaaagacagaccaatcaacttcacacagcaacacatgccatacttccggaagcggatggtctgggagatcctccaccgaaaactcttgtgaagactgtctcacttagcagaccttgaccatgtgggggaccagctctttgttgtctacagccagagaccttggaaacagctgctcccagccctctgctgttgtaacacccttgatcctggaccaggccctggcgagatgcattcacaagcacatctgcctttccttttgtatctcagatactatttttgcaaagaaactttggtgctgtgaaaggggtgagggacatccctaagctgaagagagagactgcttttcacttcttcagttctgccatcttgttttcaaagggctccagcctcactcagtccctaattatgggactgagaaaagcttggaaagaatcttggtttcatataaattcttgttgttaggccttactaagaagtaggaaagggcatgggcaaaaggtagggataaaaaccaccagcatatacatggacatacacacacacccacacacacaaacacacacacacacacaattttcacgatgtatggtcaggaatgtgactgtaaactggactttggggcccaggcataagtcccttcctccaggacctttcctatttatatgtccctatacaaaatccatctgcttttatacgtagctgttttatcatctgtagcttcatcctatccggaggcacagcacatgagccctggacaggtcccaaagttccaagcagtcctttccgtgaaagcaggggtttgcatgtgctaccaacacatgatacggggaagacccacccagggagcggtttcagtggcgcaacaaagcaccacttttactgttgcctacttctgaccaagaagaaaaaggaccttagtatttagcataaaattccagcgctggatgaatgcagatctagtttggtctgtggctagtttaaatatgtttctaaccacagagaatttcatatatatatacatatatatatacacatacatatatatatatatatatgtatgtataaaatttcacagggatatgcttttttttttaaagactgaatgtgttcaccatttagcctgtagatttatttccattttccaaattccagcacacagagatcccagcccctatgagtagggtgtttgtggactacctaatggaatatttttgaggcctggatgaactttgccatatgggtagaggttacagagggaggtgatattttcagctaaaaaaaaaaacgggtggagtttggactgatcaacttgagatttaaaaactgctattccttttgttctttctagcatctctccccaccctctgagagctcctcaggcttagatagtgaagtgatcaaatgccagtgtcattttgtacttaagttccaaagtaggaacattttatacttttttctgtattgtaataggtagttttgtatgaaatcttttctcctctcccgttgtaccgcattctttccagcattgtgctttttccctgggcttatttgaaaattttactgttttatacaagctcgtttagtacatttttctatgttttaccacaagttacaatttgaaaagaaaactattttttttaaatattccattgttaactgaatgttactgtttccactccagcaactacatgtcctcccttcaactgcctgccttttggggaaagaccaccttttgtgtgtttgttttttctctctctttctttccctttctctttctatctctctttatttttctttctttttctttgtttttgagttttctataggaaataaatagctttctatata

SEQ ID NO: 30324 - DNA, 6308 bp, Homo sapiens
  source 1..6308: mol_type = unassigned DNA
gcaggcggaagggcgcggaggaggtgacgcgataggccagcgccggcgtcgcggcagccgcttcagaggaagctcggcggctgtggccgcggcgaacaggccggacgcctcgtcgctggcggggcttcccttggagctgacgaaggcggggtccgcggtccaggctgctgccgcgacggggccggcggcggggcagctgccaggaacgagggtagcagctgcatccagatctcattatgcatcagaaaaatgaaaaaacagaggaaaattctatggaggaaaggaatccacttagccttttctgagaaatggaatactgggtttggaggctttaagaagttttattttcaccaacacttgtgcattctgaaagctaagctgggaaggccagttacttggaatagacagttgagacatttccagggtagaaagaaagctcttcaaatccagaaaacgtggatcaaggatgaacccctttgtgctaagaccaagttcaatgtggctactcaaaatgttagtactttgtcctctaaagtgaaaagaaaggacgctaaacacttcatttcctcctcaaagactctcctgagactccaagcagagaagctgttgtcatcagcaaagaattctgaccatgaatactgcagagagaaaaatctcttgaaggcagttactgactttccatcaaatagtgctttaggtcaggccaatggtcacagacctaggacagacccacaaccttctgactttcccatgaagttcaatggggagagccaaagtccaggtgagagtggcacgattgtggtcaccttgaacaaccataagagaaagggcttttgttacggctgctgccaagggccggagcaccacaggaatgggggacccttgattccaaaaaagttccaacttaaccaacatagaaggataaaattatctcctcttatgatgtatgagaaattatccatgattagatttcggtacaggattctcagatcccagcacttcagaaccaaaagcaaggtttgcaagctaagaaaagcccagcgaagctgggtacagaaagtcactggggaccatcaagagacccgtagggagaacggtgagggtggcagttgcagcccatttccttccccagaacctaaagacccttcttgtcggcatcagccgtactttccagatatggacagcagtgctgtggtgaaggggacgaactctcatgtgcctgattgccacactaaaggaagctctttcttgggcaaggagcttagtttagacgaagcattccctgaccaacagaatggcagtgccacaaacgcctgggaccagtcatcctgttcttctcctaagtgggagtgtacagagctgattcatgacatccccttaccagaacatcgttctaataccatgttcatttcagaaactgaaagagaaattatgactctgggtcaggaaaatcagacaagttctgtcagtgatgacagagtaaaactgtcagtgtctggagcagatacatctgtgagtagcgtagatgggcctgtgtcccaaaaggctgttcaaaatgagaactcataccagatggaggaggatggatctctcaagcagagcattcttagttctgagttgctggaccacccttactgtaaaagtccactggaggctcccttggtgtgcagtggactcaaactagaaaatcaagtaggaggtggaaagaacagtcagaaagcctctccagtggatgatgaacagctgtcagtctgtctttctggattcctagatgaggttatgaagaagtatggcagtttggttccactcagtgaaaaagaagtccttggaagattaaaagatgtctttaatgaagacttttctaatagaaaaccatttatcaatagggaaataacaaactatcgggccagacatcaaaaatgtaacttccgtatcttctataataaacacatgctggatatggacgacctggcgactctggatggtcagaactggctgaatgaccaggtcattaatatgtatggtgagctgataatggatgcagtcccagacaaagttcacttcttcaacagcttttttcatagacagctggtaaccaaaggatataatggagtaaaaagatggactaaaaaggtggatttgtttaaaaagagtcttctgttgattcctattcacctggaagtccactggtctctcattactgtgacactctctaatcgaattatttcattttatgattcccaaggcattcattttaagttttgtgtagagaatataagaaagtatttgctgactgaagccagagaaaaaaatagacctgaatttcttcagggttggcagactgctgttacgaagtgtattccacaacagaaaaacgacagtgactgtggagtctttgtgctccagtactgcaagtgcctcgccttagagcagcctttccagttttcacaagaagacatgccccgagtgcggaagaggatttacaaggagctatgtgagtgccggctcatggactgaaactcagcagggactctgggaagtctgaccaagttggagcagatggtttgttacttgaatctccaaacacttagttgaatttttacagatatttcagatcagtggtgttgggccactattgttacctcaaatttattttttgcccttattcatttctccagctaccatgtactattgtttaatgttcagtttggtttcatttttaattttatggttctgtgcgtcccccatatttaatatttattattcaaacgcatgcatatagacagagcatgcagtgaagagtattaaaaaaaaaagcttagtagatttggtgcagcttttgaaacttagttagacgtgaactgaatacaggtttcaaatttactcccagaacctaaaaatgcaagatgtttttgatacaacataactctgagaatagtaagtgttccctggggcattaagggtagctgggggtggttttgacaaatccagtcctgttttactttaccagcggcaactttcaccaacttccctctccaagtgagtcttagagagtgcagtccattccttttgaagggtgagatggaagtggtcgtaaactgactggtgtcttctgtttctggaggcacacttgtaagcacagtggctgctttgggaggagtaaggtgtgagaaaaagcaaccttggaggccagtaacaatgacagatttcaatcgtggttttaggaattataatacgtggcatacatctcataaaggcttttgctgggatattgaattccctgaatttttctgttttcgacctgttaaaaaaatcttaacatccatcaaactagtggtcaaacaaatgagaatgcagctgttctcagagtaatttttaagttgtcatttccctgtgttgcctcccaattggaagaagttaaggtttaccaaatgcatttctatttcaagggtatctgaaacgtaaacattcaaaactgaaggctgactgacttgagatgttttgcaggtggctggagagaagagggaaggtaatagagacaacttagtcccatgggagcgcagcaaccgtgtcaggttctttctcctgtcccattagtgacctcagtaacatgcagggtacgtctggcttctgcatggccagtgctgacactagcacagctgttcttctccttctgttgaacctcatcttctgaagaaaggccaagtggcccttgtccatacacttagctgcattaggatgaatatcacgcgtctcacatctttaatccagcctttcgtgacatgttggaaagatacatgtgaaacctacccagttaccctttctgaattgggaggaaaaccaaccaatgtatgtatgagaaactcagaagtctgaatagaaaaacaaagtaaatggcagaagattctcgagtttatgcccgcgtaggtttggagtgttgaaaaagctaaaatgtttagtttcacttggccctgaggtatggttgagaaggctgactgccagcagttgaggattgagtccgaccatgtttacatgcagggttcccaacaccagtggtgacactgggaagcagccccagcactttcctctcctgagtcctccagacccaaaatccttaatgtcaaaccaggtcagtgtttcttactgtgtttcaagtcgttaaaaagactgagagtagaggcactttatgctgctataggtggggttctgtcagcgttaggaaaaaatgacagtttagggtaaggaagatctcataatgagtttttcaaacataattatgcaaacatgagatttttcaaaacatgccagaaatttgcctctgattttttttttttttttttttttttttttgtgggggtgtggtataccaaagtagccagtcactgggctgtcagttcaaaatgtcttgtacttcagagtgaggaagtgtttcagttcctcagtgacagaacctggcatgcagaagagacagaattgttcctgtaagaaaatcaacgccgagagagagctgcccaaatccagtgactcttccacttccagtctcatgcttcatagggcaccttgaggtgtgctgcccagtgtggcttagactaaatgttgagtttgggttttttgtttttttttttttttgagtcagagtctcactgtccctcaggctggagtgcaatggcgcaatcttgcctcactgcaacctccacctcccaggttcaagcgattctcctgcctcagcctcccaagtagctgggattacaggtgtgtgccaccacgccccaccgatttttgtacttttagtagagacaggatttcaccatgttggccaggctggtcttgaactcctgacctcaagtgatctgcccgcctgggcctcccaaagtgctgggattacaggcgggagccaccgtgcctggccaatgttaagtattttaaaagtcattttaaaatatttgtcattgatgaaacttggtttcagcacacgtaattgctttccctctcttcttgtgattaggtgtaaacctctatttaactcaagtcctagattagaatgtcctttgtcctgatgtttgcagtaattgcttccttggttaataaagatatttttgaaatatactctggactgttggtgaaagaggcaggcatggctttactggtactagtttggcactgaactgtttgggtgcccatgaggtaggcagaccttatgctttttttttttgagacggagtcttgctctgttgcccaggctggagtgcagtgatgtgatctcggctcactgcaacccctgcctcccaggttcaagtgattctcctgcctcagcttccccaatagctgggactacaggtgtgcgccaccactcccagctaatttttgtatttttagtagagacagggttttgccatgttggtcaggctggtctcggaactcctgacctcaggtgatccacccgcctctgcctcacaaagtgctgggattacaggcatgagctaccgtgcctggcctaaaccttacgcttttgaggttgagtgcaggccttgtgataactaagcgctacttttgacgagccttcaacaagctgcccagtcctctcctcagcagacgcatcaggttgtagttgcatctttacagtggtctttccttttattaaatctatagcagtgaatatagatttgattcaacttttagttacgttctctcaagaatcctaatcaactttcagttagcctcttaagaaagggaaaaaaaggtgctgccagtcatccccaaattatgtttttggctgtgcattctattttctacatagcactgaatctgagtaacagtcatcctggatttatagttggaacagaacagtaacagacctaactgggactcagccagcactagcctcatcttagctgccccttttctctgctttgcagtttactgcttccctgggctagccataacggggttctgggcaggtcagactcttcagcaagacagtgtattaatagtgtgaattagatacactgatgacctgctctgcctagttaagaaactgaattaatcagcagttacaaagcacatactttgttacgtgctaggctttgcctcctggcctctagataattaagacggcccagggaataccagcagagaagtgctaattgtatttgggtgttacaaaagcagacctagacgagctgttcacttaactggtacctgttggtcagaaaaagaatttatttagagattatgatcatgtaaaattacagtactcaacccttctagcaaagtatttttttgaaaaataaactaaatgcctttataaa

SEQ ID NO: 30325 - DNA, 4644 bp, Homo sapiens
  source 1..4644: mol_type = unassigned DNA
actaccttttctcttcggttggctgtagtttaaattctaaggtctcctcaagaaatgacattttcacatttcttaggcatctgtggtgccagaggagcaaacccatcgcacacgccaggtctgccatggggccctgggcggtggggattttggatgtaacgtgtctaggccgagcccgcgccgtgaaaggcctaccctgccgaaagcccgggcggcgggcgcccacaagtcagggctcggtgcggcgccgcagccagctctgcccgcgagccgagtccgggctgctgagggggagccgcgctgggggcggcggcgtcggggcgggggcgggagccgggcggcagctccagcgcccgtgggggaggagcggcagcggcggcggctggagctgctgtggcgaccgacgcgaggcggtggcagaggagacccacccctgtccacatggacagtcgcaaaggcctccgctgatgcattcacgcctgggcggggtgggcggacggccgtagcggcggcggctgcagaacgagctaggggcctgggggcgcctgacggtcgcagagacctcgccgctccggcgcggcgggtgcggccattttacggcctgggacgaagggaggcgtgtttgtgtgctcgctttcattctcctttcttgggaacccacggctgggggaagtttctcaggcagcctgggtgggcggtggatggggagtcgtgggccgagaggaaccgggcccgggaagcgccgtcgtcgtcgtcgccggtcgcgttcccccggagaggcctgagaagctcgggccgcgggcctcgctgcccgccagcccgcggacaggcccgggcgcgcctggcctgcctttgtataggcccgtctgaacgtgggagcgcagcccgcctgacggctgagcccgaggcccgcaaccctgcggcgtctaccctcctccggcgcggcccctcatcccggcgagcacggcggcggtgtgggccatggattaagaaggaggcggcgtgggaggaggaagatggcggccggcaagagcggcggtagcgcaggggagattacttttctggaagctttggctagatcagagtctaagagagatggaggttttaaaaataattggagctttgatcatgaagaagaaagtgaaggagatacagataaagatgggacaaatctgctcagtgtggatgaagatgaggattctgaaacctcaaaaggaaaaaagttaaatcgtcgatctgaaattgttgctaatagctctggtgaattcatcttgaagacatatgtaagacgaaacaagtctgaaagttttaaaactttgaaaggcaacccaattggacttaacatgttgagcaacaataagaaattgagtgaaaatacgcaaaatacgtcattatgttctggaactgtagttcatggtagacgttttcatcatgctcatgcacagataccagtagtaaaaacagcagcccaaaggaaagaatacccacctcatgtccaaaaagttgaaattaatcctgtaaggttaagtcggctccaaggtgttgaacgtataatgaagaaaacagaagagtccgaatcacaagtggagcctgaaattaagaggaaagtacaacagaaacgacactgtagtacctatcagcctactcctcctctatctcctgcttcaaaaaaatgtttaacccatttagaggatttgcaaagaaattgcagacaagctattactttgaatgagtctactggaccattattaagaacgtcaattcatcagaattctggaggacagaagtcacaaaacacaggattaacaaccaagaagttttatggcaacaatgtggaaaaggttccaattgatattattgtgaattgtgatgacagtaaacacacttatttacagactaatggaaaagtcattttacctggggcaaaaatacccaaaatcacaaacttgaaagaaaggaaaacaagtttgtcagacctaaatgatccaatcattttgtccagtgatgatgatgatgacaacgacagaactaacagaagagaaagcatatctcctcagcctgctgattcagcatgttcttcccctgcaccatccactggaaaagtagaagcagcgctaaatgaaaatacttgcagagcagagcgtgaactacgaagcattccagaagactcagagttaaatacagttacattgccaagaaaagcaagaatgaaagaccagtttggcaattctattatcaacacacctctgaaacgtcgtaaagtgttttctcaagaacctccagatgctttagctttaagctgccaaagttcctttgacagtgtcattttaaactgtcgaagtatacgagtaggaacactcttccggctgttaatagagcctgtaattttttgtttagattttatcaagatacagctagacgaaccagaccatgatcctgtagagattatattaaatacctctgatctaactaaatgtgaatggtgtaatgtccgaaaattacctgtagtgtttcttcaagcaattccagcagtttatcaaaagctgagcatccaactgcaaatgaataaggaggataaagtttggaatgattgtaaaggagtaaataaattaacaaatttagaagaacaatatataattttaatttttcaaaatggccttgatcctccggcaaatatggtatttgaaagtatcattaatgaaattggtataaagaataacatctccaatttttttgcgaaaattccctttgaagaagctaatggcagacttgttgcctgtacaagaacctatgaagagagcatcaaaggaagttgtgggcaaaaggaaaacaaaattaaaactgtatcatttgaatctaaaatacaacttagaagcaaacaagaatttcagttttttgatgaagaagaagaaactggagaaaaccacaccatcttcattggcccagtagaaaagttgatagtatatccaccacctccagctaagggaggcatctctgttaccaatgaggacctgcactgtctaaatgaaggagaatttttaaatgatgttattatagacttttatttgaaatacttggtgcttgaaaaactgaagaaggaagacgctgaccgaattcatatattcagttcttttttctataaacgccttaatcagagagagaggagaaatcatgaaacaactaatctgtcaatacagcaaaaacggcatgggagagtaaaaacatggacccggcacgtagatatttttgagaaggattttatttttgtaccccttaatgaagctgcacactggtttttggctgttgtttgtttccccggtttggaaaaaccaaagtatgaacctaatcctcattaccatgaaaatgctgtcatacagaaatgttcaactgtagaggacagttgtatttcttcttcagccagtgaaatggagagttgttcacaaaactcttctgccaagcctgtaattaagaagatgctaaacaaaaaacattgcatagctgtaattgattccaatcctgggcaggaagaaagtgaccctcgttataagagaaacatatgcagtgtaaaatacagtgtgaaaaaaataaatcatactgcgagtgaaaatgaagaattcaataaaggagaatctacatcccagaaagttgctgataggactaaaagtgagaatggcctacagaatgaaagtttaagttccacacatcatacagatggcttaagcaaaatcagactaaactatagcgatgaatcacctgaagctggtaaaatgcttgaagatgaactcgtcgacttctcagaagatcaggataaccaggatgatagcagtgacgatggattcctcgctgatgacaactgcagttcagaaataggacagtggcatttaaagcctactatctgtaaacaaccttgtatcctacttatggactcactccgaggcccttctcggtcaaatgttgtcaaaattttaagagagtatttagaagtggaatgggaagttaaaaaaggaagcaaaagaagtttttccaaagatgttatgaagggctctaatccaaaagtaccacagcaaaacaacttcagtgactgtggtgtatatgtattgcagtatgtagagagcttttttgagaatccaattctcagttttgaactacctatgaatttggcaaactggtttcctccaccaagaatgagaacaaaaagagaagaaatccgaaacataattctgaagctacaggaagatcagagcaaagagaaaagaaagcataaggacacttactcaacagaagcacctttaggcgaaggaacagaacaatatgtcaatagtatctcagattgaccatttctgttacttgtcatttctactttcagaaactaaatgactttcaaatttgggtatagacaataaagaactgaagtgctcactactcagtgatttggaaattttgatgcttgtataaatgtcagataattaatttccaaaggcgtatgtattaagtaaaagtctgtaaatatgttaatgaggccaatttttccagcatttataattatttttttcacttgttaggaagcttttgttatgtattttctgttaatagtacctaaaattgcaacttctaaacacaaataaaaagaaaatatttatagga

SEQ ID NO: 30326 - DNA, 6645 bp, Homo sapiens
  source 1..6645: mol_type = unassigned DNA
cgaccgacgcgaggcggtggcagaggagacccacccctgtccacatggacagtcgcaaaggcctccgctgatgcattcacgcctgggcggggtgggcggacggccgtagcggcggcggctgcagaacgagctaggggcctgggggcgcctgacggtcgcagagacctcgccgctccggcgcggcgggtgcggccattttacggcctgggacgaagggaggcgtgtttgtgtgctcgctttcattctcctttcttgggaacccacggctgggggaagtttctcaggcagcctgggtgggcggtggatggggagtcgtgggccgagaggaaccgggcccgggaagcgccgtcgtcgtcgtcgccggtcgcgttcccccggagaggcctgagaagctcgggccgcgggcctcgctgcccgccagcccgcggacaggcccgggcgcgcctggcctgcctttgtataggcccgtctgaacgtgggagcgcagcccgcctgacggctgagcccgaggcccgcaaccctgcggcgtctaccctcctccggcgcggcccctcatcccggcgagcacggcggcggtgtgggccatggattaagaaggaggcggcgtgggaggaggaagatggcggccggcaagagcggcggtagcgcaggggagattacttttctggaagctttggctagatcagagtctaagagagatggaggttttaaaaataattggagctttgatcatgaagaagaaagtgaaggagatacagataaagatgggacaaatctgctcagtgtggatgaagatgaggattctgaaacctcaaaaggaaaaaagttaaatcgtcgatctgaaattgttgctaatagctctggtgaattcatcttgaagacatatgtaagacgaaacaagtctgaaagttttaaaactttgaaaggcaacccaattggacttaacatgttgagcaacaataagaaattgagtgaaaatacgcaaaatacgtcattatgttctggaactgtagttcatggtagacgttttcatcatgctcatgcacagataccagtagtaaaaacagcagcccaaaggcttttgagtaatcagattctgaaagaatacccacctcatgtccaaaaagttgaaattaatcctgtaaggttaagtcggctccaaggtgttgaacgtataatgaagaaaacagaagagtccgaatcacaagtggagcctgaaattaagaggaaagtacaacagaaacgacactgtagtacctatcagcctactcctcctctatctcctgcttcaaaaaaatgtttaacccatttagaggatttgcaaagaaattgcagacaagctattactttgaatgagtctactggaccattattaagaacgtcaattcatcagaattctggaggacagaagtcacaaaacacaggattaacaaccaagaagttttatggcaacaatgtggaaaaggttccaattgatattattgtgaattgtgatgacagtaaacacacttatttacagactaatggaaaagtcattttacctggggcaaaaatacccaaaatcacaaacttgaaagaaaggaaaacaagtttgtcagacctaaatgatccaatcattttgtccagtgatgatgatgatgacaacgacagaactaacagaagagaaagcatatctcctcagcctgctgattcagcatgttcttcccctgcaccatccactggaaaagtagaagcagcgctaaatgaaaatacttgcagagcagagcgtgaactacgaagcattccagaagactcagagttaaatacagttacattgccaagaaaagcaagaatgaaagaccagtttggcaattctattatcaacacacctctgaaacgtcgtaaagtgttttctcaagaacctccagatgctttagctttaagctgccaaagttcctttgacagtgtcattttaaactgtcgaagtatacgagtaggaacactcttccggctgttaatagagcctgtaattttttgtttagattttatcaagatacagctagacgaaccagaccatgatcctgtagagattatattaaatacctctgatctaactaaatgtgaatggtgtaatgtccgaaaattacctgtagtgtttcttcaagcaattccagcagtttatcaaaagctgagcatccaactgcaaatgaataaggaggataaagtttggaatgattgtaaaggagtaaataaattaacaaatttagaagaacaatatataattttaatttttcaaaatggccttgatcctccggcaaatatggtatttgaaagtatcattaatgaaattggtataaagaataacatctccaatttttttgcgaaaattccctttgaagaagctaatggcagacttgttgcctgtacaagaacctatgaagagagcatcaaaggaagttgtgggcaaaaggaaaacaaaattaaaactgtatcatttgaatctaaaatacaacttagaagcaaacaagaatttcagttttttgatgaagaagaagaaactggagaaaaccacaccatcttcattggcccagtagaaaagttgatagtatatccaccacctccagctaagggaggcatctctgttaccaatgaggacctgcactgtctaaatgaaggagaatttttaaatgatgttattatagacttttatttgaaatacttggtgcttgaaaaactgaagaaggaagacgctgaccgaattcatatattcagttcttttttctataaacgccttaatcagagagagaggagaaatcatgaaacaactaatctgtcaatacagcaaaaacggcatgggagagtaaaaacatggacccggcacgtagatatttttgagaaggattttatttttgtaccccttaatgaagctgcacactggtttttggctgttgtttgtttccccggtttggaaaaaccaaagtatgaacctaatcctcattaccatgaaaatgctgtcatacagaaatgttcaactgtagaggacagttgtatttcttcttcagccagtgaaatggagagttgttcacaaaactcttctgccaagcctgtaattaagaagatgctaaacaaaaaacattgcatagctgtaattgattccaatcctgggcaggaagaaagtgaccctcgttataagagaaacatatgcagtgtaaaatacagtgtgaaaaaaataaatcatactgcgagtgaaaatgaagaattcaataaaggagaatctacatcccagaaagttgctgataggactaaaagtgagaatggcctacagaatgaaagtttaagttccacacatcatacagatggcttaagcaaaatcagactaaactatagcgatgaatcacctgaagctggtaaaatgcttgaagatgaactcgtcgacttctcagaagatcaggataaccaggatgatagcagtgacgatggattcctcgctgatgacaactgcagttcagaaataggacagtggcatttaaagcctactatctgtaaacaaccttgtatcctacttatggactcactccgaggcccttctcggtcaaatgttgtcaaaattttaagagagtatttagaagtggaatgggaagttaaaaaaggaagcaaaagaagtttttccaaagatgttatgaagggctctaatccaaaagtaccacagcaaaacaacttcagtgactgtggtgtatatgtattgcagtatgtagagagcttttttgagaatccaattctcagttttgaactacctatgaatttggcaaactggtttcctccaccaagaatgagaacaaaaagagaagaaatccgaaacataattctgaagctacaggaagatcagagcaaagagaaaagaaagcataaggacacttactcaacagaagcacctttaggcgaaggaacagaacaatatgtcaatagtatctcagattgaccatttctgttacttgtcatttctactttcagaaactaaatgactttcaaatttgggtatagacaataaagaactgaagtgctcactactcagtgatttggaaattttgatgcttgtataaatgtcagataattaatttccaaaggcgtatgtattaagtaaaagtctgtaaatatgttaatgaggccaatttttccagcatttataattatttttttcacttgttaggaagcttttgttatgtattttctgttaatagtacctaaaattgcaacttctaaacacaaataaaaagaaaatatttataggaggaaatgattaatttgatattctttagtgaacttgtttaattcctcagtgggtgtgacatatttcatgggaatattcaaatatctatggtaatattttgaccctttatatttgttctaaaataagtcaaaatgtgaaaataatattaaatctaagatattttgaactaagcatctttatatgcttgtgtaacaggaacaaagtaacagcctttcaattcatatactgccttgtgttcagtgaacccaagaaatgtaataaatatttgtaattttacacaaatatttaagaggaaagagtattaagagcaattcaaaaaaagtaaccttatactactaaaaaaaaaattcttgcatatattatcatcaaatgcatttttgaagacatcaaagactcaggttaaaactattttggtaagtgcagcttgaatttcaaatatcccgtgttacctttctctattacagcttaaagtatgctacaatctgtgtcatatagttaattgataagcatttttaatctgtgtaaacacaggaatttaaataggaatttactatttttttataaagcttttgctattttttcattgctcattttgttcttattattttgataaagtatcagactttttgcttgagttcttcagtgtaaattattttttacatgtaaaagtactgtattcaaccagttgcataatacagcaaaaatctttgaattcccctttaaaataactaaaatttgatggtttccatgacagatttatagcacatatagggatcttgcatgtatctgcagaaacttcattatttttcaaatgaaatggtgtatacttctttcaaatgaactttgagacttgaaacatattttagtcattttttgttaaatattgaatttttaaatacacatatatcaaaaatagttgagaataaaaagaaagcctaatcatcagcaattattttatttttaatttggccatctctgacattgcagtcaatatcttagggtattttcttgaatttaataaagtcccatgggtgggttcagggtgaatgggagtattaacaacaaccaaaaaatatctattgagacacagtagagtctcagtaagagaaatattaaaatgtaagaaaggtcaccattagtgatatcaactgtagtttgttactttgaactatatttctgattaactctttatagtaataacttagagctgttagctcagatatcttaattagctcatatgaaaaacaagtttaattttattatttactgaacatggcaaaatgcttttcaatctataataaaactgggataaaaaattgaagttgttttttttaaaacctaatagcaataagcaaaattggcatacataatttttttaatgaactatattttgtcagaatctgaaggtactgaaaaactattctaaaatgcctacttgtttttgcattaatttgtaatgcttacattttgcacccttagataatgtttgataagataaaaatataatttatcccttgtaccaactcaagtcaatcagattttaacatgaaaaatatagattaatgtatgtcagctttctagaggtagaatactcagctatttgatggcatttttcccaccccatgtgaaattttatttttggaagttatgctagtgacattgcaatatatattgaaatcttcggaggctgccaggttgagcttcaaaactagacttgagaatctttcgtgtatatgcacattcacttgataattgtgtattctatgtagtttaaagtgggatcaagccttttaaaatgtgttattagtacttagaagttgtaaaacagaacttatagaggtttgttactagacactgaaactgcatgacaagtatctggtgtcttaactaattagatagatctgttgtattggttttcttgttggatagaataacagttaatcatttttagaagagttttagattacttgccataaaatttgtatgtctcagctcttgttggtttaggagcagaagtggtgtttagtcccttcccgttaatgttgctgtgctacttcagacagctgaaaacttaatggtattatttcaagttcacataaccctaaaaaaggttttctttgtgtagtaacttgtgcttaaacttttagtcaattaaatgtaggaggttttatttgaaaacataaaatgattctctaaattacatcttgttttaagccaccaaaatgaatgcagtaatttttctttaaaaaaatgatctctgaaaactgtgagacaatgtaaaaagaataagttttaattcccccaaaatcaaaaattgtacttaaaatctcagacaattcactgaacaggaataataaagaacatattttaatatataa

SEQ ID NO: 30327 - DNA, 6501 bp, Homo sapiens
  source 1..6501: mol_type = unassigned DNA
ggggcgcctgacggtcgcagagacctcgccgctccggcgcggcgggtgcggccattttacggcctgggacgaagggaggcgtgtttgtgtgctcgctttcattctcctttcttgggaacccacggctgggggaagtttctcaggcagcctgggtgggcggtggatggggagtcgtgggccgagaggaaccgggcccgggaagcgccgtcgtcgtcgtcgccggtcgcgttcccccggagaggcctgagaagctcgggccgcgggcctcgctgcccgccagcccgcggacaggcccgggcgcgcctggcctgcctttgtataggcccgtctgaacgtgggagcgcagcccgcctgacggctgagcccgaggcccgcaaccctgcggcgtctaccctcctccggcgcggcccctcatcccggcgagcacggcggcggtgtgggccatggattaagaaggaggcggcgtgggaggaggaagatggcggccggcaagagcggcggtagcgcaggggagattacttttctggaagctttggctagatcagagtctaagagagatggaggttttaaaaataattggagctttgatcatgaagaagaaagtgaaggagatacagataaagatgggacaaatctgctcagtgtggatgaagatgaggattctgaaacctcaaaaggaaaaaagttaaatcgtcgatctgaaattgttgctaatagctctggtgaattcatcttgaagacatatgtaagacgaaacaagtctgaaagttttaaaactttgaaaggcaacccaattggacttaacatgttgagcaacaataagaaattgagtgaaaatacgcaaaatacgtcattatgttctggaactgtagttcatggtagacgttttcatcatgctcatgcacagataccagtagtaaaaacagcagcccaaagcagtctggaccgaaaagaaaggaaagaatacccacctcatgtccaaaaagttgaaattaatcctgtaaggttaagtcggctccaaggtgttgaacgtataatgaagaaaacagaagagtccgaatcacaagtggagcctgaaattaagaggaaagtacaacagaaacgacactgtagtacctatcagcctactcctcctctatctcctgcttcaaaaaaatgtttaacccatttagaggatttgcaaagaaattgcagacaagctattactttgaatgagtctactggaccattattaagaacgtcaattcatcagaattctggaggacagaagtcacaaaacacaggattaacaaccaagaagttttatggcaacaatgtggaaaaggttccaattgatattattgtgaattgtgatgacagtaaacacacttatttacagactaatggaaaagtcattttacctggggcaaaaatacccaaaatcacaaacttgaaagaaaggaaaacaagtttgtcagacctaaatgatccaatcattttgtccagtgatgatgatgatgacaacgacagaactaacagaagagaaagcatatctcctcagcctgctgattcagcatgttcttcccctgcaccatccactggaaaagtagaagcagcgctaaatgaaaatacttgcagagcagagcgtgaactacgaagcattccagaagactcagagttaaatacagttacattgccaagaaaagcaagaatgaaagaccagtttggcaattctattatcaacacacctctgaaacgtcgtaaagtgttttctcaagaacctccagatgctttagctttaagctgccaaagttcctttgacagtgtcattttaaactgtcgaagtatacgagtaggaacactcttccggctgttaatagagcctgtaattttttgtttagattttatcaagatacagctagacgaaccagaccatgatcctgtagagattatattaaatacctctgatctaactaaatgtgaatggtgtaatgtccgaaaattacctgtagtgtttcttcaagcaattccagcagtttatcaaaagctgagcatccaactgcaaatgaataaggaggataaagtttggaatgattgtaaaggagtaaataaattaacaaatttagaagaacaatatataattttaatttttcaaaatggccttgatcctccggcaaatatggtatttgaaagtatcattaatgaaattggtataaagaataacatctccaatttttttgcgaaaattccctttgaagaagctaatggcagacttgttgcctgtacaagaacctatgaagagagcatcaaaggaagttgtgggcaaaaggaaaacaaaattaaaactgtatcatttgaatctaaaatacaacttagaagcaaacaagaatttcagttttttgatgaagaagaagaaactggagaaaaccacaccatcttcattggcccagtagaaaagttgatagtatatccaccacctccagctaagggaggcatctctgttaccaatgaggacctgcactgtctaaatgaaggagaatttttaaatgatgttattatagacttttatttgaaatacttggtgcttgaaaaactgaagaaggaagacgctgaccgaattcatatattcagttcttttttctataaacgccttaatcagagagagaggagaaatcatgaaacaactaatctgtcaatacagcaaaaacggcatgggagagtaaaaacatggacccggcacgtagatatttttgagaaggattttatttttgtaccccttaatgaagctgcacactggtttttggctgttgtttgtttccccggtttggaaaaaccaaagtatgaacctaatcctcattaccatgaaaatgctgtcatacagaaatgttcaactgtagaggacagttgtatttcttcttcagccagtgaaatggagagttgttcacaaaactcttctgccaagcctgtaattaagaagatgctaaacaaaaaacattgcatagctgtaattgattccaatcctgggcaggaagaaagtgaccctcgttataagagaaacatatgcagtgtaaaatacagtgtgaaaaaaataaatcatactgcgagtgaaaatgaagaattcaataaaggagaatctacatcccagaaagttgctgataggactaaaagtgagaatggcctacagaatgaaagtttaagttccacacatcatacagatggcttaagcaaaatcagactaaactatagcgatgaatcacctgaagctggtaaaatgcttgaagatgaactcgtcgacttctcagaagatcaggataaccaggatgatagcagtgacgatggattcctcgctgatgacaactgcagttcagaaataggacagtggcatttaaagcctactatctgtaaacaaccttgtatcctacttatggactcactccgaggcccttctcggtcaaatgttgtcaaaattttaagagagtatttagaagtggaatgggaagttaaaaaaggaagcaaaagaagtttttccaaagatgttatgaagggctctaatccaaaagtaccacagcaaaacaacttcagtgactgtggtgtatatgtattgcagtatgtagagagcttttttgagaatccaattctcagttttgaactacctatgaatttggcaaactggtttcctccaccaagaatgagaacaaaaagagaagaaatccgaaacataattctgaagctacaggaagatcagagcaaagagaaaagaaagcataaggacacttactcaacagaagcacctttaggcgaaggaacagaacaatatgtcaatagtatctcagattgaccatttctgttacttgtcatttctactttcagaaactaaatgactttcaaatttgggtatagacaataaagaactgaagtgctcactactcagtgatttggaaattttgatgcttgtataaatgtcagataattaatttccaaaggcgtatgtattaagtaaaagtctgtaaatatgttaatgaggccaatttttccagcatttataattatttttttcacttgttaggaagcttttgttatgtattttctgttaatagtacctaaaattgcaacttctaaacacaaataaaaagaaaatatttataggaggaaatgattaatttgatattctttagtgaacttgtttaattcctcagtgggtgtgacatatttcatgggaatattcaaatatctatggtaatattttgaccctttatatttgttctaaaataagtcaaaatgtgaaaataatattaaatctaagatattttgaactaagcatctttatatgcttgtgtaacaggaacaaagtaacagcctttcaattcatatactgccttgtgttcagtgaacccaagaaatgtaataaatatttgtaattttacacaaatatttaagaggaaagagtattaagagcaattcaaaaaaagtaaccttatactactaaaaaaaaaattcttgcatatattatcatcaaatgcatttttgaagacatcaaagactcaggttaaaactattttggtaagtgcagcttgaatttcaaatatcccgtgttacctttctctattacagcttaaagtatgctacaatctgtgtcatatagttaattgataagcatttttaatctgtgtaaacacaggaatttaaataggaatttactatttttttataaagcttttgctattttttcattgctcattttgttcttattattttgataaagtatcagactttttgcttgagttcttcagtgtaaattattttttacatgtaaaagtactgtattcaaccagttgcataatacagcaaaaatctttgaattcccctttaaaataactaaaatttgatggtttccatgacagatttatagcacatatagggatcttgcatgtatctgcagaaacttcattatttttcaaatgaaatggtgtatacttctttcaaatgaactttgagacttgaaacatattttagtcattttttgttaaatattgaatttttaaatacacatatatcaaaaatagttgagaataaaaagaaagcctaatcatcagcaattattttatttttaatttggccatctctgacattgcagtcaatatcttagggtattttcttgaatttaataaagtcccatgggtgggttcagggtgaatgggagtattaacaacaaccaaaaaatatctattgagacacagtagagtctcagtaagagaaatattaaaatgtaagaaaggtcaccattagtgatatcaactgtagtttgttactttgaactatatttctgattaactctttatagtaataacttagagctgttagctcagatatcttaattagctcatatgaaaaacaagtttaattttattatttactgaacatggcaaaatgcttttcaatctataataaaactgggataaaaaattgaagttgttttttttaaaacctaatagcaataagcaaaattggcatacataatttttttaatgaactatattttgtcagaatctgaaggtactgaaaaactattctaaaatgcctacttgtttttgcattaatttgtaatgcttacattttgcacccttagataatgtttgataagataaaaatataatttatcccttgtaccaactcaagtcaatcagattttaacatgaaaaatatagattaatgtatgtcagctttctagaggtagaatactcagctatttgatggcatttttcccaccccatgtgaaattttatttttggaagttatgctagtgacattgcaatatatattgaaatcttcggaggctgccaggttgagcttcaaaactagacttgagaatctttcgtgtatatgcacattcacttgataattgtgtattctatgtagtttaaagtgggatcaagccttttaaaatgtgttattagtacttagaagttgtaaaacagaacttatagaggtttgttactagacactgaaactgcatgacaagtatctggtgtcttaactaattagatagatctgttgtattggttttcttgttggatagaataacagttaatcatttttagaagagttttagattacttgccataaaatttgtatgtctcagctcttgttggtttaggagcagaagtggtgtttagtcccttcccgttaatgttgctgtgctacttcagacagctgaaaacttaatggtattatttcaagttcacataaccctaaaaaaggttttctttgtgtagtaacttgtgcttaaacttttagtcaattaaatgtaggaggttttatttgaaaacataaaatgattctctaaattacatcttgttttaagccaccaaaatgaatgcagtaatttttctttaaaaaaatgatctctgaaaactgtgagacaatgtaaaaagaataagttttaattcccccaaaatcaaaaattgtacttaaaatctcagacaattcactgaacaggaataataaagaacatattttaatata

SEQ ID NO: 30328 - DNA, 6192 bp, Homo sapiens
  source 1..6192: mol_type = unassigned DNA
cgaccgacgcgaggcggtggcagaggagacccacccctgtccacatggacagtcgcaaaggcctccgctgatgcattcacgcctgggcggggtgggcggacggccgtagcggcggcggctgcagaacgagctaggggcctgggggcgcctgacggtcgcagagacctcgccgctccggcgcggcgggtgcggccattttacggcctgggacgaagggaggcgtgtttgtgtgctcgctttcattctcctttcttgggaacccacggctgggggaagtttctcaggcagcctgggtgggcggtggatggggagtcgtgggccgagaggaaccgggcccgggaagcgccgtcgtcgtcgtcgccggtcgcgttcccccggagaggcctgagaagctcgggccgcgggcctcgctgcccgccagcccgcggacaggcccgggcgcgcctggcctgcctttgtataggcccgtctgaacgtgggagcgcagcccgcctgacggctgagcccgaggcccgcaaccctgcggcgtctaccctcctccggcgcggcccctcatcccggcgagcacggcggcggtgtgggccatggattaagaaggaggcggcgtgggaggaggaagatggcggccggcaagagcggcggtagcgcaggggagattacttttctggaagctttggctagatcagagtctaagagagatggaggttttaaaaataattggagctttgatcatgaagaagaaagtgaaggagatacagataaagatgggacaaatctgctcagtgtggatgaagatgaggattctgaaacctcaaaaggaaaaaagttaaatcgtcgatctgaaattgttgctaatagctctggtgaattcatcttgaagacatatgtaagacgaaacaagtctgaaagttttaaaactttgaaaggcaacccaattggacttaacatgttgagcaacaataagaaattgagtgaaaatacgcaaaatacgtcattatgttctggaactgtagttcatggtagacgttttcatcatgctcatgcacagataccagtagtaaaaacagcagcccaaagtaatcagattctgaaagaatacccacctcatgtccaaaaagttgaaattaatcctgtaaggttaagtcggctccaaggtgttgtcattttgtccagtgatgatgatgatgacaacgacagaactaacagaagagaaagcatatctcctcagcctgctgattcagcatgttcttcccctgcaccatccactggaaaagtagaagcagcgctaaatgaaaatacttgcagagcagagcgtgaactacgaagcattccagaagactcagagttaaatacagttacattgccaagaaaagcaagaatgaaagaccagtttggcaattctattatcaacacacctctgaaacgtcgtaaagtgttttctcaagaacctccagatgctttagctttaagctgccaaagttcctttgacagtgtcattttaaactgtcgaagtatacgagtaggaacactcttccggctgttaatagagcctgtaattgtaattataaagattttttttattacccacaagaaaccagaccatgatcctgtagagattatattaaatacctctgatctaactaaatgtgaatggtgtaatgtccgaaaattacctgtagtgtttcttcaagcaattccagcagtttatcaaaagctgagcatccaactgcaaatgaataaggaggataaagtttggaatgattgtaaaggagtaaataaattaacaaatttagaagaacaatatataattttaatttttcaaaatggccttgatcctccggcaaatatggtatttgaaagtatcattaatgaaattggtataaagaataacatctccaatttttttgcgaaaattccctttgaagaagctaatggcagacttgttgcctgtacaagaacctatgaagagagcatcaaaggaagttgtgggcaaaaggaaaacaaaattaaaactgtatcatttgaatctaaaatacaacttagaagcaaacaagaatttcagttttttgatgaagaagaagaaactggagaaaaccacaccatcttcattggcccagtagaaaagttgatagtatatccaccacctccagctaagggaggcatctctgttaccaatgaggacctgcactgtctaaatgaaggagaatttttaaatgatgttattatagacttttatttgaaatacttggtgcttgaaaaactgaagaaggaagacgctgaccgaattcatatattcagttcttttttctataaacgccttaatcagagagagaggagaaatcatgaaacaactaatctgtcaatacagcaaaaacggcatgggagagtaaaaacatggacccggcacgtagatatttttgagaaggattttatttttgtaccccttaatgaagctgcacactggtttttggctgttgtttgtttccccggtttggaaaaaccaaagtatgaacctaatcctcattaccatgaaaatgctgtcatacagaaatgttcaactgtagaggacagttgtatttcttcttcagccagtgaaatggagagttgttcacaaaactcttctgccaagcctgtaattaagaagatgctaaacaaaaaacattgcatagctgtaattgattccaatcctgggcaggaagaaagtgaccctcgttataagagaaacatatgcagtgtaaaatacagtgtgaaaaaaataaatcatactgcgagtgaaaatgaagaattcaataaaggagaatctacatcccagaaagttgctgataggactaaaagtgagaatggcctacagaatgaaagtttaagttccacacatcatacagatggcttaagcaaaatcagactaaactatagcgatgaatcacctgaagctggtaaaatgcttgaagatgaactcgtcgacttctcagaagatcaggataaccaggatgatagcagtgacgatggattcctcgctgatgacaactgcagttcagaaataggacagtggcatttaaagcctactatctgtaaacaaccttgtatcctacttatggactcactccgaggcccttctcggtcaaatgttgtcaaaattttaagagagtatttagaagtggaatgggaagttaaaaaaggaagcaaaagaagtttttccaaagatgttatgaagggctctaatccaaaagtaccacagcaaaacaacttcagtgactgtggtgtatatgtattgcagtatgtagagagcttttttgagaatccaattctcagttttgaactacctatgaatttggcaaactggtttcctccaccaagaatgagaacaaaaagagaagaaatccgaaacataattctgaagctacaggaagatcagagcaaagagaaaagaaagcataaggacacttactcaacagaagcacctttaggcgaaggaacagaacaatatgtcaatagtatctcagattgaccatttctgttacttgtcatttctactttcagaaactaaatgactttcaaatttgggtatagacaataaagaactgaagtgctcactactcagtgatttggaaattttgatgcttgtataaatgtcagataattaatttccaaaggcgtatgtattaagtaaaagtctgtaaatatgttaatgaggccaatttttccagcatttataattatttttttcacttgttaggaagcttttgttatgtattttctgttaatagtacctaaaattgcaacttctaaacacaaataaaaagaaaatatttataggaggaaatgattaatttgatattctttagtgaacttgtttaattcctcagtgggtgtgacatatttcatgggaatattcaaatatctatggtaatattttgaccctttatatttgttctaaaataagtcaaaatgtgaaaataatattaaatctaagatattttgaactaagcatctttatatgcttgtgtaacaggaacaaagtaacagcctttcaattcatatactgccttgtgttcagtgaacccaagaaatgtaataaatatttgtaattttacacaaatatttaagaggaaagagtattaagagcaattcaaaaaaagtaaccttatactactaaaaaaaaaattcttgcatatattatcatcaaatgcatttttgaagacatcaaagactcaggttaaaactattttggtaagtgcagcttgaatttcaaatatcccgtgttacctttctctattacagcttaaagtatgctacaatctgtgtcatatagttaattgataagcatttttaatctgtgtaaacacaggaatttaaataggaatttactatttttttataaagcttttgctattttttcattgctcattttgttcttattattttgataaagtatcagactttttgcttgagttcttcagtgtaaattattttttacatgtaaaagtactgtattcaaccagttgcataatacagcaaaaatctttgaattcccctttaaaataactaaaatttgatggtttccatgacagatttatagcacatatagggatcttgcatgtatctgcagaaacttcattatttttcaaatgaaatggtgtatacttctttcaaatgaactttgagacttgaaacatattttagtcattttttgttaaatattgaatttttaaatacacatatatcaaaaatagttgagaataaaaagaaagcctaatcatcagcaattattttatttttaatttggccatctctgacattgcagtcaatatcttagggtattttcttgaatttaataaagtcccatgggtgggttcagggtgaatgggagtattaacaacaaccaaaaaatatctattgagacacagtagagtctcagtaagagaaatattaaaatgtaagaaaggtcaccattagtgatatcaactgtagtttgttactttgaactatatttctgattaactctttatagtaataacttagagctgttagctcagatatcttaattagctcatatgaaaaacaagtttaattttattatttactgaacatggcaaaatgcttttcaatctataataaaactgggataaaaaattgaagttgttttttttaaaacctaatagcaataagcaaaattggcatacataatttttttaatgaactatattttgtcagaatctgaaggtactgaaaaactattctaaaatgcctacttgtttttgcattaatttgtaatgcttacattttgcacccttagataatgtttgataagataaaaatataatttatcccttgtaccaactcaagtcaatcagattttaacatgaaaaatatagattaatgtatgtcagctttctagaggtagaatactcagctatttgatggcatttttcccaccccatgtgaaattttatttttggaagttatgctagtgacattgcaatatatattgaaatcttcggaggctgccaggttgagcttcaaaactagacttgagaatctttcgtgtatatgcacattcacttgataattgtgtattctatgtagtttaaagtgggatcaagccttttaaaatgtgttattagtacttagaagttgtaaaacagaacttatagaggtttgttactagacactgaaactgcatgacaagtatctggtgtcttaactaattagatagatctgttgtattggttttcttgttggatagaataacagttaatcatttttagaagagttttagattacttgccataaaatttgtatgtctcagctcttgttggtttaggagcagaagtggtgtttagtcccttcccgttaatgttgctgtgctacttcagacagctgaaaacttaatggtattatttcaagttcacataaccctaaaaaaggttttctttgtgtagtaacttgtgcttaaacttttagtcaattaaatgtaggaggttttatttgaaaacataaaatgattctctaaattacatcttgttttaagccaccaaaatgaatgcagtaatttttctttaaaaaaatgatctctgaaaactgtgagacaatgtaaaaagaataagttttaattcccccaaaatcaaaaattgtacttaaaatctcagacaattcactgaacaggaataataaagaacatattttaatatataa

SEQ ID NO: 30329 - DNA, 2043 bp, Homo sapiens
  source 1..2043: mol_type = unassigned DNA
tacgaagcattccagaagactcagagttaaatacagttacattgccaagaaaagcaagaatgaaagaccagtttggcaattctattatcaacacacctctgaaacgtcgtaaagtgttttctcaagaacctccagatgctttagctttaagctgccaaagttcctttgacagtgtcattttaaactgtcgaagtatacgagtaggaacactcttccggctgttaatagagcctgtaattttttgtttagattttatcaagatacagctagacgaaccagaccatgatcctgtagagattatattaaatacctctgatctaactaaatgtgaatggtgtaatgtccgaaaattacctgtagtgtttcttcaagcaattccagcagtttatcaaaagctgagcatccaactgcaaatgaataaggaggataaagtttggaatgattgtaaaggagtaaataaattaacaaatttagaagaacaatatataattttaatttttcaaaatggccttgatcctccggcaaatatggtatttgaaagtatcattaatgaaattggtataaagaataacatctccaatttttttgcgaaaattccctttgaagaagctaatggcagacttgttgcctgtacaagaacctatgaagagagcatcaaaggaagttgtgggcaaaaggaaaacaaaattaaaactgtatcatttgaatctaaaatacaacttagaagcaaacaagaatttcagttttttgatgaagaagaagaaactggagaaaaccacaccatcttcattggcccagtagaaaagttgatagtatatccaccacctccagctaagggaggcatctctgttaccaatgaggacctgcactgtctaaatgaaggagaatttttaaatgatgttattatagacttttatttgaaatacttggtgcttgaaaaactgaagaaggaagacgctgaccgaattcatatattcagttcttttttctataaacgccttaatcagagagagaggagaaatcatgaaacaactaatctgtcaatacagcaaaaacggcatgggagagtaaaaacatggacccggcacgtagatatttttgagaaggattttatttttgtaccccttaatgaagcatggcttaagcaaaatcagactaaactatagcgatgaatcacctgaagctggtaaaatgcttgaagatgaactcgtcgacttctcagaagatcaggataaccaggatgatagcagtgacgatggattcctcgctgatgacaactgcagttcagaaataggacagtggcatttaaagcctactatctgtaaacaaccttgtatcctacttatggactcactccgaggcccttctcggtcaaatgttgtcaaaattttaagagagtatttagaagtggaatgggaagttaaaaaaggaagcaaaagaagtttttccaaagatgttatgaagggctctaatccaaaagtaccacagcaaaacaacttcagtgactgtggtgtatatgtattgcagtatgtagagagcttttttgagaatccaattctcagttttgaactacctatgaatttggcaaactggtttcctccaccaagaatgagaacaaaaagagaagaaatccgaaacataattctgaagctacaggaagatcagagcaaagagaaaagaaagcataaggacacttactcaacagaagcacctttaggcgaaggaacagaacaatatgtcaatagtatctcagattgaccatttctgttacttgtcatttctactttcagaaactaaatgactttcaaatttgggtatagacaataaagaactgaagtgctcactactcagtgatttggaaattttgatgcttgtataaatgtcagataattaatttccaaaggcgtatgtattaagtaaaagtctgtaaatatgttaatgaggccaatttttccagcatttataattatttttttcacttgttaggaagcttttgttatgtattttctgttaatagtacctaaaattgcaacttctaaacac

SEQ ID NO: 30330 - DNA, 4736 bp, Homo sapiens
  source 1..4736: mol_type = unassigned DNA
ttttttttttttttttttttttttttttcctttcccctccccctccctctccaagccggaggggtcctgaggtgacagcgcctgcaactgaaatttcagcagcgggagaagatggacaagagaaagctcgggcgacggccatcttcatccgaaatcatcacagaaggaaaaaggaaaaagtcatcttctgatttatcggagataagaaagatgttaaatgcaaaaccagaggatgtccatgttcaatcaccactgtccaaattcagaagctcagaacgctggactctccctttgcagtgggaaagaagcctaaggaataaagtcatctctctagaccataaaaataaaaaacatatccgagggtgtcctgttacttccaagtcatcaccagaaaggatacccagagttatattgacgaatgtcctgggaacggagttaggaagaaaatacataaggaccccacctgtaactgagggaagtttgagtgatacagacaacttgcaatcagagcaactttcttcatcatctgatggcagcctagaatcttatcaaaatctaaaccctcacaagagctgttatttatctgaaaggggctcacaacgaagtaagacagtagatgacaattctgcaaagcagactgcgcacaataaagaaaaacgaagaaaggatgatggcatttctcttttaatatctgatactcagcctgaagaccttaacagtggaagtagaggttgtgatcatctcgaacaggaaagcagaaacaaggatgttaaatattctgattcaaaagtggaactcactctgatttccaggaagacaaagagaaggcttagaaataatttacctgattctcaatattgtacttctttggataagtcaacagaacagacaaaaaaacaagaagatgactcaacaatatccactgagtttgaaaagccaagtgaaaactatcatcaggatccaaaactgcctgaagaaattacaactaaacctacaaaaagtgattttactaaactatcctcacttaacagtcaggagttgactttgagtaatgccaccaaaagtgcctctgccggttcaaccactgaaaccgttgagaactctaattccattgatattgtggggatttcttccctggttgagaaggatgagaatgagttgaataccatagaaaagcctattctaagaggacataatgaagggaaccaatcactgatctcagctgaaccaattgttgtttccagtgatgaagaaggacctgttgaacataaaagttcagaaattcttaagttacaatctaagcaagaccgtgagacaactaatgaaaatgagagtacttctgaatcagcattgttagaactaccattgattacatgtgaatctgtacagatgtcatctgaattatgcccatataatcctgtcatggagaacatttccagtattatgcctagtaatgagatggatctacaactggattttatatttacttctgtttatattggtaaaataaaaggagcttctaaaggttgtgttacaatcacaaaaaaatatattaagatcccatttcaagtgtccctgaatgagatttcattgctagtggataccacacatttaaagcggtttgggttatggaaaagtaaggatgataatcacagtaaaaggagtcatgctattcttttcttctgggtctcttcagattatcttcaagagattcagacccaattagaacactctgtattaagccagcaatcaaaatctagtgaattcattttccttgaactacacaatcctgtttcacaaagagaagaattgaagctgaaagatattatgacggaaataagtataatcagtggagaattagagctttcttacccgttgtcttgggttcaggcatttcctttgtttcagaacctctcttcaaaagaaagttcttttattcattattactgtgtttcaacttgttctttccctgctggtgttgctgttgctgaagaaatgaagctgaaatcagtatctcagccctcaaacacagatgcggccaagcctacttacaccttcctgcagaagcaaagtagcggttgctactccctttctattacatctaatccagatgaagaatggcgagaagtcaggcacactggacttgttcagaagttgattgtatatcctccaccacctactaaggggggattaggagtaactaatgaagatctggagtgtttagaagaaggagagtttcttaatgatgtaatcattgatttttaccttaagtatcttatattggagaaggcatcagatgaacttgttgaacgaagtcacatttttagtagctttttctataaatgcttgacaagaaaggaaaataatttaacagaagataatccaaatctttcaatggcacagagaagacataaaagagtaagaacatggactcgtcacataaacatttttaataaagattacatctttgtacctgtaaatgagtcgtctcactggtatctcgcagtcatttgttttccatggttagaagaagctgtgtatgaagattttccacaaactgtatcccagcagtcccaggctcagcagtcccaaaatgacaacaaaacaatagataatgatctacgtactacttcgacactgtctttgagtgcagaggattcccaaagtaccgagtcgaatatgtcagtaccaaagaaaatgtgtaaaaggccatgtattcttatactagactccttgaaagctgcttctgtacaaaacacagttcagaatttacgagagtatttagaggtagagtgggaagttaaactaaaaactcatcgtcaattcagcaaaacaaacatggtggatctatgccctaaagttcctaaacaggacaatagcagtgattgtggagtatatttattgcagtatgtggaaagcttcttcaaggatcctattgttaactttgaacttccaattcatttggagaagtggtttcctcgtcatgtaataaagaccaaacgggaagatattcgagagctcatcttgaaacttcatttacagcaacagaagggcagcagtagctagttaatctgtacaaacatgacacagatgttctctaagattactggaaagcctcttaccagcatttgtgttagccagctcacagagaagaaaataacttgcagtagttttataataagtcattggaacattatttaaaatatgtaggacacattattagaattgttgggatctcatagatggaatgggaatgggggtgatatagataaacttactagatataaattaaaattttataaatatttcatatttttctgagtaaatatgattggattatgcaacagcatatgtaatatgggaatgttttgtagataataaaacttacatgatctgtacttccacgtgactgggtgctgaggggagttaaagcctccctggtgccagccccagtgcttgtcaaatttgctgacaggtcacatcatattgtaattctattctttgcagctcaagcatgcagtatgaatactgtgtattttttaaaaaaataatttagtatcaaggcttcagaaaatgccatttacggcatcccttctgtatgtaacaaaaagacattcataatgttaggaagatgataaaaattcgctcttttaaagtgcagcttattattctcaattgctaaatacgattactctgctttttttttttcatttcttttgatgtcatatgtgagtatcttataatttagttcatttgttcagggtaaaatttgaaacaaaaaattttacctgtgcaaaatagttttttaaaaattatacatgtagctcaacttgaggtactgctatataaatattcactcacattatcacggaatttatgtatagtttctctaatatagaagataaaattggtgtcctcataactttaacaaagaaaaccctcagtcctatttattaatgggtagaattaaatatataattttatagctcagtttacccagtattcatctgcaaagccagattgctctcattgcttttatatttttaaattgtagcttttagagacctatgatcctcatggaacttaattttttattaaatattcaggtaacagttctgaattcatgtgataatggtggcattatatatgattaaacacttcagaactttctaatgttatcaggagtattttgagggagatatgattatattgtattttctcagataagaaaaatgttttttaacaatattattttaatctgttttaagcatctcttagatttacattataactacataaagcagtgaagcaaaggcaaattaagataaagctagaaagtctgaacattttatttcaaaatcatacgaatcggggtcagttaagcctcagtattcttagcttttgttgattttggcactatctttatattattaaatatatttgttgtttggatatttcatataaagatggctataattacatatttcattcccaatttgtgtgtgttggggggtacttttaaaggtgactattgttttgtacatctaattttgggaaagcaagtctataagacatcttgtgatttcttaatgtttttgtttgtatgtttttcaaagatatcactgtcctttatcatgttttgaagattgtttaaaattcattttcctaaattaatgtgcaagtaatgttttgaggatatcagtgttttatattaaacatatttccaattcattaaa

SEQ ID NO: 30331 - DNA, 3272 bp, Homo sapiens
  source 1..3272: mol_type = unassigned DNA
ttttttttttcctttcccctccccctccctctccaagccggaggggtcctgaggtgacagcgcctgcaactgaaatttcagcagcgggagaagatggacaagagaaagctcgggcgacggccatcttcatccgataagaaagatgttaaatgcaaaaccagaggatgtccatgttcaatcaccactgtccaaattcagaagctcagaacgctggactctccctttgcagtgggaaagaagcctaaggaataaagtcatctctctagaccataaaaataaaaaacatatccgagggtgtcctgttacttccaagtcatcaccagaaaggcaactcaaagttatgttgacgaatgtcctatggacggatttaggacgaaaattcagaaagaccctacctagaaacgatgctaatttatgtgatgccaacaaggtgcaatcagactcattgccttcgacatctgttgacagcctagagacatgtcaaaaattagaacctcttcgccaaagccttaatttatctgaaaggatacccagagttatattgacgaatgtcctgggaacggagttaggaagaaaatacataaggaccccacctgtaactgagggaagtttgagtgatacagacaacttgcaatcagagcaactttcttcatcatctgatggcagcctagaatcttatcaaaatctaaaccctcacaagagctgttatttatctgaaaggggctcacaacgaagtaagacagtagatgacaattctgcaaagcagactgcgcacaataaagaaaaacgaagaaaggatgatggcatttctcttttaatatctgatactcagcctgaagaccttaacagtggaagtagaggttgtgatcatctcgaacaggaaagcagaaacaaggatgttaaatattctgattcaaaagtggaactcactctgatttccaggaagacaaagagaaggcttagaaataatttacctgattctcaatattgtacttctttggataagtcaacagaacagacaaaaaaacaagaagatgactcaacaatatccactgagtttgaaaagccaagtgaaaactatcatcaggatccaaaactgcctgaagaaattacaactaaacctacaaaaagtgattttactaaactatcctcacttaacagtcaggagttgactttgagtaatgccaccaaaagtgcctctgccggttcaaccactgaaaccgttgagaactctaattccattgatattgtggggatttcttccctggttgagaaggatgagaatgagttgaataccatagaaaagcctattctaagaggacataatgaagggaaccaatcactgatctcagctgaaccaattgttgtttccagtgatgaagaaggacctgttgaacataaaagttcagaaattcttaagttacaatctaagcaagaccgtgagacaactaatgaaaatgagagtacttctgaatcagcattgttagaactaccattgattacatgtgaatctgtacagatgtcatctgaattatgcccatataatcctgtcatggagaacatttccagtattatgcctagtaatgagatggatctacaactggattttatatttacttctgtttatattggtaaaataaaaggagcttctaaaggttgtgttacaatcacaaaaaaatatattaagatcccatttcaagtgtccctgaatgagatttcattgctagtggataccacacatttaaagcggtttgggttatggaaaagtaaggatgataatcacagtaaaaggagtcatgctattcttttcttctgggtctcttcagattatcttcaagagattcagacccaattagaacactctgtattaagccagcaatcaaaatctagtgaattcattttccttgaactacacaatcctgtttcacaaagagaagaattgaagctgaaagatattatgacggaaataagtataatcagtggagaattagagctttcttacccgttgtcttgggttcaggcatttcctttgtttcagaacctctcttcaaaagaaagttcttttattcattattactgtgtttcaacttgttctttccctgctggtgttgctgttgctgaagaaatgaagctgaaatcagtatctcagccctcaaacacagatgcggccaagcctacttacaccttcctgcagaagcaaagtagcggttgctactccctttctattacatctaatccagatgaagaatggcgagaagtcaggcacactggacttgttcagaagttgattgtatatcctccaccacctactaaggggggattaggagtaactaatgaagatctggagtgtttagaagaaggagagtttcttaatgatgtaatcattgatttttaccttaagtatcttatattggagaaggcatcagatgaacttgttgaacgaagtcacatttttagtagctttttctataaatgcttgacaagaaaggaaaataatttaacagaagataatccaaatctttcaatggcacagagaagacataaaagagtaagaacatggactcgtcacataaacatttttaataaagattacatctttgtacctgtaaatgagtcgtctcactggtatctcgcagtcatttgttttccatggttagaagaagctgtgtatgaagattttccacaaactgtatcccagcagtcccaggctcagcagtcccaaaatgacaacaaaacaatagataatgatctacgtactacttcgacactgtctttgagtgcagaggattcccaaagtaccgagtcgaatatgtcagtaccaaagaaaatgtgtaaaaggccatgtattcttatactagactccttgaaagctgcttctgtacaaaacacagttcagaatttacgagagtatttagaggtagagtgggaagttaaactaaaaactcatcgtcaattcagcaaaacaaacatggtggatctatgccctaaagttcctaaacaggacaatagcagtgattgtggagtatatttattgcagtatgtggaaagcttcttcaaggatcctattgttaactttgaacttccaattcatttggagaagtggtttcctcgtcatgtaataaagaccaaacgggaagatattcgagagctcatcttgaaacttcatttacagcaacagaagggcagcagtagctagttaatctgtacaaacatgacacagatgttctctaagattactggaaagcctcttaccagcatttgtgttagccagc

SEQ ID NO: 30332 - DNA, 4513 bp, Homo sapiens
  source 1..4513: mol_type = unassigned DNA
cctttcccctccccctccctctccaagccggaggggtcctgaggtgacagcgcctgcaactgaaatttcagcagcgggagaagatggacaagagaaagctcgggcgacggccatcttcatccgaaatcatcacagaaggaaaaaggaaaaagtcatcttctgatttatcggagataagaaagatgttaaatgcaaaaccagaggatgtccatgttcaatcaccactgtccaaattcagaagctcagaacgctggactctccctttgcagtgggaaagaagcctaaggaataaagtcatctctctagaccataaaaataaaaaacatatccgagggtgtcctgttacttccaagtcatcaccagaaaggggctcacaacgaagtaagacagtagatgacaattctgcaaagcagactgcgcacaataaagaaaaacgaagaaaggatgatggcatttctcttttaatatctgatactcagcctgaagaccttaacagtggaagtagaggttgtgatcatctcgaacaggaaagcagaaacaaggatgttaaatattctgattcaaaagtggaactcactctgatttccaggaagacaaagagaaggcttagaaataatttacctgattctcaatattgtacttctttggataagtcaacagaacagacaaaaaaacaagaagatgactcaacaatatccactgagtttgaaaagccaagtgaaaactatcatcaggatccaaaactgcctgaagaaattacaactaaacctacaaaaagtgattttactaaactatcctcacttaacagtcaggagttgactttgagtaatgccaccaaaagtgcctctgccggttcaaccactgaaaccgttgagaactctaattccattgatattgtggggatttcttccctggttgagaaggatgagaatgagttgaataccatagaaaagcctattctaagaggacataatgaagggaaccaatcactgatctcagctgaaccaattgttgtttccagtgatgaagaaggacctgttgaacataaaagttcagaaattcttaagttacaatctaagcaagaccgtgagacaactaatgaaaatgagagtacttctgaatcagcattgttagaactaccattgattacatgtgaatctgtacagatgtcatctgaattatgcccatataatcctgtcatggagaacatttccagtattatgcctagtaatgagatggatctacaactggattttatatttacttctgtttatattggtaaaataaaaggagcttctaaaggttgtgttacaatcacaaaaaaatatattaagatcccatttcaagtgtccctgaatgagatttcattgctagtggataccacacatttaaagcggtttgggttatggaaaagtaaggatgataatcacagtaaaaggagtcatgctattcttttcttctgggtctcttcagattatcttcaagagattcagacccaattagaacactctgtattaagccagcaatcaaaatctagtgaattcattttccttgaactacacaatcctgtttcacaaagagaagaattgaagctgaaagatattatgacggaaataagtataatcagtggagaattagagctttcttacccgttgtcttgggttcaggcatttcctttgtttcagaacctctcttcaaaagaaagttcttttattcattattactgtgtttcaacttgttctttccctgctggtgttgctgttgctgaagaaatgaagctgaaatcagtatctcagccctcaaacacagatgcggccaagcctacttacaccttcctgcagaagcaaagtagcggttgctactccctttctattacatctaatccagatgaagaatggcgagaagtcaggcacactggacttgttcagaagttgattgtatatcctccaccacctactaaggggggattaggagtaactaatgaagatctggagtgtttagaagaaggagagtttcttaatgatgtaatcattgatttttaccttaagtatcttatattggagaaggcatcagatgaacttgttgaacgaagtcacatttttagtagctttttctataaatgcttgacaagaaaggaaaataatttaacagaagataatccaaatctttcaatggcacagagaagacataaaagagtaagaacatggactcgtcacataaacatttttaataaagattacatctttgtacctgtaaatgagtcgtctcactggtatctcgcagtcatttgttttccatggttagaagaagctgtgtatgaagattttccacaaactgtatcccagcagtcccaggctcagcagtcccaaaatgacaacaaaacaatagataatgatctacgtactacttcgacactgtctttgagtgcagaggattcccaaagtaccgagtcgaatatgtcagtaccaaagaaaatgtgtaaaaggccatgtattcttatactagactccttgaaagctgcttctgtacaaaacacagttcagaatttacgagagtatttagaggtagagtgggaagttaaactaaaaactcatcgtcaattcagcaaaacaaacatggtggatctatgccctaaagttcctaaacaggacaatagcagtgattgtggagtatatttattgcagtatgtggaaagcttcttcaaggatcctattgttaactttgaacttccaattcatttggagaagtggtttcctcgtcatgtaataaagaccaaacgggaagatattcgagagctcatcttgaaacttcatttacagcaacagaagggcagcagtagctagttaatctgtacaaacatgacacagatgttctctaagattactggaaagcctcttaccagcatttgtgttagccagctcacagagaagaaaataacttgcagtagttttataataagtcattggaacattatttaaaatatgtaggacacattattagaattgttgggatctcatagatggaatgggaatgggggtgatatagataaacttactagatataaattaaaattttataaatatttcatatttttctgagtaaatatgattggattatgcaacagcatatgtaatatgggaatgttttgtagataataaaacttacatgatctgtacttccacgtgactgggtgctgaggggagttaaagcctccctggtgccagccccagtgcttgtcaaatttgctgacaggtcacatcatattgtaattctattctttgcagctcaagcatgcagtatgaatactgtgtattttttaaaaaaataatttagtatcaaggcttcagaaaatgccatttacggcatcccttctgtatgtaacaaaaagacattcataatgttaggaagatgataaaaattcgctcttttaaagtgcagcttattattctcaattgctaaatacgattactctgctttttttttttcatttcttttgatgtcatatgtgagtatcttataatttagttcatttgttcagggtaaaatttgaaacaaaaaattttacctgtgcaaaatagttttttaaaaattatacatgtagctcaacttgaggtactgctatataaatattcactcacattatcacggaatttatgtatagtttctctaatatagaagataaaattggtgtcctcataactttaacaaagaaaaccctcagtcctatttattaatgggtagaattaaatatataattttatagctcagtttacccagtattcatctgcaaagccagattgctctcattgcttttatatttttaaattgtagcttttagagacctatgatcctcatggaacttaattttttattaaatattcaggtaacagttctgaattcatgtgataatggtggcattatatatgattaaacacttcagaactttctaatgttatcaggagtattttgagggagatatgattatattgtattttctcagataagaaaaatgttttttaacaatattattttaatctgttttaagcatctcttagatttacattataactacataaagcagtgaagcaaaggcaaattaagataaagctagaaagtctgaacattttatttcaaaatcatacgaatcggggtcagttaagcctcagtattcttagcttttgttgattttggcactatctttatattattaaatatatttgttgtttggatatttcatataaagatggctataattacatatttcattcccaatttgtgtgtgttggggggtacttttaaaggtgactattgttttgtacatctaattttgggaaagcaagtctataagacatcttgtgatttcttaatgtttttgtttgtatgtttttcaaagatatcactgtcctttatcatgttttgaagattgtttaaaattcattttcctaaattaatgtgcaagtaatgttttgaggatatcagtgttttatattaaacatatttccaattcattaaa

SEQ ID NO: 30333 - DNA, 1483 bp, Homo sapiens
  source 1..1483: mol_type = unassigned DNA
actcagcccattgagttttaaaacctccctaatgacagatataacagttggagaattctgttaaggtttaatgacagtattttatatcatgcccagatggagctaagcaaaataagtagatttaactgtgtttatactaagttgcacagccagttttggaatctgaaaagcatttaataaattgctgcctttattctgtccatttcattattgtttatagttattaaatttaagaataaccaggggttactataaggagatatatttataatgtgttaaatatgatatatcttaaagaagatggttaaactaaatttaagatatttcaatatataaaaatggctcttgaagtccctatcttaaatgaaaaaatttttatatatcaaatctgtctttcatactctcagaatggcacagagaagacataaaagagtaagaacatggactcgtcacataaacatttttaataaagattacatctttgtacctgtaaatgagtcgtctcactggtatctcgcagtcatttgttttccatggttagaagaagctgtgtatgaagattttccacaaactgtatcccagcagtcccaggctcagcagtcccaaaatgacaacaaaacaatagataatgatctacgtactacttcgacactgtctttgagtgcagaggattcccaaagtaccgagtcgaatatgtcagtaccaaagaaaatgtgtaaaaggccatgtattcttatactagactccttgaaagctgcttctgtacaaaacacagttcagaatttacgagagtatttagaggtagagtgggaagttaaactaaaaactcatcgtcaattcagcaaaacaaacatggtggatctatgccctaaagttcctaaacaggacaatagcagtgattgtggagtatatttattgcagtatgtggaaagcttcttcaaggatcctattgttaactttgaacttccaattcatttggagaagtggtttcctcgtcatgtaataaagaccaaacgggaagatattcgagagctcatcttgaaacttcatttacagcaacagaagggcagcagtagctagttaatctgtacaaacatgacacagatgttctctaagattactggaaagcctcttaccagcatttgtgttagccagctcacagagaagaaaataacttgcagtagttttataataagtcattggaacattatttaaaatatgtaggacacattattagaattgttgggatctcatagatggaatgggaatgggggtgatatagataaacttactagatataaattaaaattttataaatatttcatatttttctgagtaaatatgattggattatgcaacagcatatgtaatatgggaatgttttgtagataataaaacttacatgatctgtacttccacgtgactgggtgctgaggggagttaaagcctccctggtgccagccccagtgcttgtcaaatttgc

SEQ ID NO: 30334 - DNA, 4703 bp, Homo sapiens
  source 1..4703: mol_type = unassigned DNA
ctccccctccctctccaagccggaggggtcctgaggtgacagcgcctgcaactgaaatttcagcagcgggagaagatggacaagagaaagctcgggcgacggccatcttcatccgaaatcatcacagaaggaaaaaggaaaaagtcatcttctgatttatcggagataagaaagatgttaaatgcaaaaccagaggatgtccatgttcaatcaccactgtccaaattcagaagctcagaacgctggactctccctttgcagtgggaaagaagcctaaggaataaagtcatctctctagaccataaaaataaaaaacatatccgagggtgtcctgttacttccaagtcatcaccagaaaggcaactcaaagttatgttgacgaatgtcctatggacggatttaggacgaaaattcagaaagaccctacctagaaacgatgctaatttatgtgatgccaacaaggtgcaatcagactcattgccttcgacatctgttgacagcctagagacatgtcaaaaattagaacctcttcgccaaagccttaatttatctgaaaggggctcacaacgaagtaagacagtagatgacaattctgcaaagcagactgcgcacaataaagaaaaacgaagaaaggatgatggcatttctcttttaatatctgatactcagcctgaagaccttaacagtggaagtagaggttgtgatcatctcgaacaggaaagcagaaacaaggatgttaaatattctgattcaaaagtggaactcactctgatttccaggaagacaaagagaaggcttagaaataatttacctgattctcaatattgtacttctttggataagtcaacagaacagacaaaaaaacaagaagatgactcaacaatatccactgagtttgaaaagccaagtgaaaactatcatcaggatccaaaactgcctgaagaaattacaactaaacctacaaaaagtgattttactaaactatcctcacttaacagtcaggagttgactttgagtaatgccaccaaaagtgcctctgccggttcaaccactgaaaccgttgagaactctaattccattgatattgtggggatttcttccctggttgagaaggatgagaatgagttgaataccatagaaaagcctattctaagaggacataatgaagggaaccaatcactgatctcagctgaaccaattgttgtttccagtgatgaagaaggacctgttgaacataaaagttcagaaattcttaagttacaatctaagcaagaccgtgagacaactaatgaaaatgagagtacttctgaatcagcattgttagaactaccattgattacatgtgaatctgtacagatgtcatctgaattatgcccatataatcctgtcatggagaacatttccagtattatgcctagtaatgagatggatctacaactggattttatatttacttctgtttatattggtaaaataaaaggagcttctaaaggttgtgttacaatcacaaaaaaatatattaagatcccatttcaagtgtccctgaatgagatttcattgctagtggataccacacatttaaagcggtttgggttatggaaaagtaaggatgataatcacagtaaaaggagtcatgctattcttttcttctgggtctcttcagattatcttcaagagattcagacccaattagaacactctgtattaagccagcaatcaaaatctagtgaattcattttccttgaactacacaatcctgtttcacaaagagaagaattgaagctgaaagatattatgacggaaataagtataatcagtggagaattagagctttcttacccgttgtcttgggttcaggcatttcctttgtttcagaacctctcttcaaaagaaagttcttttattcattattactgtgtttcaacttgttctttccctgctggtgttgctgttgctgaagaaatgaagctgaaatcagtatctcagccctcaaacacagatgcggccaagcctacttacaccttcctgcagaagcaaagtagcggttgctactccctttctattacatctaatccagatgaagaatggcgagaagtcaggcacactggacttgttcagaagttgattgtatatcctccaccacctactaaggggggattaggagtaactaatgaagatctggagtgtttagaagaaggagagtttcttaatgatgtaatcattgatttttaccttaagtatcttatattggagaaggcatcagatgaacttgttgaacgaagtcacatttttagtagctttttctataaatgcttgacaagaaaggaaaataatttaacagaagataatccaaatctttcaatggcacagagaagacataaaagagtaagaacatggactcgtcacataaacatttttaataaagattacatctttgtacctgtaaatgagtcgtctcactggtatctcgcagtcatttgttttccatggttagaagaagctgtgtatgaagattttccacaaactgtatcccagcagtcccaggctcagcagtcccaaaatgacaacaaaacaatagataatgatctacgtactacttcgacactgtctttgagtgcagaggattcccaaagtaccgagtcgaatatgtcagtaccaaagaaaatgtgtaaaaggccatgtattcttatactagactccttgaaagctgcttctgtacaaaacacagttcagaatttacgagagtatttagaggtagagtgggaagttaaactaaaaactcatcgtcaattcagcaaaacaaacatggtggatctatgccctaaagttcctaaacaggacaatagcagtgattgtggagtatatttattgcagtatgtggaaagcttcttcaaggatcctattgttaactttgaacttccaattcatttggagaagtggtttcctcgtcatgtaataaagaccaaacgggaagatattcgagagctcatcttgaaacttcatttacagcaacagaagggcagcagtagctagttaatctgtacaaacatgacacagatgttctctaagattactggaaagcctcttaccagcatttgtgttagccagctcacagagaagaaaataacttgcagtagttttataataagtcattggaacattatttaaaatatgtaggacacattattagaattgttgggatctcatagatggaatgggaatgggggtgatatagataaacttactagatataaattaaaattttataaatatttcatatttttctgagtaaatatgattggattatgcaacagcatatgtaatatgggaatgttttgtagataataaaacttacatgatctgtacttccacgtgactgggtgctgaggggagttaaagcctccctggtgccagccccagtgcttgtcaaatttgctgacaggtcacatcatattgtaattctattctttgcagctcaagcatgcagtatgaatactgtgtattttttaaaaaaataatttagtatcaaggcttcagaaaatgccatttacggcatcccttctgtatgtaacaaaaagacattcataatgttaggaagatgataaaaattcgctcttttaaagtgcagcttattattctcaattgctaaatacgattactctgctttttttttttcatttcttttgatgtcatatgtgagtatcttataatttagttcatttgttcagggtaaaatttgaaacaaaaaattttacctgtgcaaaatagttttttaaaaattatacatgtagctcaacttgaggtactgctatataaatattcactcacattatcacggaatttatgtatagtttctctaatatagaagataaaattggtgtcctcataactttaacaaagaaaaccctcagtcctatttattaatgggtagaattaaatatataattttatagctcagtttacccagtattcatctgcaaagccagattgctctcattgcttttatatttttaaattgtagcttttagagacctatgatcctcatggaacttaattttttattaaatattcaggtaacagttctgaattcatgtgataatggtggcattatatatgattaaacacttcagaactttctaatgttatcaggagtattttgagggagatatgattatattgtattttctcagataagaaaaatgttttttaacaatattattttaatctgttttaagcatctcttagatttacattataactacataaagcagtgaagcaaaggcaaattaagataaagctagaaagtctgaacattttatttcaaaatcatacgaatcggggtcagttaagcctcagtattcttagcttttgttgattttggcactatctttatattattaaatatatttgttgtttggatatttcatataaagatggctataattacatatttcattcccaatttgtgtgtgttggggggtacttttaaaggtgactattgttttgtacatctaattttgggaaagcaagtctataagacatcttgtgatttcttaatgtttttgtttgtatgtttttcaaagatatcactgtcctttatcatgttttgaagattgtttaaaattcattttcctaaattaatgtgcaagtaatgttttgaggatatcagtgttttatattaaacatatttccaattcattaaa

SEQ ID NO: 30335 - DNA, 4945 bp, Homo sapiens
  source 1..4945: mol_type = unassigned DNA
ggaggggtcctgaggtgacagcgcctgcaactgaaatttcagcagcgggagaagatggacaagagaaagctcgggcgacggccatcttcatccgaaatcatcacagaaggaaaaaggaaaaagtcatcttctgatttatcggagataagaaagatgttaaatgcaaaaccagaggatgtccatgttcaatcaccactgtccaaattcagaagctcagaacgctggactctccctttgcagtgggaaagaagcctaaggaataaagtcatctctctagaccataaaaataaaaaacatatccgagggtgtcctgttacttccaagtcatcaccagaaaggcaactcaaagttatgttgacgaatgtcctatggacggatttaggacgaaaattcagaaagaccctacctagaaacgatgctaatttatgtgatgccaacaaggtgcaatcagactcattgccttcgacatctgttgacagcctagagacatgtcaaaaattagaacctcttcgccaaagccttaatttatctgaaaggatacccagagttatattgacgaatgtcctgggaacggagttaggaagaaaatacataaggaccccacctgtaactgagggaagtttgagtgatacagacaacttgcaatcagagcaactttcttcatcatctgatggcagcctagaatcttatcaaaatctaaaccctcacaagagctgttatttatctgaaaggggctcacaacgaagtaagacagtagatgacaattctgcaaagcagactgcgcacaataaagaaaaacgaagaaaggatgatggcatttctcttttaatatctgatactcagcctgaagaccttaacagtggaagtagaggttgtgatcatctcgaacaggaaagcagaaacaaggatgttaaatattctgattcaaaagtggaactcactctgatttccaggaagacaaagagaaggcttagaaataatttacctgattctcaatattgtacttctttggataagtcaacagaacagacaaaaaaacaagaagatgactcaacaatatccactgagtttgaaaagccaagtgaaaactatcatcaggatccaaaactgcctgaagaaattacaactaaacctacaaaaagtgattttactaaactatcctcacttaacagtcaggagttgactttgagtaatgccaccaaaagtgcctctgccggttcaaccactgaaaccgttgagaactctaattccattgatattgtggggatttcttccctggttgagaaggatgagaatgagttgaataccatagaaaagcctattctaagaggacataatgaagggaaccaatcactgatctcagctgaaccaattgttgtttccagtgatgaagaaggacctgttgaacataaaagttcagaaattcttaagttacaatctaagcaagaccgtgagacaactaatgaaaatgagagtacttctgaatcagcattgttagaactaccattgattacatgtgaatctgtacagatgtcatctgaattatgcccatataatcctgtcatggagaacatttccagtattatgcctagtaatgagatggatctacaactggattttatatttacttctgtttatattggtaaaataaaaggagcttctaaaggttgtgttacaatcacaaaaaaatatattaagatcccatttcaagtgtccctgaatgagatttcattgctagtggataccacacatttaaagcggtttgggttatggaaaagtaaggatgataatcacagtaaaaggagtcatgctattcttttcttctgggtctcttcagattatcttcaagagattcagacccaattagaacactctgtattaagccagcaatcaaaatctagtgaattcattttccttgaactacacaatcctgtttcacaaagagaagaattgaagctgaaagatattatgacggaaataagtataatcagtggagaattagagctttcttacccgttgtcttgggttcaggcatttcctttgtttcagaacctctcttcaaaagaaagttcttttattcattattactgtgtttcaacttgttctttccctgctggtgttgctgttgctgaagaaatgaagctgaaatcagtatctcagccctcaaacacagatgcggccaagcctacttacaccttcctgcagaagcaaagtagcggttgctactccctttctattacatctaatccagatgaagaatggcgagaagtcaggcacactggacttgttcagaagttgattgtatatcctccaccacctactaaggggggattaggagtaactaatgaagatctggagtgtttagaagaaggagagtttcttaatgatgtaatcattgatttttaccttaagtatcttatattggagaaggcatcagatgaacttgttgaacgaagtcacatttttagtagctttttctataaatgcttgacaagaaaggaaaataatttaacagaagataatccaaatctttcaatggcacagagaagacataaaagagtaagaacatggactcgtcacataaacatttttaataaagattacatctttgtacctgtaaatgagtcgtctcactggtatctcgcagtcatttgttttccatggttagaagaagctgtgtatgaagattttccacaaactgtatcccagcagtcccaggctcagcagtcccaaaatgacaacaaaacaatagataatgatctacgtactacttcgacactgtctttgagtgcagaggattcccaaagtaccgagtcgaatatgtcagtaccaaagaaaatgtgtaaaaggccatgtattcttatactagactccttgaaagctgcttctgtacaaaacacagttcagaatttacgagagtatttagaggtagagtgggaagttaaactaaaaactcatcgtcaattcagcaaaacaaacatggtggatctatgccctaaagttcctaaacaggacaatagcagtgattgtggagtatatttattgcagtatgtggaaagcttcttcaaggatcctattgttaactttgaacttccaattcatttggagaagtggtttcctcgtcatgtaataaagaccaaacgggaagatattcgagagctcatcttgaaacttcatttacagcaacagaagggcagcagtagctagttaatctgtacaaacatgacacagatgttctctaagattactggaaagcctcttaccagcatttgtgttagccagctcacagagaagaaaataacttgcagtagttttataataagtcattggaacattatttaaaatatgtaggacacattattagaattgttgggatctcatagatggaatgggaatgggggtgatatagataaacttactagatataaattaaaattttataaatatttcatatttttctgagtaaatatgattggattatgcaacagcatatgtaatatgggaatgttttgtagataataaaacttacatgatctgtacttccacgtgactgggtgctgaggggagttaaagcctccctggtgccagccccagtgcttgtcaaatttgctgacaggtcacatcatattgtaattctattctttgcagctcaagcatgcagtatgaatactgtgtattttttaaaaaaataatttagtatcaaggcttcagaaaatgccatttacggcatcccttctgtatgtaacaaaaagacattcataatgttaggaagatgataaaaattcgctcttttaaagtgcagcttattattctcaattgctaaatacgattactctgctttttttttttcatttcttttgatgtcatatgtgagtatcttataatttagttcatttgttcagggtaaaatttgaaacaaaaaattttacctgtgcaaaatagttttttaaaaattatacatgtagctcaacttgaggtactgctatataaatattcactcacattatcacggaatttatgtatagtttctctaatatagaagataaaattggtgtcctcataactttaacaaagaaaaccctcagtcctatttattaatgggtagaattaaatatataattttatagctcagtttacccagtattcatctgcaaagccagattgctctcattgcttttatatttttaaattgtagcttttagagacctatgatcctcatggaacttaattttttattaaatattcaggtaacagttctgaattcatgtgataatggtggcattatatatgattaaacacttcagaactttctaatgttatcaggagtattttgagggagatatgattatattgtattttctcagataagaaaaatgttttttaacaatattattttaatctgttttaagcatctcttagatttacattataactacataaagcagtgaagcaaaggcaaattaagataaagctagaaagtctgaacattttatttcaaaatcatacgaatcggggtcagttaagcctcagtattcttagcttttgttgattttggcactatctttatattattaaatatatttgttgtttggatatttcatataaagatggctataattacatatttcattcccaatttgtgtgtgttggggggtacttttaaaggtgactattgttttgtacatctaattttgggaaagcaagtctataagacatcttgtgatttcttaatgtttttgtttgtatgtttttcaaagatatcactgtcctttatcatgttttgaagattgtttaaaattcattttcctaaattaatgtgcaagtaatgttttgaggatatcagtgttttatattaaacatatttccaattcattaaattgaggtgtaatttttttccttaagaaacatgagctactgttagaaataaatttccagttgtatgctg

SEQ ID NO: 30336 - DNA, 5717 bp, Homo sapiens
  source 1..5717: mol_type = unassigned DNA
gtgcgcagattgagaatggagctttccggtcgggcgggaggaggtgacgtcaggagtggtggcgggcgggggcctctggtagccctggggacgctgtatctgtgggctcttgaatcgcgtcacaaatcagcgaccgaactctggcggtggtggttaagacggcgaaggcggcagcggcggcgacagctctggggtttgcgtctcggggtgtgtcggccgccgctgctgcttgggcctggtatgtacagatggctggttaggattctcggcaccattttccgtttctgcgaccggtcggtgccccctgcccgggccctcctgaagaggcggcgctcagacagcactctgttttctacagtggacactgatgaaataccagccaaaagaccaagattagattgctttattcaccaagtgaaaaacagtctctacaatgctgccagcttatttggattcccattccagctgaccacaaagcccatggtaacttctgcttgtaatggaacacggaatgtggccccttcaggagaggtattttcgaactcttcatcttgtgaactgacaggttctggatcctggaacaacatgctgaaactgggtaataaatctcctaatggaataagtgactatccaaagatcagagtgacagttacccgagatcagccacgcagagtcctgccttcctttggttttactttgaactcagaaggctgtaatagaagaccaggtggccgtcgccatagcaaaggtaatccagagagttctttaatgtggaaacctcaggaacaggctgtaacagagatgatttctgaagagagtggcaagggtctgaggcgtccccattgtactgtggaggagggtgttcaaaaagaggaaagagagaagtaccgaaagttattggaacgacttaaagaaagtggtcatggaaactctgtctgtcctgtaacttcaaattatcacagttctcaaagaagtcagatggacacattaaagaccaaaggctggggggaagagcaaaatcacggagtcaaaacaactcagtttgttccaaaacaatatagacttgttgaaacaaggggacctctatgttcattgagaagtgaaaagaggtgttcaaaggggaaaattactgatacagagacgatggtcggaatcagatttgaaaatgaaagtaggaggggataccaactggagcctgacctatcagaagaagtgtcggcccgactccgcctgggcagtggaagcaatggcttactcaggaggaaagtgtcaataattgagacaaaggaaaagaattgctcaggcaaagagagggacagaagaacggacgatctccttgaacttacagaggacatggaaaaggaaatcagtaatgccctaggccatggcccacaggatgaaatcctaagtagtgctttcaaattgcgaattactcgaggagatattcagacattaaagaactatcactggctcaatgatgaagtcattaatttttacatgaatcttctggtggaaagaaataaaaagcaaggctatccagcacttcatgtattcagtactttcttctatcctaaattaaagtctgggggttaccaagcagtgaaacgatggaccaaaggggtaaatctctttgaacaagaaattattctggtgcctattcatcggaaggtacattggagcctggtggtgattgacctaagaaaaaagtgtcttaaatatctggattctatgggacaaaagggccacaggatctgtgagattctccttcagtatttacaggatgaaagtaagaccaaaagaaatagtgatctgaatcttttagagtggacccatcacagcatgaaaccacacgagattcctcaacagctgaatgggagtgattgtggaatgtttacttgtaaatatgcagattatatttctagggacaaacctatcacatttactcagcaccagatgcctctcttccggaagaagatggtgtgggaaatccttcatcagcagttgctgtgagaaaactttgcctggtccctctagctgctggtggttctttcacagacatttccatatacctcatgcattgtgggttaaaaagtccctgcatcacttctgttctcacaggtactgagctgtcaaaagtgcatgaaggcctctcactgtactctagtcctgacttggggtgcagagggctgcttgcaatcctgtttgtaaggctgtgcctgctcagagctttggactgttcaacccacacaagaacaaacgctaactaatattttttttaagagattcttttccctatgaatgtgggaaatgcaggatttattctgtgaattgtttgtttctgtgtgtttgttcagcgtattcattcactcactcgtttgcaaacataatgggcagtggtcatttactgctgctcttttacagttagctctaaattacttgtttgaactatttatttctgaaaggaatgttactcaagctgccactccctgctgaagagcaggagggaactctcactgggggcggaaggaagtggagctggagcagtaactgccaacatgaagctggagggtttgggattttttttgtttttgtttttttgaggctcaaaaaatgctgggagaaatgaaaatgctgtgggatagggctcctgttgcctttcagaggaagtctgacactacagcgttggcacagtgccgtgaacagtggaactgtgcccaagggactctgattatccaagcatcttccgaagagtgttgtggtcaccttaaagagacttccccttctggaaatgtggtgacttggcttagtcttcaaactggattcatggatttgaagtaactgtaaaccctaaatcttcattttcatcccagatctggttgagtataaacctcagaattgtaggggctggcctgagctgtttatttcaaaagatactattcaatttaaagctatttttcctcagagtttttgttttctatatattaagtctaaattaagttttctactcattaagactaacatctccccactccatccccactgaaatttgtggaagaaaatttagtacttggctctgaggttgccagttatacaataatctattttgcatatgaaagtttgtatttaacttttttgttcattaaaaaccttactgatatggttataacttcagacagtttagagttggtcagaacatattttgcaagatctagtgcctagtgttgcttttctgatgtaataaaaggtggtctggcagaacctaaaaaagtatatgctgaaatgatttctaaccctctccctacttaaacctcccagacttgttctggttcataaaagcaagaggtaaaactggaaaaattgtgcacgtgttacctatgaatctacacgcctgccatttgcagtgctccggctgctggtcccagaggtatactggttacagctattgcagccagttccctgagacttgtaaaactcctggtttaggacatggggcctgtggtgtggatggaaaatgctgggcctactggatggtcagccagaggccatgtggtgggtgatgactgaagcgggagcaggttgtaccacacctctcccccccccctcccactccccctccctccctctcccctccccctccctccctcccccctccctccctcccccccctccccctccctccccctccctctctccctaacacccaccctccccctttcccccaccctccccccttctcccctttccccaccctccctccccccttccccctcccccccccccccccgcagcccctgctcctttctctgggctcctggcattgtgccagtgagtgctgggaccaggtaatgagcacagccaaaaaggccagaggttcactaggtcagcatcataccaaacgcctggctttcaccaggcatcagtgtgcttcacttgagagtttggtaccatggttaagatcgagtccatgctaggtaagtcctgttaggaatgtcagtttgtattccgcccacgtgaatgatgctgagcttaatgtattattttgaggggcttcttcagagcagttctcactgagctttccattaacctacactcttccggacggctcttaaaacttgcaggacataatgaaattgggaagagcagagtgttgaagtctatagcatggccttctgcttgaccctgagttcctgaattgaatgtgggagaccacaggccatacttctctaggcactcacatgtctcccttggcataaggaaacatgttagtaatatagttttttagatccaaacagtttatttggatctaaaagtttaagtgttcagttgaaaaacagctattgattttattagtagcaaattatcaccattaaagccagtggttttttttttgttttttttttttgttttttttttttttttttgcgacagagtctcttgtcgcccaggctggagtacaatggtgtgatctcagctcactgcaacctccgcctcccaggttcaagcgattctcctgcctcagcctcctgcgtagctgggattacaggtgcccaccaccacaccctgctaatttttgtacttttagtagagatggggtttcgccatgttggccaggctggtcttgaactgctgacctcaggtgatccacccgcctcggcctcccaaagtgctggtattacagtcatgagccacctcacccagcctgtttttgagacggagtttcacttttgtcgcccaggctggagtgcaatggcgctatctcagctcactgcaacccccacctcccaggttcaagcgattctcctgcctcagcctcccgagtagctgggattacaggcatgtgccaccacccctggctaattttgtatttttagtggagacggggtttctccatgttggtcaggctggtcttaaactcccgacctcaagtgatctgcccgcctcggcctcccaaagtgctgggattacaggcgtgagccattgcacctgtccctgccagtgtgtttttaaaatagtttagggggttgagaaaagatgcagtgagccattattctcctttagcaggtagtctcttaaaaattgatgtggattttaaaaatataccattgagaacacgtatctttctcaaacttgaccttgaacagagctggatgggggtgggagggaaacagatttggggcatatggaagatattcttgggagccccatattctacctcagttaccgaaggctattagaacctctgaatttttcctcctctgaaatcctaagcacaacttcagaaaaccatgtctgatagcggatgtcttcctgctgtgaggagctgcttgatgtggggaccaaggtgtgggtgtgggcggaatgtatcctagtagaaacagtgaacctcagatatgaataaataagcaagagaccgaaagttaagtgtgtgacaacctcagtactgtagttaagctacattctttaaattagcttttgtgaactgattgggaacctaatctcttttgtaactgtttgagaaaaactctgaagcacctgatattcaaacaaacttatggtacttactaactcatttgtaaattggcgatgtagctggctgtagtattgctttgataatttttttcttttaatttacctaatatatataaggaaggggtttggatatattaaaataggtgttaattttatctatttaccaataaattcatctctttaattca

SEQ ID NO: 30337 - DNA, 2383 bp, Homo sapiens
  source 1..2383: mol_type = unassigned DNA
acaaatcagcgaccgaactctggcggtggtggttaagacggcgaaggcggcagcggcggcgacagctctggggtttgcgtctcggggtgtgtcggccgccgctgctgcttgggcctggtatgtacagatggctggttaggattctcggcaccattttccgtttctgcgaccggtcggtgccccctgcccgggccctcctgaagaggcggcgctcagacagcactctgttttctacagtggacactgatgaaataccagccaaaagaccaagattagattgctttattcaccaagtgaaaaacagtctctacaatgctgccagcttatttggattcccattccagctgaccacaaagcccatggtaacttctgcttgtaatggaacacggaatgtggccccttcaggagaggtaataaatctcctaatggaataagtgactatccaaagatcagagtgacagttacccgagatcagccacgcagagtcctgccttcctttggttttactttgaactcagaaggctgtaatagaagaccaggtggccgtcgccatagcaaaggtaatccagagagttctttaatgtggaaacctcaggaacaggctgtaacagagatgatttctgaagagagtggcaagggtctgaggcgtccccattgtactgtggaggagggtgttcaaaaagaggaaagagagaagtaccgaaagttattggaacgacttaaagaaagtggtcatggaaactctgtctgtcctgtaacttcaaattatcacagttctcaaagaagtcagatggacacattaaagaccaaaggctggggggaagagcaaaatcacggagtcaaaacaactcagtttgttccaaaacaatatagacttgttgaaacaaggggacctctatgttcattgagaagtgaaaagaggtgttcaaaggggaaaattactgatacagagacgatggtcggaatcagatttgaaaatgaaagtaggaggggataccaactggagcctgacctatcagaagaagtgtcggcccgactccgcctgggcagtggaagcaatggcttactcaggaggaaagtgtcaataattgagacaaaggaaaagaattgctcaggcaaagagagggacagaagaacggacgatctccttgaacttacagaggacatggaaaaggaaatcagtaatgccctaggccatggcccacaggatgaaatcctaagtagtgctttcaaattgcgaattactcgaggagatattcagacattaaagaactatcactggctcaatgatgaagtcattaatttttacatgaatcttctggtggaaagaaataaaaagcaaggctatccagcacttcatgtattcagtactttcttctatcctaaattaaagtctgggggttaccaagcagtgaaacgatggaccaaaggggtaaatctctttgaacaagaaattattctggtgcctattcatcggaaggtacattggagcctggtggtgattgacctaagaaaaaagtgtcttaaatatctggattctatgggacaaaagggccacaggatctgtgagattctccttcagtatttacaggatgaaagtaagaccaaaagaaatagtgatctgaatcttttagagtggacccatcacagcatgaaaccacacgagattcctcaacagctgaatgggagtgattgtggaatgtttacttgtaaatatgcagattatatttctagggacaaacctatcacatttactcagcaccagatgcctctcttccggaagaagatggtgtgggaaatccttcatcagcagttgctgtgagaaaactttgcctggtccctctagctgctggtggttctttcacagacatttccatatacctcatgcattgtgggttaaaaagtccctgcatcacttctgttctcacaggtactgagctgtcaaaagtgcatgaaggcctctcactgtactctagtcctgacttggggtgcagagggctgcttgcaatcctgtttgtaaggctgtgcctgctcagagctttggactgttcaacccacacaagaacaaacgctaactaatattttttttaagagattcttttccctatgaatgtgggaaatgcaggatttattctgtgaattgtttgtttctgtgtgtttgttcagcgtattcattcactcactcgtttgcaaacataatgggcagtggtcatttactgctgctcttttacagttagctctaaattacttgtttgaactatttatttctgaaaggaatgttactcaagctgccactccctgctgaagagcaggagggaactctcactgggggcggaaggaagtggagctggagcagtaactgccaacatgaagctggagggtt

SEQ ID NO: 30338 - DNA, 2805 bp, Homo sapiens
  source 1..2805: mol_type = unassigned DNA
gggcctctggtagccctggggacgctgtatctgtgggctcttgaatcgcgtcacaaatcagcgaccgaactctggcggtggtggttaagacggcgaaggcggcagcggcggcgacagctctggggtttgcgtctcggggtgtgtcggccgccgctgctgcttgggcctggtatgtacagatggctggttaggattctcggcaccattttccgtttctgcgaccggtcggtgccccctgcccgggccctcctgaagaggcggcgctcagacagcactctgttttctacagtggacactgatgaaataccagccaaaagaccaagattagattgctttattcaccaagtgaaaaacagtctctacaatgctgccagcttatttggattcccattccagctgaccacaaagcccatggtaacttctgcttgtaatggaacacggaatgtggccccttcaggagaggtcaatggaaactctgtctgtcctgtaacttcaaattatcacagttctcaaagaagtcagatggacacattaaagaccaaaggctggggggaagagcaaaatcacggagtcaaaacaactcagtttgttccaaaacaatatagacttgttgaaacaaggggacctctatgttcattgagaagtgaaaagaggtgttcaaaggggaaaattactgatacagagacgatggtcggaatcagatttgaaaatgaaagtaggaggggataccaactggagcctgacctatcagaagaagtgtcggcccgactccgcctgggcagtggaagcaatggcttactcaggaggaaagtgtcaataattgagacaaaggaaaagaattgctcaggcaaagagagggacagaagaacggacgatctccttgaacttacagaggacatggaaaaggaaatcagtaatgccctaggccatggcccacaggatgaaatcctaagtagtgctttcaaattgcgaattactcgaggagatattcagacattaaagaactatcactggctcaatgatgaagtcattaatttttacatgaatcttctggtggaaagaaataaaaagcaaggctatccagcacttcatgtattcagtactttcttctatcctaaattaaagtctgggggttaccaagcagtgaaacgatggaccaaaggggtaaatctctttgaacaagaaattattctggtgcctattcatcggaaggtacattggagcctggtggtgattgacctaagaaaaaagtgtcttaaatatctggattctatgggacaaaagggccacaggatctgtgagattctccttcagtatttacaggatgaaagtaagaccaaaagaaatagtgatctgaatcttttagagtggacccatcacagcatgaaaccacacgagattcctcaacagctgaatgggagtgattgtggaatgtttacttgtaaatatgcagattatatttctagggacaaacctatcacatttactcagcaccagatgcctctcttccggaagaagatggtgtgggaaatccttcatcagcagttgctgtgagaaaactttgcctggtccctctagctgctggtggttctttcacagacatttccatatacctcatgcattgtgggttaaaaagtccctgcatcacttctgttctcacaggtactgagctgtcaaaagtgcatgaaggcctctcactgtactctagtcctgacttggggtgcagagggctgcttgcaatcctgtttgtaaggctgtgcctgctcagagctttggactgttcaacccacacaagaacaaacgctaactaatattttttttaagagattcttttccctatgaatgtgggaaatgcaggatttattctgtgaattgtttgtttctgtgtgtttgttcagcgtattcattcactcactcgtttgcaaacataatgggcagtggtcatttactgctgctcttttacagttagctctaaattacttgtttgaactatttatttctgaaaggaatgttactcaagctgccactccctgctgaagagcaggagggaactctcactgggggcggaaggaagtggagctggagcagtaactgccaacatgaagctggagggtttgggattttttttgtttttgtttttttgaggctcaaaaaatgctgggagaaatgaaaatgctgtgggatagggctcctgttgcctttcagaggaagtctgacactacagcgttggcacagtgccgtgaacagtggaactgtgcccaagggactctgattatccaagcatcttccgaagagtgttgtggtcaccttaaagagacttccccttctggaaatgtggtgacttggcttagtcttcaaactggattcatggatttgaagtaactgtaaaccctaaatcttcattttcatcccagatctggttgagtataaacctcagaattgtaggggctggcctgagctgtttatttcaaaagatactattcaatttaaagctatttttcctcagagtttttgttttctatatattaagtctaaattaagttttctactcattaagactaacatctccccactccatccccactgaaatttgtggaagaaaatttagtacttggctctgaggttgccagttatacaataatctattttgcatatgaaagtttgtatttaacttttttgttcattaaaaaccttactgatatggttataacttcagacagtttagagttggtcagaacatattttgcaagatctagtgcctagtgttgcttttctgatgtaataaaaggtggtctggcagaacct

SEQ ID NO: 30339 - DNA, 2108 bp, Homo sapiens
  source 1..2108: mol_type = unassigned DNA
aaggataatcccactccttggccagtggatggacagtcacccatgtctctactgtggaccacaggacagcgaaggcaccaactggcagacaagtcccagcactctgttttctacagtggacactgatgaaataccagccaaaagaccaagattagattgctttattcaccaagtgaaaaacagtctctacaatgctgccagcttatttggattcccattccagctgaccacaaagcccatggtaacttctgcttgtaatggaacacggaatgtggccccttcaggagaggtattttcgaactcttcatcttgtgaactgacaggttctggatcctggaacaacatgctgaaactgggtaataaatctcctaatggaataagtgactatccaaagatcagagtgacagttacccgagatcagccacgcagagtcctgccttcctttggttttactttgaactcagaaggctgtaatagaagaccaggtggccgtcgccatagcaaaggtaatccagagagttctttaatgtggaaacctcaggaacaggctgtaacagagatgatttctgaagagagtggcaagggtctgaggcgtccccattgtactgtggaggagggtgttcaaaaagaggaaagagagaagtaccgaaagttattggaacgacttaaagaaagtggtcatggaaactctgtctgtcctgtaacttcaaattatcacagttctcaaagaagtcagatggacacattaaagaccaaaggctggggggaagagcaaaatcacggagtcaaaacaactcagtttgttccaaaacaatatagacttgttgaaacaaggggacctctatgttcattgagaagtgaaaagaggtgttcaaaggggaaaattactgatacagagacgatggtcggaatcagatttgaaaatgaaagtaggaggggataccaactggagcctgacctatcagaagaagtgtcggcccgactccgcctgggcagtggaagcaatggcttactcaggaggaaagtgtcaataattgagacaaaggaaaagaattgctcaggcaaagagagggacagaagaacggacgatctccttgaacttacagaggacatggaaaaggaaatcagtaatgccctaggccatggcccacaggatgaaatcctaagtagtgctttcaaattgcgaattactcgaggagatattcagacattaaagaactatcactggctcaatgatgaagtcattaatttttacatgaatcttctggtggaaagaaataaaaagcaaggctatccagcacttcatgtattcagtactttcttctatcctaaattaaagtctgggggttaccaagcagtgaaacgatggaccaaaggggtaaatctctttgaacaagaaattattctggtgcctattcatcggaaggtacattggagcctggtggtgattgacctaagaaaaaagtgtcttaaatatctggattctatgggacaaaagggccacaggatctgtgagattctccttcagtatttacaggatgaaagtaagaccaaaagaaatagtgatctgaatcttttagagtggacccatcacagcatgaaaccacacgagattcctcaacagctgaatgggagtgattgtggaatgtttacttgtaaatatgcagattatatttctagggacaaacctatcacatttactcagcaccagatgcctctcttccggaagaagatggtgtgggaaatccttcatcagcagttgctgtgagaaaactttgcctggtccctctagctgctggtggttctttcacagacatttccatatacctcatgcattgtgggttaaaaagtccctgcatcacttctgttctcacaggtactgagctgtcaaaagtgcatgaaggcctctcactgtactctagtcctgacttggggtgcagagggctgcttgcaatcctgtttgtaaggctgtgcctgctcagagctttggactgttcaacccacacaagaacaaacgctaactaatattttttttaagagattcttttccctatgaatgtgggaaatgcaggatttattctgtgaattgtttgtttctgtgtgtttgt

SEQ ID NO: 30340 - DNA, 2429 bp, Homo sapiens
  source 1..2429: mol_type = unassigned DNA
cccggggctcgcgggaggggaaggaggagggggggaggagtggcggcggcggcggtggcgctggtggcggcggtggcggaggtggaggtggaggtggaagctgaagctgaagcagagccagaggcggcgcggcggggtgctcggcggcgcggcacgcggcccagaagcgttggaatcctgaattgagacggctgcgcctaaagacagcaggagtggcggggccgccgccgtcgccggagagatgagccgggaagcttgaggccggagacgcccgccttcgggcccgtccgcccggcttccccgctcccgggtactggaagatgaaagagactatacaagggaccgggtcctgggggcctgagcctcctggacccggcatacccccagcttactcaagtcccaggcgggagcgtcttcgttggcccccacctcccaaaccccgactcaagtcaggtggagggtttgggccagatcctgggtcagggaccacagtgccagccagacgcctccctgtcccccgaccctcttttgatgcctcagcaagtgaagaggaggaagaagaggaggaggaggaggatgaagatgaagaggaggaagtggcagcttggaggctgcccccaagatggagtcagctgggaacctcccagcggccccgcccttcccgccccactcatcgaaaaacctgctcacagcgccgccgccgagccatgagagccttccggatgctgctctactcaaaaagcacctcgctgacattccactggaagctttgggggcgccaccggggccggcggcggggcctcgcacaccccaagaaccatctttcaccccagcaagggggtgcgacgccacaggtgccatccccctgttgtcgttttgactccccccgggggccacctccaccccggctgggtctgctaggtgctctcatggctgaggatggggtgagagggtctccaccagtgccctctgggccccccatggaggaagatggactcaggtggactccaaagtctcctctggaccctgactcgggcctcctttcatgtactctgcccaacggttttgggggacaatctgggccagaaggggagcgcagcttggcaccccctgatgccagcatcctcatcagcaatgtgtgcagcatcggggaccatgtggcccaggagctttttcagggctcagatttgggcatggcagaagaggcagagaggcctggggagaaagccggccagcacagccccctgcgagaggagcatgtgacctgcgtacagagcatcttggacgaattccttcaaacgtatggcagcctcatacccctcagcactgatgaggtagtagagaagctggaggacattttccagcaggagttttccaccccttccaggaagggcctggtgttgcagctgatccagtcttaccagcggatgccaggcaatgccatggtgaggggcttccgagtggcttataagcggcacgtgctgaccatggatgacttggggaccttgtatggacagaactggctcaatgaccaggtgatgaacatgtatggagacctggtcatggacacagtccctgaaaaggtgcatttcttcaatagtttcttctatgataaactccgtaccggttatgatggggtgaaaaggtggaccaaaaacgtggacatcttcaataaggagctactgctaatccccatccacctggaggtgcattggtccctcatctctgttgatgtgaggcgacgcaccatcacctattttgactcgcagcgtaccctaaaccgccgctgccctaagcatattgccaagtatctacaggcagaggcggtaaagaaagaccgactggatttccaccagggctggaaaggttacttcaaaatgaatgtggccaggcagaataatgacagtgactgtggtgcttttgtgttgcagtactgcaagcatctggccctgtctcagccattcagcttcacccagcaggacatgcccaaacttcgtcggcagatctacaaggagctgtgtcactgcaaactcactgtgtgagcctcgtaccccagaccccaagcccataaatgggaagggagacatgggagtcccttcccaagaaactccagttcctttcctctcttgcctcttcccactcacttccctttggtttttcatatttaaatgtttcaatttctgtatttttttttctttgagagaatacttgttgatttctgatgtgcagggggtggctacagaaaagcccctttcttcctctgtttgcaggggagtgtggccctgtggcctgggtggagcagtcatcctcccccttccccgtgcagggagcaggaaatcagtgctgggggtggtgggcggacaataggatcactgcctgccagatcttcaaacttttatatatatatatatatatatatatatatatat

SEQ ID NO: 30341 - DNA, 2222 bp, Homo sapiens
  source 1..2222: mol_type = unassigned DNA
ccgccttcgggcccgtccgcccggcttccccgctcccgggtactggaagatgaaagagactatacaagggaccgggtcctgggggcctgagcctcctggacccggcatacccccagcttactcaagtcccaggcgggagcgtcttcgttggcccccacctcccaaaccccgactcaagtcaggtggagggtttgggccagatcctgggtcagggaccacagtgccagccagacgcctccctgtcccccgaccctcttttgatgcctcagcaagtgaagaggaggaagaagaggaggaggaggaggatgaagatgaagaggaggaagtggcagcttggaggctgcccccaagatggagtcagctgggaacctcccagcggccccgcccttcccgccccactcatcgaaaaacctgctcacagcgccgccgccgagccatgagagccttccggatgctgctctactcaaaaagcacctcgctgacattccactggaagctttgggggcgccaccggggccggcggcggggcctcgcacaccccaagaaccatctttcaccccagcaagggggtgcgacgccacaggtgccatccccctgttgtcgttttgactccccccgggggccacctccaccccggctgggtctgctaggtgctctcatggctgaggatggggtgagagggtctccaccagtgccctctgggccccccatggaggaagatggactcaggtggactccaaagtctcctctggaccctgactcgggcctcctttcatgtactctgcccaacggttttgggggacaatctgggccagaaggggagcgcagcttggcaccccctgatgccagcatcctcatcagcaatgtgtgcagcatcggggaccatgtggcccaggagctttttcagggctcagatttgggcatggcagaagaggcagagaggcctggggagaaagccggccagcacagccccctgcgagaggagcatgtgacctgcgtacagagcatcttggacgaattccttcaaacgtatggcagcctcatacccctcagcactgatgaggtagtagagaagctggaggacattttccagcaggagttttccaccccttccaggaagggcctggtgttgcagctgatccagtcttaccagcggatgccaggcaatgccatggtgaggggcttccgagtggcttataagcggcacgtgctgaccatggatgacttggggaccttgtatggacagaactggctcaatgaccaggtgatgaacatgtatggagacctggtcatggacacagtccctgaaaaggtgcatttcttcaatagtttcttctatgataaactccgtaccaagggttatgatggggtgaaaaggtggaccaaaaacgtggacatcttcaataaggagctactgctaatccccatccacctggaggtgcattggtccctcatctctgttgatgtgaggcgacgcaccatcacctattttgactcgcagcgtaccctaaaccgccgctgccctaagcatattgccaagtatctacaggcagaggcggtaaagaaagaccgactggatttccaccagggctggaaaggttacttcaaaatgaatgtggccaggcagaataatgacagtgactgtggtgcttttgtgttgcagtactgcaagcatctggccctgtctcagccattcagcttcacccagcaggacatgcccaaacttcgtcggcagatctacaaggagctgtgtcactgcaaactcactgtgtgagcctcgtaccccagaccccaagcccataaatgggaagggagacatgggagtcccttcccaagaaactccagttcctttcctctcttgcctcttcccactcacttccctttggtttttcatatttaaatgtttcaatttctgtatttttttttctttgagagaatacttgttgatttctgatgtgcagggggtggctacagaaaagcccctttcttcctctgtttgcaggggagtgtggccctgtggcctgggtggagcagtcatcctcccccttccccgtgcagggagcaggaaatcagtgctgggggtggtgggcggacaataggatcactgcctgccagatcttcaaacttttatatatatatatatatatatatatatatatataaaaatatataaatgccacggtcctgctctggtcaataaaggatcctttgttgatacgtaa

SEQ ID NO: 30342 - DNA, 3894 bp, Homo sapiens
  source 1..3894: mol_type = unassigned DNA
ggcggggctgtaccggaagttgcctctacttccgcccgttccggggcggggcttacttcgcagcgactacttgccgcacttccgggctgccaggcagctgctgtggctccaggatgatggagacagagcgacttgtgctaccccctccagatcccctggacctaccccttcgggccgtggagctcggatgcacggggcactgggagctgctgaacttgcctggagctccagagagtagccttccccatggcctccctccttgtgccccagatctgcagcaagaagcagaacagttgtttctgtcatccccagcctggctgcctctgcatggtgtggagcactcagcccgaaaatggcagaggaagacggatccctggtctcttttggctgtcctgggagccccagtcccatccgacctacaggcccaaagacacccaaccacaggccagatactgggttacaaagaggtcttgctggagaacacaaatctctcggctacaacctccttgtctcttcgccggcctccagggccagcctcccagtccttatggggaaatccaactcagtatcccttctggccaggggggatggatgaacccaccataacagatctgaacacacgggaggaggctgaggaggagatagactttgagaaagatcttcttactattccacctggtttcaagaaaggcatggactttgcaccaaaagattgtccaactccagctcctggactactaagccttagctgtatgttggagcctctggatttgggtgggggtgacgaggatgagaatgaggcagtgggacagccaggaggtcccagaggggacactgtttcagcctctccctgcagtgctcccctggcccgagcaagcagcttggaagacctagtgttgaaggaagcgtccacagctgtatccaccccagaggccccagagcctccatctcaggagcagtgggccatccctgtggacgccacctcccctgttggtgatttctatcgcctcattccccagccagccttccagtgggcatttgagccagatgtgtttcagaaacaggccatcctgcacttggaacggcatgactctgtctttgtcgcagctcacacatctgcaggaaaaacagttgtggctgaatatgccattgccctggcccagaaacacatgacacgcaccatctacacttcgcccatcaaggccctgagcaaccagaagttccgggacttccgaaacacattcggggatgtggggctgctcaccggggatgtacagctgcatccggaggcctcctgcctcatcatgaccacagagatccttcgctccatgctgtacagtggctcagatgttattcgggacctggagtgggtcatctttgatgaggttcactatatcaacgatgtcgagcgtggggtcgtgtgggaggaggtgcttatcatgctacctgaccacgtttctatcatccttctgagtgccaccgtccccaacgcccttgagtttgctgactggattgggcggctgaagcgtcgtcagatctatgtgattagcactgtaacccgccccgtgcccctggagcactatcttttcacagggaacagctccaagacccagggggagctctttttgttgctggactcccgaggagccttccatacaaaagggtactatgcagctgtggaggccaagaaggagagaatgagcaaacacgcccagacctttggggccaagcagcccacacatcaggggggccctgcacaggaccgcggagtgtacctgtccctcctggcctccctccgcacacgtgcccagttgcccgtggtggtgttcaccttctcccggggccgctgtgatgagcaggcctcaggcctcacctcccttgacctcaccaccagttcggagaagagcgagatccacctcttcctgcagcgctgccttgctcgcctccgtggctctgaccgccagctgccccaggtcctgcacatgtcagagctcctgaatcgcggcctgggtgtgcaccatagcggcatcctgcccatcctcaaggagatcgtggagatgctcttcagccgtggcctggtcaaggtcttgtttgccacagagacctttgccatgggagtaaacatgcctgctcgtacagtagtgtttgactccatgcgcaaacacgatggctccaccttccgggacctgctccctggggagtatgtgcagatggcaggccgggcagggcggaggggcctggaccccacaggcaccgttatcctgctctgcaagggccgagtgcccgagatggcagacctgcaccgcatgatgatggggaagccgtcccagctgcagtcccagttccgcctcacgtacactatgatcctcaacttgctgcgagtggatgccctcagggtggaggacatgatgaagaggagcttctctgagtttccctcccgcaaagacagcaaggcccatgaacaggccctggctgaactgaccaagaggctgggagctttggaggagcctgacatgactggccaactggtcgacctgcctgaatattacagctggggggaggaactgacagagacccagcacatgatccagcgacgcatcatggagtctgtgaacgggctgaagtctctctcagcaggaagggtggtggttgtgaagaatcaggagcatcacaacgcattgggagtgatcctacaggtctcctcgaactccaccagcagagtattcacaaccctggtcttgtgtgataagcccttgtcccaggacccacaggacagggggccagccactgcagaggtgccctatccagatgacctcgtgggattcaagctgttcctgcctgaagggccttgtgaccacaccgtggtcaagctccagccaggagatatggctgccatcaccaccaaggtgctccgggtgaatggggagaagatcttggaggacttcagcaagaggcagcagccaaaattcaagaaggatcctccccttgcagccgtgaccactgctgtccaggaactgctgcgtctggctcaggcccacccagccggacctcccaccctcgaccctgtcaatgacctgcagctcaaagatatgtcagttgtagagggtgggctccgggcccggaagctggaggagctgatccagggggctcagtgtgtacacagcccccgttttcctgcccagtacctgaagctgcgggagcgaatgcagatacagaaggagatggagcggctgcgcttcctactgtcggatcagtcattgctgctgcttcctgagtaccatcagcgagtagaggtgctccgaaccctgggttatgtggacgaggcgggcactgtgaagctggcagggcgggtggcttgtgccatgagcagccatgagttgctcctcactgagctcatgtttgacaatgcactgagcaccctgcggcctgaggagattgctgccttgctctctggcctggtctgccagagccctggggacgctggggatcagctcccaaacaccctcaagcagggaatagaacgtgtccgggctgtggccaagcggattggtgaggtccaggtggcttgtggcctgaaccagacggtggaggaatttgtgggggagctgaattttgggctggttgaggttgtatatgagtgggcccggggcatgcccttctccgagttggcagggctctcagggacccctgagggcctggtggtccgctgcattcagcgcctggctgagatgtgtcgctcactgcggggggcagcccgcctggtaggagagcctgtgctgggtgccaagatggagacagcggctaccttgctacggcgggacatcgtatttgcggccagcctctacacccagtgaatgccccatgtaaaaacatgatgataaaacagcaaagcac

SEQ ID NO: 30343 - DNA, 3890 bp, Homo sapiens
  source 1..3890: mol_type = unassigned DNA
ggcggggctgtaccggaagttgcctctacttccgcccgttccggggcggggcttacttcgcagcgactacttgccgcacttccgggctgccaggcagctgctgtggctccaggatgatggagacagagcgacttgtgctaccccctccagatcccctggacctaccccttcgggccgtggagctcggatgcacggggcactgggagctgctgaacttgcctggagctccagagagtagccttccccatggcctccctccttgtgccccagatctgcagcaagaagcagaacagttgtttctgtcatccccagcctggctgcctctgcatggtgtggagcactcagcccgaaaatggcagaggaagacggatccctggtctcttttggctgtcctgggagccccagtcccatccgacctacaggcccaaagacacccaaccacaggccagatactgggttacaaagaggtcttgctggagaacacaaatctctcggctacaacctccttgtctcttcgccggcctccagggccagcctcccagtccttatggggaaatccaactcagtatcccttctggccaggggggatggatgaacccaccataacagatctgaacacacgggaggaggctgaggaggagatagactttgagaaagatcttcttactattccacctggtttcaagaaaggcatggactttgcaccaaaagattgtccaactccagctcctggactactaagccttagctgtctgttggagcctctggatttgggtgggggtgacgaggatgagaatgaggcagtgggacagccaggaggtcccagaggggacactgtttcagcctctccctgcagtgctcccctggcccgagcaagcagcttggaagacctagtgttgaaggaagcgtccacagctgtatccaccccagaggccccagagcctccatctcaggagcagtgggccatccctgtggacgccacctcccctgttggtgatttctatcgcctcattccccagccagccttccagtgggcatttgagccagatgtgtttcagaaacaggccatcctgcacttggaacggcatgactctgtctttgtcgcagctcacacatctgcaggaaaaacagttgtggctgaatatgccattgccctggcccagaaacacatgacacgcaccatctacacttcgcccatcaaggccctgagcaaccagaagttccgggacttccgaaacacattcggggatgtggggctgctcaccggggatgtacagctgcatccggaggcctcctgcctcatcatgaccacagagatccttcgctccatgctgtacagtggctcagatgttattcgggacctggagtgggtcatctttgatgaggttcactatatcaacgatgtcgagcgtggggtcgtgtgggaggaggtgcttatcatgctacctgaccacgtttctatcatccttctgagtgccaccgtccccaacgcccttgagtttgctgactggattgggcggctgaagcgtcgtcagatctatgtgattagcactgtaacccgccccgtgcccctggagcactatcttttcacagggaacagctccaagacccagggggagctctttttgttgctggactcccgaggagccttccatacaaaagggtactatgcagctgtggaggccaagaaggagagaatgagcaaacacgcccagacctttggggccaagcagcccacacatcaggggggccctgcacaggaccgcggagtgtacctgtccctcctggcctccctccgcacacgtgcccagttgcccgtggtggtgttcaccttctcccggggccgctgtgatgagcaggcctcaggcctcacctcccttgacctcaccaccagttcggagaagagcgagatccacctcttcctgcagcgctgccttgctcgcctccgtggctctgaccgccagctgccccaggtcctgcacatgtcagagctcctgaatcgcggcctgggtgtgcaccatagcggcatcctgcccatcctcaaggagatcgtggagatgctcttcagccgtggcctggtcaaggtcttgtttgccacagagacctttgccatgggagtaaacatgcctgctcgtacagtagtgtttgactccatgcgcaaacacgatggctccaccttccgggacctgctccctggggagtatgtgcagatggcaggccgggcagggcggaggggcctggaccccacaggcaccgttatcctgctctgcaagggccgagtgcccgagatggcagacctgcaccgcatgatgatggggaagccgtcccagctgcagtcccagttccgcctcacgtacactatgatcctcaacttgctgcgagtggatgccctcagggtggaggacatgatgaagaggagcttctctgagtttccctcccgcaaagacagcaaggcccatgaacaggccctggctgaactgaccaagaggctgggagctttggaggagcctgacatgactggccaactggtcgacctgcctgaatattacagctggggggaggaactgacagagacccagcacatgatccagcgacgcatcatggagtctgtgaacgggctgaagtctctctcagcaggaagggtggtggttgtgaagaatcaggagcatcacaacgcattgggagtgatcctacaggtctcctcgaactccaccagcagagtattcacaaccctggtcttgtgtgataagcccttgtcccaggacccacaggacagggggccagccactgcagaggtgccctatccagatgacctcgtgggattcaagctgttcctgcctgaagggccttgtgaccacaccgtggtcaagctccagccaggagatatggctgccatcaccaccaaggtgctccgggtgaatggggagaagatcttggaggacttcagcaagaggcagcagccaaaattcaagaaggatcctccccttgcagccgtgaccactgctgtccaggaactgctgcgtctggctcaggcccacccagccggacctcccaccctcgaccctgtcaatgacctgcagctcaaagatatgtcagttgtagagggtgggctccgggcccggaagctggaggagctgatccagggggctcagtgtgtacacagcccccgttttcctgcccagtacctgaagctgcgggagcgaatgcagatacagaaggagatggagcggctgcgcttcctactgtcggatcagtcattgctgctgcttcctgagtaccatcagcgagtagaggtgctccgaaccctgggttacgtggacgaggcgggcactgtgaagctggcagggcgggtggcttgtgccatgagcagccatgagttgctcctcactgagctcatgtttgacaatgcactgagcaccctgcggcctgaggagattgctgccttgctctctggcctggtctgccagagccctggggacgctggggatcagctcccaaacaccctcaagcagggaatagaacgtgtccgggctgtggccaagcggattggtgaggtccaggtggcttgtggcctgaaccagacggtggaggaatttgtgggggagctgaattttgggctggttgaggttgtatatgagtgggcccggggcatgcccttctccgagttggcagggctctcagggacccctgagggcctggtggtccgctgcattcagcgcctggctgagatgtgtcgctcactgcggggggcagcccgcctggtaggagagcctgtgctgggtgccaagatggagacagcggctaccttgctacggcgggacatcgtatttgcggccagcctctacacccagtgaatgccccatgtaaaaacatgatgataaaacagcaaa

SEQ ID NO: 30344 - DNA, 3890 bp, Homo sapiens; identical to SEQ ID NO: 30343
  source 1..3890: mol_type = unassigned DNA

SEQ ID NO: 30345 - DNA, 3890 bp, Homo sapiens; identical to SEQ ID NO: 30343
  source 1..3890: mol_type = unassigned DNA

SEQ ID NO: 30346 - DNA, 3890 bp, Homo sapiens
  source 1..3890: mol_type = unassigned DNA
ggcggggctgtaccggaagttgcctctacttccgcccgttccggggcggggcttacttcgcagcgactacttgccgcacttccgggctgccaggcagctgctgtggctccaggatgatggagacagagcgacttgtgctaccccctccagatcccctggacctaccccttcgggccgtggagctcggatgcacggggcactgggagctgctgaacttgcctggagctccagagagtagccttccccatggcctccctccttgtgccccagatctgcagcaagaagcagaacagttgtttctgtcatccccagcctggctgcctctgcatggtgtggagcactcagcccgaaaatggcagaggaagacggatccctggtctcttttggctgtcctgggagccccagtcccatccgacctacaggcccaaagacacccaaccacaggccagatactgggttacaaagaggtcttgctggagaacacaaatctctcggctacaacctccttgtctcttcgccggcctccagggccagcctcccagtccttatggggaaatccaactcagtatcccttctggccaggggggatggatgaacccaccataacagatctgaacacacgggaggaggctgaggaggagatagactttgagaaagatcttcttactattccacctggtttcaagaaaggcatggactttgcaccaaaagattgtccaactccagctcctggactactaagccttagctgtctgttggagcctctggatttgggtgggggtgacgaggatgagaatgaggcagtgggacagccaggaggtcccagaggggacactgtttcagcctctccctgcagtgctcccctggcccgagcaagcagcttggaagacctagtgttgaaggaagcgtccacagctgtatccaccccagaggccccagagcctccatctcaggagcagtgggccatccctgtggacgccacctcccctgttggtgatttctatcgcctcattccccagccagccttccagtgggcatttgagccagatgtgtttcagaaacaggccatcctgcacttggaacggcatgactctgtctttgtcgcagctcacacatctgcaggaaaaacagttgtggctgaatatgccattgctctggcccagaaacacatgacacgcaccatctacacttcgcccatcaaggccctgagcaaccagaagttccgggacttccgaaacacattcggggatgtggggctgctcaccggggatgtacagctgcatccggaggcctcctgcctcatcatgaccacagagatccttcgctccatgctgtacagtggctcagatgttattcgggacctggagtgggtcatctttgatgaggttcactatatcaacgatgtcgagcgtggggtcgtgtgggaggaggtgcttatcatgctacctgaccacgtttctatcatccttctgagtgccaccgtccccaacgcccttgagtttgctgactggattgggcggctgaagcgtcgtcagatctatgtgattagcactgtaacccgccccgtgcccctggagcactatcttttcacagggaacagctccaagacccagggggagctctttttgttgctggactcccgaggagccttccatacaaaagggtactatgcagctgtggaggccaagaaggagagaatgagcaaacacgcccagacctttggggccaagcagcccacacatcaggggggccctgcacaggaccgcggagtgtacctgtccctcctggcctccctccgcacacgtgcccagttgcccgtggtggtgttcaccttctcccggggccgctgtgatgagcaggcctcaggcctcacctcccttgacctcaccaccagttcggagaagagcgagatccacctcttcctgcagcgctgccttgctcgcctccgtggctctgaccgccagctgccccaggtcctgcacatgtcagagctcctgaatcgcggcctgggtgtgcaccatagcggcatcctgcccatcctcaaggagatcgtggagatgctcttcagccgtggcctggtcaaggtcttgtttgccacagagacctttgccatgggagtaaacatgcctgctcgtacagtagtgtttgactccatgcgcaaacacgatggctccaccttccgggacctgctccctggggagtatgtgcagatggcaggccgggcagggcggaggggcctggaccccacaggcaccgttatcctgctctgcaagggccgagtgcccgagatggcagacctgcaccgcatgatgatggggaagccgtcccagctgcagtcccagttccgcctcacgtacactatgatcctcaacttgctgcgagtggatgccctcagggtggaggacatgatgaagaggagcttctctgagtttccctcccgcaaagacagcaaggcccatgaacaggccctggctgaactgaccaagaggctgggagctttggaggagcctgacatgactggccaactggtcgacctgcctgaatattacagctggggggaggaactgacagagacccagcacatgatccagcgacgcatcatggagtctgtgaacgggctgaagtctctctcagcaggaagggtggtggttgtgaagaatcaggagcatcacaacgcattgggagtgatcctacaggtctcctcgaactccaccagcagagtattcacaaccctggtcttgtgtgataagcccttgtcccaggacccacaggacagggggccagccactgcagaggtgccctatccagatgacctcgtgggattcaagctgttcctgcctgaagggccttgtgaccacaccgtggtcaagctccagccaggagatatggctgccatcaccaccaaggtgctccgggtgaatggggagaagatcttggaggacttcagcaagaggcagcagccaaaattcaagaaggatcctccccttgcagccgtgaccactgctgtccaggaactgctgcgtctggctcaggcccacccagccggacctcccaccctcgaccctgtcaatgacctgcagctcaaagatatgtcagttgtagagggtgggctccgggcccggaagctggaggagctgatccagggggctcagtgtgtacacagcccccgttttcctgcccagtacctgaagctgcgggagcgaatgcagatacagaaggagatggagcggctgcgcttcctactgtcggatcagtcattgctgctgcttcctgagtaccatcagcgagtagaggtgctccgaaccctgggttacgtggacgaggcgggcactgtgaagctggcagggcgggtggcttgtgccatgagcagccatgagttgctcctcactgagctcatgtttgacaatgcactgagcaccctgcggcctgaggagattgctgccttgctctctggcctggtctgccagagccctggggacgctggggatcagctcccaaacaccctcaagcagggaatagaacgtgtccgggctgtggccaagcggattggtgaggtccaggtggcttgtggcctgaaccagacggtggaggaatttgtgggggagctgaattttgggctggttgaggttgtatatgagtgggcccggggcatgcccttctccgagttggcagggctctcagggacccctgagggcctggtggtccgctgcattcagcgcctggctgagatgtgtcgctcactgcggggggcagcccgcctggtaggagagcctgtgctgggtgccaagatggagacagcggctaccttgctacggcgggacatcgtatttgcggccagcctctacacccagtgaatgccccatgtaaaaacatgatgataaaacagcaaa

SEQ ID NO: 30347 - DNA, 3535 bp, Homo sapiens
  source 1..3535: mol_type = unassigned DNA
ttcgcagcgactacttgccgcacttccgggctgccaggcagctgctgtggctccaggatgatggagacagagcgacttgtgctaccccctccagatcccctggacctaccccttcgggccgtggagctcggatgcacggggcactgggagctgctgaacttgcctggagctccagagagtagcctcccagtccttatggggaaatccaactcagtatcccttctggccaggggggatggatgaacccaccataacagatctgaacacacgggaggaggctgaggaggagatagactttgagaaagatcttcttactattccacctggtttcaagaaaggcatggactttgcaccaaaagattgtccaactccagctcctggactactaagccttagctgtatgttggagcctctggatttgggtgggggtgacgaggatgagaatgaggcagtgggacagccaggaggtcccagaggggacactgtttcagcctctccctgcagtgctcccctggcccgagcaagcagcttggaagacctagtgttgaaggaagcgtccacagctgtatccaccccagaggccccagagcctccatctcaggagcagtgggccatccctgtggacgccacctcccctgttggtgatttctatcgcctcattccccagccagccttccagtgggcatttgagccagatgtgtttcagaaacaggccatcctgcacttggaacggcatgactctgtctttgtcgcagctcacacatctgcaggaaaaacagttgtggctgaatatgccattgccctggcccagaaacacatgacacgcaccatctacacttcgcccatcaaggccctgagcaaccagaagttccgggacttccgaaacacattcggggatgtggggctgctcaccggggatgtacagctgcatccggaggcctcctgcctcatcatgaccacagagatccttcgctccatgctgtacagtggctcagatgttattcgggacctggagtgggtcatctttgatgaggttcactatatcaacgatgtcgagcgtggggtcgtgtgggaggaggtgcttatcatgctacctgaccacgtttctatcatccttctgagtgccaccgtccccaacgcccttgagtttgctgactggattgggcggctgaagcgtcgtcagatctatgtgattagcactgtaacccgccccgtgcccctggagcactatcttttcacagggaacagctccaagacccagggggagctctttttgttgctggactcccgaggagccttccatacaaaagggtactatgcagctgtggaggccaagaaggagagaatgagcaaacacgcccagacctttggggccaagcagcccacacatcaggggggccctgcacaggaccgcggagtgtacctgtccctcctggcctccctccgcacacgtgcccagttgcccgtggtggtgttcaccttctcccggggccgctgtgatgagcaggcctcaggcctcacctcccttgacctcaccaccagttcggagaagagcgagatccacctcttcctgcagcgctgccttgctcgcctccgtggctctgaccgccagctgccccaggtcctgcacatgtcagagctcctgaatcgcggcctgggtgtgcaccatagcggcatcctgcccatcctcaaggagatcgtggagatgctcttcagccgtggcctggtcaaggtcttgtttgccacagagacctttgccatgggagtaaacatgcctgctcgtacagtagtgtttgactccatgcgcaaacacgatggctccaccttccgggacctgctccctggggagtatgtgcagatggcaggccgggcagggcggaggggcctggaccccacaggcaccgttatcctgctctgcaagggccgagtgcccgagatggcagacctgcaccgcatgatgatggggaagccgtcccagctgcagtcccagttccgcctcacgtacactatgatcctcaacttgctgcgagtggatgccctcagggtggaggacatgatgaagaggagcttctctgagtttccctcccgcaaagacagcaaggcccatgaacaggccctggctgaactgaccaagaggctgggagctttggaggagcctgacatgactggccaactggtcgacctgcctgaatattacagctggggggaggaactgacagagacccagcacatgatccagcgacgcatcatggagtctgtgaacgggctgaagtctctctcagcaggaagggtggtggttgtgaagaatcaggagcatcacaacgcattgggagtgatcctacaggtctcctcgaactccaccagcagagtattcacaaccctggtcttgtgtgataagcccttgtcccaggacccacaggacagggggccagccactgcagaggtgccctatccagatgacctcgtgggattcaagctgttcctgcctgaagggccttgtgaccacaccgtggtcaagctccagccaggagatatggctgccatcaccaccaaggtgctccgggtgaatggggagaagatcttggaggacttcagcaagaggcagcagccaaaattcaagaaggatcctccccttgcagccgtgaccactgctgtccaggaactgctgcgtctggctcaggcccacccagccggacctcccaccctcgaccctgtcaatgacctgcagctcaaagatatgtcagttgtagagggtgggctccgggcccggaagctggaggagctgatccagggggctcagtgtgtacacagcccccgttttcctgcccagtacctgaagctgcgggagcgaatgcagatacagaaggagatggagcggctgcgcttcctactgtcggatcagtcattgctgctgcttcctgagtaccatcagcgagtagaggtgctccgaaccctgggttatgtggacgaggcgggcactgtgaagctggcagggcgggtggcttgtgccatgagcagccatgagttgctcctcactgagctcatgtttgacaatgcactgagcaccctgcggcctgaggagattgctgccttgctctctggcctggtctgccagagccctggggacgctggggatcagctcccaaacaccctcaagcagggaatagaacgtgtccgggctgtggccaagcggattggtgaggtccaggtggcttgtggcctgaaccagacggtggaggaatttgtgggggagctgaattttgggctggttgaggttgtatatgagtgggcccggggcatgcccttctccgagttggcagggctctcagggacccctgagggcctggtggtccgctgcattcagcgcctggctgagatgtgtcgctcactgcggggggcagcccgcctggtaggagagcctgtgctgggtgccaagatggagacagcggctaccttgctacggcgggacatcgtatttgcggccagcctctacacccagtgaatgccccatgtaaaaacatgatgataaaacagc

SEQ ID NO: 30348 - DNA, 3890 bp, Homo sapiens
  source 1..3890: mol_type = unassigned DNA
ggcggggctgtaccggaagttgcctctacttccgcccgttccggggcggggcttacttcgcagcgactacttgccgcacttccgggctgccaggcagctgctgtggctccaggatgatggagacagagcgacttgtgctaccccctccagatcccctggacctaccccttcgggccgtggagctcggatgcacggggcactgggagctgctgaacttgcctggagctccagagagtagccttccccatggcctccctccttgtgccccagatctgcagcaagaagcagaacagttgtttctgtcatccccagcctggctgcctctgcatggtgtggagcactcagcccgaaaatggcagaggaagacggatccctggtctcttttggctgtcctgggagccccagtcccatccgacctacaggcccaaagacacccaaccacaggccagatactgggttacaaagaggtcttgctggagaacacaaatctctcggctacaacctccttgtctcttcgccggcctccagggccagcctcccagtccttatggggaaatccaactcagtatcccttctggccaggggggatggatgaacccaccataacagatctgaacacacgggaggaggctgaggaggagatagactttgagaaagatcttcttactattccacctggtttcaagaaaggcatggactttgcaccaaaagattgtccaactccagctcctggactactaagccttagctgtatgttggagcctctggatttgggtgggggtgacgaggatgagaatgaggcagtgggacagccaggaggtcccagaggggacactgtttcagcctctccctgcagtgctcccctggcccgagcaagcagcttggaagacctagtgttgaaggaagcgtccacagctgtatccaccccagaggccccagagcctccatctcaggagcagtgggccatccctgtggacgccacctcccctgttggtgatttctatcgcctcattccccagccagccttccagtgggcatttgagccagatgtgtttcagaaacaggccatcctgcacttggaacggcatgactctgtctttgtcgcagctcacacatctgcaggaaaaacagttgtggctgaatatgccattgccctggcccagaaacacatgacacgcaccatctacacttcgcccatcaaggccctgagcaaccagaagttccgggacttccgaaacacattcggggatgtggggctgctcaccggggatgtacagctgcatccggaggcctcctgcctcatcatgaccacagagatccttcgctccatgctgtacagtggctcagatgttattcgggacctggagtgggtcatctttgatgaggttcactatatcaacgatgtcgagcgtggggtcgtgtgggaggaggtgcttatcatgctacctgaccacgtttctatcatccttctgagtgccaccgtccccaacgcccttgagtttgctgactggattgggcggctgaagcgtcgtcagatctatgtgattagcactgtaacccgccccgtgcccctggagcactatcttttcacagggaacagctccaagacccagggggagctctttttgttgctggactcccgaggagccttccatacaaaagggtactatgcagctgtggaggccaagaaggagagaatgagcaaacacgcccagacctttggggccaagcagcccacacatcaggggggccctgcacaggaccgcggagtgtacctgtccctcctggcctccctccgcacacgtgcccagttgcccgtggtggtgttcaccttctcccggggccgctgtgatgagcaggcctcaggcctcacctcccttgacctcaccaccagttcggagaagagcgagatccacctcttcctgcagcgctgccttgctcgcctccgtggctctgaccgccagctgccccaggtcctgcacatgtcagagctcctgaatcgcggcctgggtgtgcaccatagcggcatcctgcccatcctcaaggagatcgtggagatgctcttcagccgtggcctggtcaaggtcttgtttgccacagagacctttgccatgggagtaaacatgcctgctcgtacagtagtgtttgactccatgcgcaaacacgatggctccaccttccgggacctgctccctggggagtatgtgcagatggcaggccgggcagggcggaggggcctggaccccacaggcaccgttatcctgctctgcaagggccgagtgcccgagatggcagacctgcaccgcatgatgatggggaagccgtcccagctgcagtcccagttccgcctcacgtacactatgatcctcaacttgctgcgagtggatgccctcagggtggaggacatgatgaagaggagcttctctgagtttccctcccgcaaagacagcaaggcccatgaacaggccctggctgaactgaccaagaggctgggagctttggaggagcctgacatgactggccaactggtcgacctgcctgaatattacagctggggggaggaactgacagagacccagcacatgatccagcgacgcatcatggagtctgtgaacgggctgaagtctctctcagcaggaagggtggtggttgtgaagaatcaggagcatcacaacgcattgggagtgatcctacaggtctcctcgaactccaccagcagagtattcacaaccctggtcttgtgtgataagcccttgtcccaggacccacaggacagggggccagccactgcagaggtgccctatccagatgacctcgtgggattcaagctgttcctgcctgaagggccttgtgaccacaccgtggtcaagctccagccaggagatatggctgccatcaccaccaaggtgctccgggtgaatggggagaagatcttggaggacttcagcaagaggcagcagccaaaattcaagaaggatcctccccttgcagccgtgaccactgctgtccaggaactgctgcgtctggctcaggcccacccagccggacctcccaccctcgaccctgtcaatgacctgcagctcaaagatatgtcagttgtagagggtgggctccgggcccggaagctggaggagctgatccagggggctcagtgtgtacacagcccccgttttcctgcccagtacctgaagctgcgggagcgaatgcagatacagaaggagatggagcggctgcgcttcctactgtcggatcagtcattgctgctgcttcctgagtaccatcagcgagtagaggtgctccgaaccctgggttatgtggacgaggcgggcactgtgaagctggcagggcgggtggcttgtgccatgagcagccatgagttgctcctcactgagctcatgtttgacaatgcactgagcaccctgcggcctgaggagattgctgccttgctctctggcctggtctgccagagccctggggacgctggggatcagctcccaaacaccctcaagcagggaatagaacgtgtccgggctgtggccaagcggattggtgaggtccaggtggcttgtggcctgaaccagacggtggaggaatttgtgggggagctgaattttgggctggttgaggttgtatatgagtgggcccggggcatgcccttctccgagttggcagggctctcagggacccctgagggcctggtggtccgctgcattcagcgcctggctgagatgtgtcgctcactgcggggggcagcccgcctggtaggagagcctgtgctgggtgccaagatggagacagcggctaccttgctacggcgggacatcgtatttgcggccagcctctacacccagtgaatgccccatgtaaaaacatgatgataaaacagcaaa

SEQ ID NO: 30349 - DNA, 3378 bp, Homo sapiens
  source 1..3378: mol_type = unassigned DNA
aggcagctgctgtggctccaggatgatggagacagagcgacttgtgctaccccctccagatcccctggacctaccccttcgggccgtggagctcggatgcacggggcactgggagctgctgaacttgcctggagctccagagagtagcatcttcttactattccacctggtttcaagaaaggcatggactttgcaccaaaagattgtccaactccagctcctggactactaagccttagctgtatgttggagcctctggatttgggtgggggtgacgaggatgagaatgaggcagtgggacagccaggaggtcccagaggggacactgtttcagcctctccctgcagtgctcccctggcccgagcaagcagcttggaagacctagtgttgaaggaagcgtccacagctgtatccaccccagaggccccagagcctccatctcaggagcagtgggccatccctgtggacgccacctcccctgttggtgatttctatcgcctcattccccagccagccttccagtgggcatttgagccagatgtgtttcagaaacaggccatcctgcacttggaacggcatgactctgtctttgtcgcagctcacacatctgcaggaaaaacagttgtggctgaatatgccattgccctggcccagaaacacatgacacgcaccatctacacttcgcccatcaaggccctgagcaaccagaagttccgggacttccgaaacacattcggggatgtggggctgctcaccggggatgtacagctgcatccggaggcctcctgcctcatcatgaccacagagatccttcgctccatgctgtacagtggctcagatgttattcgggacctggagtgggtcatctttgatgaggttcactatatcaacgatgtcgagcgtggggtcgtgtgggaggaggtgcttatcatgctacctgaccacgtttctatcatccttctgagtgccaccgtccccaacgcccttgagtttgctgactggattgggcggctgaagcgtcgtcagatctatgtgattagcactgtaacccgccccgtgcccctggagcactatcttttcacagggaacagctccaagacccagggggagctctttttgttgctggactcccgaggagccttccatacaaaagggtactatgcagctgtggaggccaagaaggagagaatgagcaaacacgcccagacctttggggccaagcagcccacacatcaggggggccctgcacaggaccgcggagtgtacctgtccctcctggcctccctccgcacacgtgcccagttgcccgtggtggtgttcaccttctcccggggccgctgtgatgagcaggcctcaggcctcacctcccttgacctcaccaccagttcggagaagagcgagatccacctcttcctgcagcgctgccttgctcgcctccgtggctctgaccgccagctgccccaggtcctgcacatgtcagagctcctgaatcgcggcctgggtgtgcaccatagcggcatcctgcccatcctcaaggagatcgtggagatgctcttcagccgtggcctggtcaaggtcttgtttgccacagagacctttgccatgggagtaaacatgcctgctcgtacagtagtgtttgactccatgcgcaaacacgatggctccaccttccgggacctgctccctggggagtatgtgcagatggcaggccgggcagggcggaggggcctggaccccacaggcaccgttatcctgctctgcaagggccgagtgcccgagatggcagacctgcaccgcatgatgatggggaagccgtcccagctgcagtcccagttccgcctcacgtacactatgatcctcaacttgctgcgagtggatgccctcagggtggaggacatgatgaagaggagcttctctgagtttccctcccgcaaagacagcaaggcccatgaacaggccctggctgaactgaccaagaggctgggagctttggaggagcctgacatgactggccaactggtcgacctgcctgaatattacagctggggggaggaactgacagagacccagcacatgatccagcgacgcatcatggagtctgtgaacgggctgaagtctctctcagcaggaagggtggtggttgtgaagaatcaggagcatcacaacgcattgggagtgatcctacaggtctcctcgaactccaccagcagagtattcacaaccctggtcttgtgtgataagcccttgtcccaggacccacaggacagggggccagccactgcagaggtgccctatccagatgacctcgtgggattcaagctgttcctgcctgaagggccttgtgaccacaccgtggtcaagctccagccaggagatatggctgccatcaccaccaaggtgctccgggtgaatggggagaagatcttggaggacttcagcaagaggcagcagccaaaattcaagaaggatcctccccttgcagccgtgaccactgctgtccaggaactgctgcgtctggctcaggcccacccagccggacctcccaccctcgaccctgtcaatgacctgcagctcaaagatatgtcagttgtagagggtgggctccgggcccggaagctggaggagctgatccagggggctcagtgtgtacacagcccccgttttcctgcccagtacctgaagctgcgggagcgaatgcagatacagaaggagatggagcggctgcgcttcctactgtcggatcagtcattgctgctgcttcctgagtaccatcagcgagtagaggtgctccgaaccctgggttatgtggacgaggcgggcactgtgaagctggcagggcgggtggcttgtgccatgagcagccatgagttgctcctcactgagctcatgtttgacaatgcactgagcaccctgcggcctgaggagattgctgccttgctctctggcctggtctgccagagccctggggacgctggggatcagctcccaaacaccctcaagcagggaatagaacgtgtccgggctgtggccaagcggattggtgaggtccaggtggcttgtggcctgaaccagacggtggaggaatttgtgggggagctgaattttgggctggttgaggttgtatatgagtgggcccggggcatgcccttctccgagttggcagggctctcagggacccctgagggcctggtggtccgctgcattcagcgcctggctgagatgtgtcgctcactgcggggggcagcccgcctggtaggagagcctgtgctgggtgccaagatggagacagcggctaccttgctacggcgggacatcgtatttgcggccagcctctacacccagtgaatgccccatgtaaaaacatgatgataaaacagc

SEQ ID NO: 30350 - DNA, 3378 bp, Homo sapiens; identical to SEQ ID NO: 30349
  source 1..3378: mol_type = unassigned DNA

SEQ ID NO: 30351 - DNA, 1157 bp, Homo sapiens
  source 1..1157: mol_type = unassigned DNA
acttccgggctgccaggcagctgctgtggctccaggatgatggagacagagcgacttgtgctaccccctccagatcccctggacctaccccttcgggccgtggagctcggatgcacggggcactgggagctgctgaacttgcctggagctccagagagtagccttccccatggcctccctccttgtgccccagatctgcagcaagaagcagaacagttgtttctgtcatccccagcctggctgcctctgcatggtgtggagcactcagcccgaaaatggcagaggaagacggatccctggtctcttttggctgtcctgggagccccagtcccatccgacctacaggcccaaagacacccaaccacaggccagatactgggttacaaagaggtcttgctggagaacacaaatctctcggctacaacctccttgtctcttcgccggcctccagggccagcctcccagtccttatggggaaatccaactcagtatcccttctggccaggggggatggatgaacccaccataacagatctgaacacacgggaggaggctgaggaggagatagactttgagaaagatcttcttactattccacctggtttcaagaaaggcatggactttgcaccaaaaggaagcgtccacagctgtatccaccccagaggccccagagcctccatctcaggagcagtgggccatccctgtggacgccacctcccctgttggtgatttctatcgcctcattccccagccagccttccagtgggcatttgagccagatgtgtttcagaaacaggccatcctgcacttggaacggcatgactctgtctttgtcgcagctcacacatctgcaggaaaaacagttgtggctgaatatgccattgccctggcccagaaacacatgacacgcaccatctacacttcgcccatcaaggccctgagcaaccagaagttccgggacttccgaaacacattcggggatgtggggctgctcaccggggatgtacagctgcatccggaggcctcctgcctcatcatgaccacagagatccttcgctccatgctgtacagtggctcagatgttattcgggacctggagtgggtcatctttgatgaggttcactatatcaacgatgtcgaggtaagggccatgggct

SEQ ID NO: 30352 - DNA, 3535 bp, Homo sapiens
  source 1..3535: mol_type = unassigned DNA
ttcgcagcgactacttgccgcacttccgggctgccaggcagctgctgtggctccaggatgatggagacagagcgacttgtgctaccccctccagatcccctggacctaccccttcgggccgtggagctcggatgcacggggcactgggagctgctgaacttgcctggagctccagagagtagcctcccagtccttatggggaaatccaactcagtatcccttctggccaggggggatggatgaacccaccataacagatctgaacacacgggaggaggctgaggaggagatagactttgagaaagatcttcttactattccacctggtttcaagaaaggcatggactttgcaccaaaagattgtccaactccagctcctggactactaagccttagctgtctgttggagcctctggatttgggtgggggtgacgaggatgagaatgaggcagtgggacagccaggaggtcccagaggggacactgtttcagcctctccctgcagtgctcccctggcccgagcaagcagcttggaagacctagtgttgaaggaagcgtccacagctgtatccaccccagaggccccagagcctccatctcaggagcagtgggccatccctgtggacgccacctcccctgttggtgatttctatcgcctcattccccagccagccttccagtgggcatttgagccagatgtgtttcagaaacaggccatcctgcacttggaacggcatgactctgtctttgtcgcagctcacacatctgcaggaaaaacagttgtggctgaatatgccattgctctggcccagaaacacatgacacgcaccatctacacttcgcccatcaaggccctgagcaaccagaagttccgggacttccgaaacacattcggggatgtggggctgctcaccggggatgtacagctgcatccggaggcctcctgcctcatcatgaccacagagatccttcgctccatgctgtacagtggctcagatgttattcgggacctggagtgggtcatctttgatgaggttcactatatcaacgatgtcgagcgtggggtcgtgtgggaggaggtgcttatcatgctacctgaccacgtttctatcatccttctgagtgccaccgtccccaacgcccttgagtttgctgactggattgggcggctgaagcgtcgtcagatctatgtgattagcactgtaacccgccccgtgcccctggagcactatcttttcacagggaacagctccaagacccagggggagctctttttgttgctggactcccgaggagccttccatacaaaagggtactatgcagctgtggaggccaagaaggagagaatgagcaaacacgcccagacctttggggccaagcagcccacacatcaggggggccctgcacaggaccgcggagtgtacctgtccctcctggcctccctccgcacacgtgcccagttgcccgtggtggtgttcaccttctcccggggccgctgtgatgagcaggcctcaggcctcacctcccttgacctcaccaccagttcggagaagagcgagatccacctcttcctgcagcgctgccttgctcgcctccgtggctctgaccgccagctgccccaggtcctgcacatgtcagagctcctgaatcgcggcctgggtgtgcaccatagcggcatcctgcccatcctcaaggagatcgtggagatgctcttcagccgtggcctggtcaaggtcttgtttgccacagagacctttgccatgggagtaaacatgcctgctcgtacagtagtgtttgactccatgcgcaaacacgatggctccaccttccgggacctgctccctggggagtatgtgcagatggcaggccgggcagggcggaggggcctggaccccacaggcaccgttatcctgctctgcaagggccgagtgcccgagatggcagacctgcaccgcatgatgatggggaagccgtcccagctgcagtcccagttccgcctcacgtacactatgatcctcaacttgctgcgagtggatgccctcagggtggaggacatgatgaagaggagcttctctgagtttccctcccgcaaagacagcaaggcccatgaacaggccctggctgaactgaccaagaggctgggagctttggaggagcctgacatgactggccaactggtcgacctgcctgaatattacagctggggggaggaactgacagagacccagcacatgatccagcgacgcatcatggagtctgtgaacgggctgaagtctctctcagcaggaagggtggtggttgtgaagaatcaggagcatcacaacgcattgggagtgatcctacaggtctcctcgaactccaccagcagagtattcacaaccctggtcttgtgtgataagcccttgtcccaggacccacaggacagggggccagccactgcagaggtgccctatccagatgacctcgtgggattcaagctgttcctgcctgaagggccttgtgaccacaccgtggtcaagctccagccaggagatatggctgccatcaccaccaaggtgctccgggtgaatggggagaagatcttggaggacttcagcaagaggcagcagccaaaattcaagaaggatcctccccttgcagccgtgaccactgctgtccaggaactgctgcgtctggctcaggcccacccagccggacctcccaccctcgaccctgtcaatgacctgcagctcaaagatatgtcagttgtagagggtgggctccgggcccggaagctggaggagctgatccagggggctcagtgtgtacacagcccccgttttcctgcccagtacctgaagctgcgggagcgaatgcagatacagaaggagatggagcggctgcgcttcctactgtcggatcagtcattgctgctgcttcctgagtaccatcagcgagtagaggtgctccgaaccctgggttacgtggacgaggcgggcactgtgaagctggcagggcgggtggcttgtgccatgagcagccatgagttgctcctcactgagctcatgtttgacaatgcactgagcaccctgcggcctgaggagattgctgccttgctctctggcctggtctgccagagccctggggacgctggggatcagctcccaaacaccctcaagcagggaatagaacgtgtccgggctgtggccaagcggattggtgaggtccaggtggcttgtggcctgaaccagacggtggaggaatttgtgggggagctgaattttgggctggttgaggttgtatatgagtgggcccggggcatgcccttctccgagttggcagggctctcagggacccctgagggcctggtggtccgctgcattcagcgcctggctgagatgtgtcgctcactgcggggggcagcccgcctggtaggagagcctgtgctgggtgccaagatggagacagcggctaccttgctacggcgggacatcgtatttgcggccagcctctacacccagtgaatgccccatgtaaaaacatgatgataaaacagc

SEQ ID NO: 30353 - DNA, 3378 bp, Homo sapiens
  source 1..3378: mol_type = unassigned DNA
aggcagctgctgtggctccaggatgatggagacagagcgacttgtgctaccccctccagatcccctggacctaccccttcgggccgtggagctcggatgcacggggcactgggagctgctgaacttgcctggagctccagagagtagcatcttcttactattccacctggtttcaagaaaggcatggactttgcaccaaaagattgtccaactccagctcctggactactaagccttagctgtctgttggagcctctggatttgggtgggggtgacgaggatgagaatgaggcagtgggacagccaggaggtcccagaggggacactgtttcagcctctccctgcagtgctcccctggcccgagcaagcagcttggaagacctagtgttgaaggaagcgtccacagctgtatccaccccagaggccccagagcctccatctcaggagcagtgggccatccctgtggacgccacctcccctgttggtgatttctatcgcctcattccccagccagccttccagtgggcatttgagccagatgtgtttcagaaacaggccatcctgcacttggaacggcatgactctgtctttgtcgcagctcacacatctgcaggaaaaacagttgtggctgaatatgccattgccctggcccagaaacacatgacacgcaccatctacacttcgcccatcaaggccctgagcaaccagaagttccgggacttccgaaacacattcggggatgtggggctgctcaccggggatgtacagctgcatccggaggcctcctgcctcatcatgaccacagagatccttcgctccatgctgtacagtggctcagatgttattcgggacctggagtgggtcatctttgatgaggttcactatatcaacgatgtcgagcgtggggtcgtgtgggaggaggtgcttatcatgctacctgaccacgtttctatcatccttctgagtgccaccgtccccaacgcccttgagtttgctgactggattgggcggctgaagcgtcgtcagatctatgtgattagcactgtaacccgccccgtgcccctggagcactatcttttcacagggaacagctccaagacccagggggagctctttttgttgctggactcccgaggagccttccatacaaaagggtactatgcagctgtggaggccaagaaggagagaatgagcaaacacgcccagacctttggggccaagcagcccacacatcaggggggccctgcacaggaccgcggagtgtacctgtccctcctggcctccctccgcacacgtgcccagttgcccgtggtggtgttcaccttctcccggggccgctgtgatgagcaggcctcaggcctcacctcccttgacctcaccaccagttcggagaagagcgagatccacctcttcctgcagcgctgccttgctcgcctccgtggctctgaccgccagctgccccaggtcctgcacatgtcagagctcctgaatcgcggcctgggtgtgcaccatagcggcatcctgcccatcctcaaggagatcgtggagatgctcttcagccgtggcctggtcaaggtcttgtttgccacagagacctttgccatgggagtaaacatgcctgctcgtacagtagtgtttgactccatgcgcaaacacgatggctccaccttccgggacctgctccctggggagtatgtgcagatggcaggccgggcagggcggaggggcctggaccccacaggcaccgttatcctgctctgcaagggccgagtgcccgagatggcagacctgcaccgcatgatgatggggaagccgtcccagctgcagtcccagttccgcctcacgtacactatgatcctcaacttgctgcgagtggatgccctcagggtggaggacatgatgaagaggagcttctctgagtttccctcccgcaaagacagcaaggcccatgaacaggccctggctgaactgaccaagaggctgggagctttggaggagcctgacatgactggccaactggtcgacctgcctgaatattacagctggggggaggaactgacagagacccagcacatgatccagcgacgcatcatggagtctgtgaacgggctgaagtctctctcagcaggaagggtggtggttgtgaagaatcaggagcatcacaacgcattgggagtgatcctacaggtctcctcgaactccaccagcagagtattcacaaccctggtcttgtgtgataagcccttgtcccaggacccacaggacagggggccagccactgcagaggtgccctatccagatgacctcgtgggattcaagctgttcctgcctgaagggccttgtgaccacaccgtggtcaagctccagccaggagatatggctgccatcaccaccaaggtgctccgggtgaatggggagaagatcttggaggacttcagcaagaggcagcagccaaaattcaagaaggatcctccccttgcagccgtgaccactgctgtccaggaactgctgcgtctggctcaggcccacccagccggacctcccaccctcgaccctgtcaatgacctgcagctcaaagatatgtcagttgtagagggtgggctccgggcccggaagctggaggagctgatccagggggctcagtgtgtacacagcccccgttttcctgcccagtacctgaagctgcgggagcgaatgcagatacagaaggagatggagcggctgcgcttcctactgtcggatcagtcattgctgctgcttcctgagtaccatcagcgagtagaggtgctccgaaccctgggttacgtggacgaggcgggcactgtgaagctggcagggcgggtggcttgtgccatgagcagccatgagttgctcctcactgagctcatgtttgacaatgcactgagcaccctgcggcctgaggagattgctgccttgctctctggcctggtctgccagagccctggggacgctggggatcagctcccaaacaccctcaagcagggaatagaacgtgtccgggctgtggccaagcggattggtgaggtccaggtggcttgtggcctgaaccagacggtggaggaatttgtgggggagctgaattttgggctggttgaggttgtatatgagtgggcccggggcatgcccttctccgagttggcagggctctcagggacccctgagggcctggtggtccgctgcattcagcgcctggctgagatgtgtcgctcactgcggggggcagcccgcctggtaggagagcctgtgctgggtgccaagatggagacagcggctaccttgctacggcgggacatcgtatttgcggccagcctctacacccagtgaatgccccatgtaaaaacatgatgataaaacagc

SEQ ID NO: 30354 - DNA, 2694 bp, Homo sapiens
  source 1..2694: mol_type = unassigned DNA
agctgctgtggctccaggatgatggagacagagcgacttgtgctaccccctccagatcccctggacctaccccttcgggccgtggagctcggatgcacggggcactgggagctgctgaacttgcctggagctccagagagtagccttccccatggcctccctccttgtgccccagatctgcagcaagaagcagaacagttgtttctgtcatccccagcctggctgcctctgcatggtgtggagcactcagcccgaaaatggcagaggaagacggatccctggtctcttttggctgtcctgggagccccagtcccatccgacctacaggcccaaagacacccaaccacaggccagatactgggttacaaagaggtcttgctggagcactatcttttcacagggaacagctccaagacccagggggagctctttttgttgctggactcccgaggagccttccatacaaaagggtactatgcagctgtggaggccaagaaggagagaatgagcaaacacgcccagacctttggggccaagcagcccacacatcaggggggccctgcacaggaccgcggagtgtacctgtccctcctggcctccctccgcacacgtgcccagttgcccgtggtggtgttcaccttctcccggggccgctgtgatgagcaggcctcaggcctcacctcccttgacctcaccaccagttcggagaagagcgagatccacctcttcctgcagcgctgccttgctcgcctccgtggctctgaccgccagctgccccaggtcctgcacatgtcagagctcctgaatcgcggcctgggtgtgcaccatagcggcatcctgcccatcctcaaggagatcgtggagatgctcttcagccgtggcctggtcaaggtcttgtttgccacagagacctttgccatgggagtaaacatgcctgctcgtacagtagtgtttgactccatgcgcaaacacgatggctccaccttccgggacctgctccctggggagtatgtgcagatggcaggccgggcagggcggaggggcctggaccccacaggcaccgttatcctgctctgcaagggccgagtgcccgagatggcagacctgcaccgcatgatgatggggaagccgtcccagctgcagtcccagttccgcctcacgtacactatgatcctcaacttgctgcgagtggatgccctcagggtggaggacatgatgaagaggagcttctctgagtttccctcccgcaaagacagcaaggcccatgaacaggccctggctgaactgaccaagaggctgggagctttggaggagcctgacatgactggccaactggtcgacctgcctgaatattacagctggggggaggaactgacagagacccagcacatgatccagcgacgcatcatggagtctgtgaacgggctgaagtctctctcagcaggaagggtggtggttgtgaagaatcaggagcatcacaacgcattgggagtgatcctacaggtctcctcgaactccaccagcagagtattcacaaccctggtcttgtgtgataagcccttgtcccaggacccacaggacagggggccagccactgcagaggtgccctatccagatgacctcgtgggattcaagctgttcctgcctgaagggccttgtgaccacaccgtggtcaagctccagccaggagatatggctgccatcaccaccaaggtgctccgggtgaatggggagaagatcttggaggacttcagcaagaggcagcagccaaaattcaagaaggatcctccccttgcagccgtgaccactgctgtccaggaactgctgcgtctggctcaggcccacccagccggacctcccaccctcgaccctgtcaatgacctgcagctcaaagatatgtcagttgtagagggtgggctccgggcccggaagctggaggagctgatccagggggctcagtgtgtacacagcccccgttttcctgcccagtacctgaagctgcgggagcgaatgcagatacagaaggagatggagcggctgcgcttcctactgtcggatcagtcattgctgctgcttcctgagtaccatcagcgagtagaggtgctccgaaccctgggttacgtggacgaggcgggcactgtgaagctggcagggcgggtggcttgtgccatgagcagccatgagttgctcctcactgagctcatgtttgacaatgcactgagcaccctgcggcctgaggagattgctgccttgctctctggcctggtctgccagagccctggggacgctggggatcagctcccaaacaccctcaagcagggaatagaacgtgtccgggctgtggccaagcggattggtgaggtccaggtggcttgtggcctgaaccagacggtggaggaatttgtgggggagctgaattttgggctggttgaggttgtatatgagtgggcccggggcatgcccttctccgagttggcagggctctcagggacccctgagggcctggtggtccgctgcattcagcgcctggctgagatgtgtcgctcactgcggggggcagcccgcctggtaggagagcctgtgctgggtgccaagatggagacagcggctaccttgctacggcgggacatcgtatttgcggccagcctctacacccagtgaatgccccatgtaaaaacatgatgataaaacagc

SEQ ID NO: 30355 - DNA, 3535 bp, Homo sapiens
  source 1..3535: mol_type = unassigned DNA
ttcgcagcgactacttgccgcacttccgggctgccaggcagctgctgtggctccaggatgatggagacagagcgacttgtgctaccccctccagatcccctggacctaccccttcgggccgtggagctcggatgcacggggcactgggagctgctgaacttgcctggagctccagagagtagcctcccagtccttatggggaaatccaactcagtatcccttctggccaggggggatggatgaacccaccataacagatctgaacacacgggaggaggctgaggaggagatagactttgagaaagatcttcttactattccacctggtttcaagaaaggcatggactttgcaccaaaagattgtccaactccagctcctggactactaagccttagctgtctgttggagcctctggatttgggtgggggtgacgaggatgagaatgaggcagtgggacagccaggaggtcccagaggggacactgtttcagcctctccctgcagtgctcccctggcccgagcaagcagcttggaagacctagtgttgaaggaagcgtccacagctgtatccaccccagaggccccagagcctccatctcaggagcagtgggccatccctgtggacgccacctcccctgttggtgatttctatcgcctcattccccagccagccttccagtgggcatttgagccagatgtgtttcagaaacaggccatcctgcacttggaacggcatgactctgtctttgtcgcagctcacacatctgcaggaaaaacagttgtggctgaatatgccattgccctggcccagaaacacatgacacgcaccatctacacttcgcccatcaaggccctgagcaaccagaagttccgggacttccgaaacacattcggggatgtggggctgctcaccggggatgtacagctgcatccggaggcctcctgcctcatcatgaccacagagatccttcgctccatgctgtacagtggctcagatgttattcgggacctggagtgggtcatctttgatgaggttcactatatcaacgatgtcgagcgtggggtcgtgtgggaggaggtgcttatcatgctacctgaccacgtttctatcatccttctgagtgccaccgtccccaacgcccttgagtttgctgactggattgggcggctgaagcgtcgtcagatctatgtgattagcactgtaacccgccccgtgcccctggagcactatcttttcacagggaacagctccaagacccagggggagctctttttgttgctggactcccgaggagccttccatacaaaagggtactatgcagctgtggaggccaagaaggagagaatgagcaaacacgcccagacctttggggccaagcagcccacacatcaggggggccctgcacaggaccgcggagtgtacctgtccctcctggcctccctccgcacacgtgcccagttgcccgtggtggtgttcaccttctcccggggccgctgtgatgagcaggcctcaggcctcacctcccttgacctcaccaccagttcggagaagagcgagatccacctcttcctgcagcgctgccttgctcgcctccgtggctctgaccgccagctgccccaggtcctgcacatgtcagagctcctgaatcgcggcctgggtgtgcaccatagcggcatcctgcccatcctcaaggagatcgtggagatgctcttcagccgtggcctggtcaaggtcttgtttgccacagagacctttgccatgggagtaaacatgcctgctcgtacagtagtgtttgactccatgcgcaaacacgatggctccaccttccgggacctgctccctggggagtatgtgcagatggcaggccgggcagggcggaggggcctggaccccacaggcaccgttatcctgctctgcaagggccgagtgcccgagatggcagacctgcaccgcatgatgatggggaagccgtcccagctgcagtcccagttccgcctcacgtacactatgatcctcaacttgctgcgagtggatgccctcagggtggaggacatgatgaagaggagcttctctgagtttccctcccgcaaagacagcaaggcccatgaacaggccctggctgaactgaccaagaggctgggagctttggaggagcctgacatgactggccaactggtcgacctgcctgaatattacagctggggggaggaactgacagagacccagcacatgatccagcgacgcatcatggagtctgtgaacgggctgaagtctctctcagcaggaagggtggtggttgtgaagaatcaggagcatcacaacgcattgggagtgatcctacaggtctcctcgaactccaccagcagagtattcacaaccctggtcttgtgtgataagcccttgtcccaggacccacaggacagggggccagccactgcagaggtgccctatccagatgacctcgtgggattcaagctgttcctgcctgaagggccttgtgaccacaccgtggtcaagctccagccaggagatatggctgccatcaccaccaaggtgctccgggtgaatggggagaagatcttggaggacttcagcaagaggcagcagccaaaattcaagaaggatcctccccttgcagccgtgaccactgctgtccaggaactgctgcgtctggctcaggcccacccagccggacctcccaccctcgaccctgtcaatgacctgcagctcaaagatatgtcagttgtagagggtgggctccgggcccggaagctggaggagctgatccagggggctcagtgtgtacacagcccccgttttcctgcccagtacctgaagctgcgggagcgaatgcagatacagaaggagatggagcggctgcgcttcctactgtcggatcagtcattgctgctgcttcctgagtaccatcagcgagtagaggtgctccgaaccctgggttacgtggacgaggcgggcactgtgaagctggcagggcgggtggcttgtgccatgagcagccatgagttgctcctcactgagctcatgtttgacaatgcactgagcaccctgcggcctgaggagattgctgccttgctctctggcctggtctgccagagccctggggacgctggggatcagctcccaaacaccctcaagcagggaatagaacgtgtccgggctgtggccaagcggattggtgaggtccaggtggcttgtggcctgaaccagacggtggaggaatttgtgggggagctgaattttgggctggttgaggttgtatatgagtgggcccggggcatgcccttctccgagttggcagggctctcagggacccctgagggcctggtggtccgctgcattcagcgcctggctgagatgtgtcgctcactgcggggggcagcccgcctggtaggagagcctgtgctgggtgccaagatggagacagcggctaccttgctacggcgggacatcgtatttgcggccagcctctacacccagtgaatgccccatgtaaaaacatgatgataaaacagc

SEQ ID NO: 30356 - DNA, 2694 bp, Homo sapiens; identical to SEQ ID NO: 30354
  source 1..2694: mol_type = unassigned DNA

SEQ ID NO: 30357 - DNA, 2694 bp, Homo sapiens
  source 1..2694: mol_type = unassigned DNA
agctgctgtggctccaggatgatggagacagagcgacttgtgctaccccctccagatcccctggacctaccccttcgggccgtggagctcggatgcacggggcactgggagctgctgaacttgcctggagctccagagagtagccttccccatggcctccctccttgtgccccagatctgcagcaagaagcagaacagttgtttctgtcatccccagcctggctgcctctgcatggtgtggagcactcagcccgaaaatggcagaggaagacggatccctggtctcttttggctgtcctgggagccccagtcccatccgacctacaggcccaaagacacccaaccacaggccagatactgggttacaaagaggtcttgctggagcactatcttttcacagggaacagctccaagacccagggggagctctttttgttgctggactcccgaggagccttccatacaaaagggtactatgcagctgtggaggccaagaaggagagaatgagcaaacacgcccagacctttggggccaagcagcccacacatcaggggggccctgcacaggaccgcggagtgtacctgtccctcctggcctccctccgcacacgtgcccagttgcccgtggtggtgttcaccttctcccggggccgctgtgatgagcaggcctcaggcctcacctcccttgacctcaccaccagttcggagaagagcgagatccacctcttcctgcagcgctgccttgctcgcctccgtggctctgaccgccagctgccccaggtcctgcacatgtcagagctcctgaatcgcggcctgggtgtgcaccatagcggcatcctgcccatcctcaaggagatcgtggagatgctcttcagccgtggcctggtcaaggtcttgtttgccacagagacctttgccatgggagtaaacatgcctgctcgtacagtagtgtttgactccatgcgcaaacacgatggctccaccttccgggacctgctccctggggagtatgtgcagatggcaggccgggcagggcggaggggcctggaccccacaggcaccgttatcctgctctgcaagggccgagtgcccgagatggcagacctgcaccgcatgatgatggggaagccgtcccagctgcagtcccagttccgcctcacgtacactatgatcctcaacttgctgcgagtggatgccctcagggtggaggacatgatgaagaggagcttctctgagtttccctcccgcaaagacagcaaggcccatgaacaggccctggctgaactgaccaagaggctgggagctttggaggagcctgacatgactggccaactggtcgacctgcctgaatattacagctggggggaggaactgacagagacccagcacatgatccagcgacgcatcatggagtctgtgaacgggctgaagtctctctcagcaggaagggtggtggttgtgaagaatcaggagcatcacaacgcattgggagtgatcctacaggtctcctcgaactccaccagcagagtattcacaaccctggtcttgtgtgataagcccttgtcccaggacccacaggacagggggccagccactgcagaggtgccctatccagatgacctcgtgggattcaagctgttcctgcctgaagggccttgtgaccacaccgtggtcaagctccagccaggagatatggctgccatcaccaccaaggtgctccgggtgaatggggagaagatcttggaggacttcagcaagaggcagcagccaaaattcaagaaggatcctccccttgcagccgtgaccactgctgtccaggaactgctgcgtctggctcaggcccacccagccggacctcccaccctcgaccctgtcaatgacctgcagctcaaagatatgtcagttgtagagggtgggctccgggcccggaagctggaggagctgatccagggggctcagtgtgtacacagcccccgttttcctgcccagtacctgaagctgcgggagcgaatgcagatacagaaggagatggagcggctgcgcttcctactgtcggatcagtcattgctgctgcttcctgagtaccatcagcgagtagaggtgctccgaaccctgggttatgtggacgaggcgggcactgtgaagctggcagggcgggtggcttgtgccatgagcagccatgagttgctcctcactgagctcatgtttgacaatgcactgagcaccctgcggcctgaggagattgctgccttgctctctggcctggtctgccagagccctggggacgctggggatcagctcccaaacaccctcaagcagggaatagaacgtgtccgggctgtggccaagcggattggtgaggtccaggtggcttgtggcctgaaccagacggtggaggaatttgtgggggagctgaattttgggctggttgaggttgtatatgagtgggcccggggcatgcccttctccgagttggcagggctctcagggacccctgagggcctggtggtccgctgcattcagcgcctggctgagatgtgtcgctcactgcggggggcagcccgcctggtaggagagcctgtgctgggtgccaagatggagacagcggctaccttgctacggcgggacatcgtatttgcggccagcctctacacccagtgaatgccccatgtaaaaacatgatgataaaacagc

SEQ ID NO: 30358 - DNA, 1157 bp, Homo sapiens
  source 1..1157: mol_type = unassigned DNA
acttccgggctgccaggcagctgctgtggctccaggatgatggagacagagcgacttgtgctaccccctccagatcccctggacctaccccttcgggccgtggagctcggatgcacggggcactgggagctgctgaacttgcctggagctccagagagtagccttccccatggcctccctccttgtgccccagatctgcagcaagaagcagaacagttgtttctgtcatccccagcctggctgcctctgcatggtgtggagcactcagcccgaaaatggcagaggaagacggatccctggtctcttttggctgtcctgggagccccagtcccatccgacctacaggcccaaagacacccaaccacaggccagatactgggttacaaagaggtcttgctggagaacacaaatctctcggctacaacctccttgtctcttcgccggcctccagggccagcctcccagtccttatggggaaatccaactcagtatcccttctggccaggggggatggatgaacccaccataacagatctgaacacacgggaggaggctgaggaggagatagactttgagaaagatcttcttactattccacctggtttcaagaaaggcatggactttgcaccaaaaggaagcgtccacagctgtatccaccccagaggccccagagcctccatctcaggagcagtgggccatccctgtggacgccacctcccctgttggtgatttctatcgcctcattccccagccagccttccagtgggcatttgagccagatgtgtttcagaaacaggccatcctgcacttggaacggcatgactctgtctttgtcgcagctcacacatctgcaggaaaaacagttgtggctgaatatgccattgctctggcccagaaacacatgacacgcaccatctacacttcgcccatcaaggccctgagcaaccagaagttccgggacttccgaaacacattcggggatgtggggctgctcaccggggatgtacagctgcatccggaggcctcctgcctcatcatgaccacagagatccttcgctccatgctgtacagtggctcagatgttattcgggacctggagtgggtcatctttgatgaggttcactatatcaacgatgtcgaggtaagggccatgggct

SEQ ID NO: 30359 - DNA, 2694 bp, Homo sapiens; identical to SEQ ID NO: 30354
  source 1..2694: mol_type = unassigned DNA

SEQ ID NO: 30360 - DNA, 3535 bp, Homo sapiens; identical to SEQ ID NO: 30355
  source 1..3535: mol_type = unassigned DNA

SEQ ID NO: 30361 - DNA, 3535 bp, Homo sapiens; identical to SEQ ID NO: 30355
  source 1..3535: mol_type = unassigned DNA

SEQ ID NO: 30362 - DNA, 1157 bp, Homo sapiens; identical to SEQ ID NO: 30351
  source 1..1157: mol_type = unassigned DNA

SEQ ID NO: 30363 - DNA, 3535 bp, Homo sapiens; identical to SEQ ID NO: 30347
  source 1..3535: mol_type = unassigned DNA

SEQ ID NO: 30364 - DNA, 1157 bp, Homo sapiens; identical to SEQ ID NO: 30351
  source 1..1157: mol_type = unassigned DNA

SEQ ID NO: 30365 - DNA, 2694 bp, Homo sapiens; identical to SEQ ID NO: 30354
  source 1..2694: mol_type = unassigned DNA

SEQ ID NO: 30366 - DNA, 1157 bp, Homo sapiens; identical to SEQ ID NO: 30351
  source 1..1157: mol_type = unassigned DNA

SEQ ID NO: 30367 - DNA, 3378 bp, Homo sapiens; identical to SEQ ID NO: 30353
  source 1..3378: mol_type = unassigned DNA

SEQ ID NO: 30368 - DNA, 3378 bp, Homo sapiens; identical to SEQ ID NO: 30353
  source 1..3378: mol_type = unassigned DNA

SEQ ID NO: 30369 - DNA, 3378 bp, Homo sapiens
  source 1..3378: mol_type = unassigned DNA
aggcagctgctgtggctccaggatgatggagacagagcgacttgtgctaccccctccagatcccctggacctaccccttcgggccgtggagctcggatgcacggggcactgggagctgctgaacttgcctggagctccagagagtagcatcttcttactattccacctggtttcaagaaaggcatggactttgcaccaaaagattgtccaactccagctcctggactactaagccttagctgtctgttggagcctctggatttgggtgggggtgacgaggatgagaatgaggcagtgggacagccaggaggtcccagaggggacactgtttcagcctctccctgcagtgctcccctggcccgagcaagcagcttggaagacctagtgttgaaggaagcgtccacagctgtatccaccccagaggccccagagcctccatctcaggagcagtgggccatccctgtggacgccacctcccctgttggtgatttctatcgcctcattccccagccagccttccagtgggcatttgagccagatgtgtttcagaaacaggccatcctgcacttggaacggcatgactctgtctttgtcgcagctcacacatctgcaggaaaaacagttgtggctgaatatgccattgctctggcccagaaacacatgacacgcaccatctacacttcgcccatcaaggccctgagcaaccagaagttccgggacttccgaaacacattcggggatgtggggctgctcaccggggatgtacagctgcatccggaggcctcctgcctcatcatgaccacagagatccttcgctccatgctgtacagtggctcagatgttattcgggacctggagtgggtcatctttgatgaggttcactatatcaacgatgtcgagcgtggggtcgtgtgggaggaggtgcttatcatgctacctgaccacgtttctatcatccttctgagtgccaccgtccccaacgcccttgagtttgctgactggattgggcggctgaagcgtcgtcagatctatgtgattagcactgtaacccgccccgtgcccctggagcactatcttttcacagggaacagctccaagacccagggggagctctttttgttgctggactcccgaggagccttccatacaaaagggtactatgcagctgtggaggccaagaaggagagaatgagcaaacacgcccagacctttggggccaagcagcccacacatcaggggggccctgcacaggaccgcggagtgtacctgtccctcctggcctccctccgcacacgtgcccagttgcccgtggtggtgttcaccttctcccggggccgctgtgatgagcaggcctcaggcctcacctcccttgacctcaccaccagttcggagaagagcgagatccacctcttcctgcagcgctgccttgctcgcctccgtggctctgaccgccagctgccccaggtcctgcacatgtcagagctcctgaatcgcggcctgggtgtgcaccatagcggcatcctgcccatcctcaaggagatcgtggagatgctcttcagccgtggcctggtcaaggtcttgtttgccacagagacctttgccatgggagtaaacatgcctgctcgtacagtagtgtttgactccatgcgcaaacacgatggctccaccttccgggacctgctccctggggagtatgtgcagatggcaggccgggcagggcggaggggcctggaccccacaggcaccgttatcctgctctgcaagggccgagtgcccgagatggcagacctgcaccgcatgatgatggggaagccgtcccagctgcagtcccagttccgcctcacgtacactatgatcctcaacttgctgcgagtggatgccctcagggtggaggacatgatgaagaggagcttctctgagtttccctcccgcaaagacagcaaggcccatgaacaggccctggctgaactgaccaagaggctgggagctttggaggagcctgacatgactggccaactggtcgacctgcctgaatattacagctggggggaggaactgacagagacccagcacatgatccagcgacgcatcatggagtctgtgaacgggctgaagtctctctcagcaggaagggtggtggttgtgaagaatcaggagcatcacaacgcattgggagtgatcctacaggtctcctcgaactccaccagcagagtattcacaaccctggtcttgtgtgataagcccttgtcccaggacccacaggacagggggccagccactgcagaggtgccctatccagatgacctcgtgggattcaagctgttcctgcctgaagggccttgtgaccacaccgtggtcaagctccagccaggagatatggctgccatcaccaccaaggtgctccgggtgaatggggagaagatcttggaggacttcagcaagaggcagcagccaaaattcaagaaggatcctccccttgcagccgtgaccactgctgtccaggaactgctgcgtctggctcaggcccacccagccggacctcccaccctcgaccctgtcaatgacctgcagctcaaagatatgtcagttgtagagggtgggctccgggcccggaagctggaggagctgatccagggggctcagtgtgtacacagcccccgttttcctgcccagtacctgaagctgcgggagcgaatgcagatacagaaggagatggagcggctgcgcttcctactgtcggatcagtcattgctgctgcttcctgagtaccatcagcgagtagaggtgctccgaaccctgggttacgtggacgaggcgggcactgtgaagctggcagggcgggtggcttgtgccatgagcagccatgagttgctcctcactgagctcatgtttgacaatgcactgagcaccctgcggcctgaggagattgctgccttgctctctggcctggtctgccagagccctggggacgctggggatcagctcccaaacaccctcaagcagggaatagaacgtgtccgggctgtggccaagcggattggtgaggtccaggtggcttgtggcctgaaccagacggtggaggaatttgtgggggagctgaattttgggctggttgaggttgtatatgagtgggcccggggcatgcccttctccgagttggcagggctctcagggacccctgagggcctggtggtccgctgcattcagcgcctggctgagatgtgtcgctcactgcggggggcagcccgcctggtaggagagcctgtgctgggtgccaagatggagacagcggctaccttgctacggcgggacatcgtatttgcggccagcctctacacccagtgaatgccccatgtaaaaacatgatgataaaacagc

SEQ ID NO: 30370 - DNA, 966 bp, Homo sapiens
  source 1..966: mol_type = unassigned DNA
gtttggggccagagtgggcgaggcgcggaggtctggcctataaagtagtcgcggagacggggtgctggtttgcgtcgtagtctcctgcagcgtctggggtttccgttgcagtcctcggaaccaggacctcggcgtggcctagcgagttatggcgacgaaggccgtgtgcgtgctgaagggcgacggcccagtgcagggcatcatcaatttcgagcagaaggaaagtaatggaccagtgaaggtgtggggaagcattaaaggactgactgaaggcctgcatggattccatgttcatgagtttggagataatacagcaggctgtaccagtgcaggtcctcactttaatcctctatccagaaaacacggtgggccaaaggatgaagagaggcatgttggagacttgggcaatgtgactgctgacaaagatggtgtggccgatgtgtctattgaagattctgtgatctcactctcaggagaccattgcatcattggccgcacactggtggtccatgaaaaagcagatgacttgggcaaaggtggaaatgaagaaagtacaaagacaggaaacgctggaagtcgtttggcttgtggtgtaattgggatcgcccaataaacattcccttggatgtagtctgaggccccttaactcatctgttatcctgctagctgtagaaatgtatcctgataaacattaaacactgtaatcttaaaagtgtaattgtgtgactttttcagagttgctttaaagtacctgtagtgagaaactgatttatgatcacttggaagatttgtatagttttataaaactcagttaaaatgtctgtttcaatgacctgtattttgccagacttaaatcacagatgggtattaaacttgtcagaatttctttgtcattcaagcctgtgaataaaaaccctgtatggcacttattatgaggctattaaaagaatccaaattcaaactaaa

SEQ ID NO: 30371 - DNA, 625 bp, Homo sapiens
  source 1..625: mol_type = unassigned DNA
ctcctgcagcgtctggggtttccgttgcagtcctcggaaccaggacctcggcgtggcctagcgagttatggcgacgaaggccgtgtgcgtgctgaagggcgacggcccagtgcagggcatcatcaatttcgagcagaaggaaagtaatggaccagaaggtgtggggaagcattaaaggactgactgaaggcctgcatggattccatgttcatgagtttggagataatacagcaggctgtaccagtgcaggtcctcactttaatcctctatccagaaaacacggtgggccaaaggatgaagagaggcatgttggagacttgggcaatgtgactgctgacaaagatggtgtggccgatgtgtctattgaagattctgtgatctcactctcaggagaccattgcatcattggccgcacactggtggtccatgaaaaagcagatgacttgggcaaaggtggaaatgaagaaagtacaaagacaggaaacgctggaagtcgtttggcttgtggtgtaattgggatcgcccaataaacattcccttggatgtagtctgaggccccttaactcatctgttatcctgctagctgtagaaatgtatcctgataaacattaaacactgtaatctt

SEQ ID NO: 30372 - DNA, 3595 bp, Homo sapiens
  source 1..3595: mol_type = unassigned DNA
atgccccgagctgggaccgaccctccggctccacgcccttttttttttttttttttaggtcccgggcgttgagctctactcagtgcacgcagccacacaatatgctcttggacgtcgccccctggaggggatgttatctcccgcctccttgaagtcgcccatttctggggttgccccatccagggagctggttcctagttaagaatatgagaatgtatgcgcagggaggcaggcaacagcacgaacagccacgcttctagaagattctagggagcgcgcaggagcagcgcagagggagtaggaatgagcaggcggaggacccgaggtcacgagaccgttgggtgggaggagccagcggccggggaggttctagtctgttctgtcttgcggcagccgcccccttctgcgcggtcacgccgagccagcgcctgggcctggaaccgggccgtagcccccccagtttcgcccaccacctccctaccatggacccccgcaaagtgaacgagcttcgggcctttgtgaaaatgtgtaagcaggatccgagcgttctgcacaccgaggaaatgcgcttcctgagggagtgggtggagagcatgggtggtaaagtaccacctgctactcagaaagctaaatcagaagaaaataccaaggaagaaaaacctgatagtaagaaggtggaggaagacttaaaggcagacgaaccatcaagtgaggaaagtgatctagaaattgataaagaaggtgtgattgaaccagacactgatgctcctcaagaaatgggagatgaaaatgcggagataacggaggagatgatggatcaggcaaatgataaaaaagtggctgctattgaagccctaaatgatggtgaactccagaaagccattgacttattcacagatgccatcaagctgaatcctcgcttggccattttgtatgccaagagggccagtgtcttcgtcaaattacagaagccaaatgctgccatccgagactgtgacagagccattgaaataaatcctgattcagctcagccttacaagtggcgggggaaagcacacagacttctaggccactgggaagaagcagcccatgatcttgcccttgcctgtaaattggattatgatgaagatgctagtgcaatgctgaaagaagttcaacctagggcacagaaaattgcagaacatcggagaaagtatgagcgaaaacgtgaagagcgagagatcaaagaaagaatagaacgagttaagaaggctcgagaagagcatgagagagcccagagggaggaagaagccagacgacagtcaggagctcagtatggctcttttccaggtggctttcctgggggaatgcctggtaattttcccggaggaatgcctggaatgggagggggcatgcctggaatggctggaatgcctggactcaatgaaattcttagtgatccagaggttcttgcagccatgcaggatccagaagttatggtggctttccaggatgtggctcagaacccagcaaatatgtcaaaataccagagcaacccaaaggttatgaatctcatcagtaaattgtcagccaaatttggaggtcaagcgtaatgtccttctgataaataaagcccttgctgaaggaaaagcaacctagatcaccttatggatgtcgcaataatacaaaccagtgtacctctgaccttctcatcaagagagctggggtgctttgaagataatccctacccctctcccccaaatgcagctgaagcattttacagtggtttgccattagggtattcattcagataatgttttcctactaggaattacaaactttaaacactttttaaatcttcaaaatatttaaaacaaatttaaagggcctgttaattcttatatttttctttactaatcattttggatttttttctttgaattattggcagggaatatacttatgtatggaagattactgctctgagtgaaataaaagttattagtgcgaggcaaacataactcatttgaggataaagtttgtgttggatatgtggttcctgatgcattttgacttgtctttttaaatgctttatctttttctttaaagatttatttcaataaaactaattgggaccacccgtatttcagtaggacctgggtagggattggaagtacttggcagggcagcagcaatcttgctgtgtttgatataacatgcatccttgggcaggttgcccttaaatcttacactgtggtgaagggatgttttttttgtaatgctgcagtagagttggagtacttagttctcttgttgtccagtatatctaataagtgtttttcatattatttccacgtaagggaaataaggtagtacttttctttttatatttctatgcttaaaattctctttcctagtcaaaaattgcccaaatctgtgtttgctttctgcttgctacatttgtctcccttacttttcttgagctaaagacaggctttttccaccggcatcatcactgctatcatcattaacagcgtaattatacaagcatatttaatgctgagtttaatttaatatgtaatacatatggtaattgtagggtaatacccacaacaactgtagtttcttacttggccaagagaatgcttatttaagtgttagacttccattctggcaaaatcttgccttatcagaagacattggaaagagggattccctttggtgtttggtcttctacttagaaaaacctattgcagttagtttatcttgtagtattcatctttgtattctgaagataaggtttgaattaaattgatacacacagaggggaaccgattttttttatccaatgtgaattataaatgagataatccacagttattcattgtggagttgttgagactatgaaagactcattgtctttgtattcagctcttaaatagtgtaactatatccccacctctgcttgctttctttccctcccctccaatgataaagaaaatgataaattttctgttgtgcattcaattcttattttaaataagactaagtataggcattgtacctgacattgctacgtttctaccagtgtttcaatttaaagtgctagtgtttaaaaacattttcaagggataaggccttctgtactttgcttatttgaagaatcagtggtaggagcagtgaagtaaattctatggagtacatttctaaaataccacatttctgaaatcataaataagtttattcaggttctaaccctttgctgtacacaagcagacagaaatgcatctgttacataaatgagaaaaagctattatgctgatggagcatgctttttaaatcctttaaaaacactcaccatataaacttgcatttgagcttgtgtgttcttttgttaatgtgtagagttctcctttctcgaaattgccagtgtgtacttggcttaactcaagaacagtttcttctggattccttatttgatttatttaacctaattatattctaatattgcaaatattaccataagtgggtaaaagtaaaattcctcttctgaaaatgtgtcctgtgcttttagatttttaaattccataatatacattcttaattttcaactcaa

SEQ ID NO: 30373 - DNA, 944 bp, Homo sapiens
  source 1..944: mol_type = unassigned DNA
cagtttcgcccaccacctccctaccatggacccccgcaaagtgaacgagcttcgggcctttgtgaaaatgtgtaagcaggatccgagcgttctgcacaccgaggaaatgcgcttcctgagggagtgggtggagagcatgggtggtaaagtaccacctgctactcagaaagctaaatcagaagaaaataccaaggaagaaaaacctgatagtaagaaggtggaggaagacttaaaggcagacgaaccatcaagtgaggaaagtgatctagaaattgataaagaaggtgtgattgaaccagacactgatgctcctcaagaaatgggagatgaaaatgcggagataacggaggagatgatggatcaggcaaatgataaaaaagtggctgctattgaagccctaaatgatggtgaactccagaaagccattgacttattcacagatgccatcaagctgaatcctcgcttggccattttgtatgccaagagggccagtgtcttcgtcaaattacagaagccaaatgctgccatccgagactgtgacagagccattgaaataaatcctgattcagctcagccttacaagtggcgggggaaagcacacagacttctaggccactgggaagaagcagcccatgatcttgcccttgcctggactcaatgaaattcttagtgatccagaggttcttgcagccatgcaggatccagaagttatggtggctttccaggatgtggctcagaacccagcaaatatgtcaaaataccagagcaacccaaaggttatgaatctcatcagtaaattgtcagccaaatttggaggtcaagcgtaatgtccttctgataaataaagcccttgctgaaggaaaagcaacctagatcaccttatggatgtcgcaataatacaaaccagtgtacctctgaccttctcatcaagagagctggggtgc

SEQ ID NO: 30374 - DNA, 549 bp, Homo sapiens
  source 1..549: mol_type = unassigned DNA
aacagtgtcctcctgacttgtgctggagtgattgtgcctatgtagagaattccactttaagcatgggtggtaaagtaccacctgctactcagaaagctaaatcagaagaaaataccaaggaagaaaaacctgatagtaagaaggtggaggaagacttaaaggcagacgaaccatcaagtgaggaaagtgatctagaaattgataaagaaggtgtgattgaaccagacactgatgctcctcaagaaatgggagatgaaaatgcggagataacggaggagatgatggatcaggcaaatgataaaaaagtggctgctattgaagccctaaatgatggtgaactccagaaagccattgacttattcacagatgccatcaagctgaatcctcgcttggccattttgtatgccaagagggccagtgtcttcgtcaaattacagaagccaaatgctgccatccgagactgtgacagagccattgaaataaatcctgattcagctcagccttacaagtggcgggggaaagcacacagacttctaggccactgggaag

SEQ ID NO: 30375 - DNA, 3123 bp, Homo sapiens
  source 1..3123: mol_type = unassigned DNA
cgcggtcacgccgagccagcgcctgggcctggaaccgggccgtagcccccccagtttcgcccaccacctccctaccatggacccccgcaaagtgaacgagcttcgggcctttgtgaaaatgtgtaagcaggatccgagcgttctgcacaccgaggaaatgcgcttcctgagggagtgggtggagagcatgggtggtaaagtaccacctgctactcagaaagctaaatcagaagaaaataccaaggaagaaaaacctgatagtaagaaggtggaggaagacttaaaggcagacgaaccatcaagtgaggaaagtgatctagaaattgataaagaaggtgtgattgaaccagacactgatgctcctcaagaaatgggagatgaaaatgcggagataacggaggagatgatggatcaggcaaatgataaaagtggctgctattgaagccctaaatgatggtgaactccagaaagccattgacttattcacagatgccatcaagctgaatcctcgcttggccattttgtatgccaagagggccagtgtcttcgtcaaattacagaagccaaatgctgccatccgagactgtgacagagccattgaaataaatcctgattcagctcagccttacaagtggcgggggaaagcacacagacttctaggccactgggaagaagcagcccatgatcttgcccttgcctgtaaattggattatgatgaagatgctagtgcaatgctgaaagaagttcaacctagggcacagaaaattgcagaacatcggagaaagtatgagcgaaaacgtgaagagcgagagatcaaagaaagaatagaacgagttaagaaggctcgagaagagcatgagagagcccagagggaggaagaagccagacgacagtcaggagctcagtatggctcttttccaggtggctttcctgggggaatgcctggtaattttcccggaggaatgcctggaatgggagggggcatgcctggaatggctggaatgcctggactcaatgaaattcttagtgatccagaggttcttgcagccatgcaggatccagaagttatggtggctttccaggatgtggctcagaacccagcaaatatgtcaaaataccagagcaacccaaaggttatgaatctcatcagtaaattgtcagccaaatttggaggtcaagcgtaatgtccttctgataaataaagcccttgctgaaggaaaagcaacctagatcaccttatggatgtcgcaataatacaaaccagtgtacctctgaccttctcatcaagagagctggggtgctttgaagataatccctacccctctcccccaaatgcagctgaagcattttacagtggtttgccattagggtattcattcagataatgttttcctactaggaattacaaactttaaacactttttaaatcttcaaaatatttaaaacaaatttaaagggcctgttaattcttatatttttctttactaatcattttggatttttttctttgaattattggcagggaatatacttatgtatggaagattactgctctgagtgaaataaaagttattagtgcgaggcaaacataactcatttgaggataaagtttgtgttggatatgtggttcctgatgcattttgacttgtctttttaaatgctttatctttttctttaaagatttatttcaataaaactaattgggaccacccgtatttcagtaggacctgggtagggattggaagtacttggcagggcagcagcaatcttgctgtgtttgatataacatgcatccttgggcaggttgcccttaaatcttacactgtggtgaagggatgttttttttgtaatgctgcagtagagttggagtacttagttctcttgttgtccagtatatctaataagtgtttttcatattatttccacgtaagggaaataaggtagtacttttctttttatatttctatgcttaaaattctctttcctagtcaaaaattgcccaaatctgtgtttgctttctgcttgctacatttgtctcccttacttttcttgagctaaagacaggctttttccaccggcatcatcactgctatcatcattaacagcgtaattatacaagcatatttaatgctgagtttaatttaatatgtaatacatatggtaattgtagggtaatacccacaacaactgtagtttcttacttggccaagagaatgcttatttaagtgttagacttccattctggcaaaatcttgccttatcagaagacattggaaagagggattccctttggtgtttggtcttctacttagaaaaacctattgcagttagtttatcttgtagtattcatctttgtattctgaagataaggtttgaattaaattgatacacacagaggggaaccgattttttttatccaatgtgaattataaatgagataatccacagttattcattgtggagttgttgagactatgaaagactcattgtctttgtattcagctcttaaatagtgtaactatatccccacctctgcttgctttctttccctcccctccaatgataaagaaaatgataaattttctgttgtgcattcaattcttattttaaataagactaagtataggcattgtacctgacattgctacgtttctaccagtgtttcaatttaaagtgctagtgtttaaaaacattttcaagggataaggccttctgtactttgcttatttgaagaatcagtggtaggagcagtgaagtaaattctatggagtacatttctaaaataccacatttctgaaatcataaataagtttattcaggttctaaccctttgctgtacacaagcagacagaaatgcatctgttacataaatgagaaaaagctattatgctgatggagcatgctttttaaatcctttaaaaacactcaccatataaacttgcatttgagcttgtgtgttcttttgttaatgtgtagagttctcctttctcgaaattgccagtgtgtacttggcttaactcaagaacagtttcttctggattccttatttgatttatttaacctaattatattctaatattgcaaatattaccataagtgggtaaaagtaaaattcctcttctg

SEQ ID NO: 30376 - DNA, 3539 bp, Homo sapiens
  source 1..3539: mol_type = unassigned DNA
ggccggaggggtggtgaacgccgtcgtggtgatggtgagggccttagcgaccaccacccgagtgaggccccctcaccttcaggcccagagccgaggggaggagcctcccccagggccggcgggggcgggcaggtgagccgggcaggtgcgcaggcgagcgcggcgggctgggcgggccgaggccacaccctgaaactacctgcgtgggccgggccggagtgtgagagcggagctgcagccggagaaagaggaagagggagagagagcgcgccagggcgagggcaccgccgccggtcgggcgcgctgggcctgcccggaatcccgccgcctgcgccccgcgccccgcgccctgcgggccatgggagccggccgccggcagggacgacgcctgtgagacccgcgagcggcctcggggaccatggggagcgatcgggcccgcaagggcggagggggcccgaaggacttcggcgcgggactcaagtacaactcccggcacgagaaagtgaatggcttggaggaaggcgtggagttcctgccagtcaacaacgtcaagaaggtggaaaagcatggcccggggcgctgggtggtgctggcagccgtgctgatcggcctcctcttggtcttgctggggatcggcttcctggtgtggcatttgcagtaccgggacgtgcgtgtccagaaggtcttcaatggctacatgaggatcacaaatgagaattttgtggatgcctacgagaactccaactccactgagtttgtaagcctggccagcaaggtgaaggacgcgctgaagctgctgtacagcggagtcccattcctgggcccctaccacaaggagtcggctgtgacggccttcagcgagggcagcgtcatcgcctactactggtctgagttcagcatcccgcagcacctggtggaggaggccgagcgcgtcatggccgaggagcgcgtagtcatgctgcccccgcgggcgcgctccctgaagtcctttgtggtcacctcagtggtggctttccccacggactccaaaacagtacagaggacccaggacaacagctgcagctttggcctgcacgcccgcggtgtggagctgatgcgcttcaccacgcccggcttccctgacagcccctaccccgctcatgcccgctgccagtgggccctgcggggggacgccgactcagtgctgagcctcaccttccgcagctttgaccttgcgtcctgcgacgagcgcggcagcgacctggtgacggtgtacaacaccctgagccccatggagccccacgccctggtgcagttgtgtggcacctaccctccctcctacaacctgaccttccactcctcccagaacgtcctgctcatcacactgataaccaacactgagcggcggcatcccggctttgaggccaccttcttccagctgcctaggatgagcagctgtggaggccgcttacgtaaagcccaggggacattcaacagcccctactacccaggccactacccacccaacattgactgcacatggaacattgaggtgcccaacaaccagcatgtgaaggtgcgcttcaaattcttctacctgctggagcccggcgtgcctgcgggcacctgccccaaggactacgtggagatcaacggggagaaatactgcggagagaggtcccagttcgtcgtcaccagcaacagcaacaagatcacagttcgcttccactcagatcagtcctacaccgacaccggcttcttagctgaatacctctcctacgactccagtgacccatgcccggggcagttcacgtgccgcacggggcggtgtatccggaaggagctgcgctgtgatggctgggccgactgcaccgaccacagcgatgagctcaactgcagttgcgacgccggccaccagttcacgtgcaagaacaagttctgcaagcccctcttctgggtctgcgacagtgtgaacgactgcggagacaacagcgacgagcaggggtgcagttgtccggcccagaccttcaggtgttccaatgggaagtgcctctcgaaaagccagcagtgcaatgggaaggacgactgtggggacgggtccgacgaggcctcctgccccaaggtgaacgtcgtcacttgtaccaaacacacctaccgctgcctcaatgggctctgcttgagcaagggcaaccctgagtgtgacgggaaggaggactgtagcgacggctcagatgagaaggactgcgactgtgggctgcggtcattcacgagacaggctcgtgttgttgggggcacggatgcggatgagggcgagtggccctggcaggtaagcctgcatgctctgggccagggccacatctgcggtgcttccctcatctctcccaactggctggtctctgccgcacactgctacatcgatgacagaggattcaggtactcagaccccacgcagtggacggccttcctgggcttgcacgaccagagccagcgcagcgcccctggggtgcaggagcgcaggctcaagcgcatcatctcccaccccttcttcaatgacttcaccttcgactatgacatcgcgctgctggagctggagaaaccggcagagtacagctccatggtgcggcccatctgcctgccggacgcctcccatgtcttccctgccggcaaggccatctgggtcacgggctggggacacacccagtatggaggcactggcgcgctgatcctgcaaaagggtgagatccgcgtcatcaaccagaccacctgcgagaacctcctgccgcagcagatcacgccgcgcatgatgtgcgtgggcttcctcagcggcggcgtggactcctgccagggtgattccgggggacccctgtccagcgtggaggcggatgggcggatcttccaggccggtgtggtgagctggggagacggctgcgctcagaggaacaagccaggcgtgtacacaaggctccctctgtttcgggactggatcaaagagaacactggggtataggggccggggccacccaaatgtgtacacctgcggggccacccatcgtccaccccagtgtgcacgcctgcaggctggagactggaccgctgactgcaccagcgcccccagaacatacactgtgaactcaatctccagggctccaaatctgcctagaaaacctctcgcttcctcagcctccaaagtggagctgggaggtagaaggggaggacactggtggttctactgacccaactgggggcaaaggtttgaagacacagcctcccccgccagccccaagctgggccgaggcgcgtttgtgcatatctgcctcccctgtctctaaggagcagcgggaacggagcttcggggcctcctcagtgaaggtggtggggctgccggatctgggctgtggggcccttgggccacgctcttgaggaagcccaggctcggaggaccctggaaaacagacgggtctgagactgaaattgttttaccagctcccagggtggacttcagtgtgtgtatttgtgtaaatgagtaaaacattttatttctttttaggtaagtttctttt

SEQ ID NO: 30377 - DNA, 4507 bp, Homo sapiens
  source 1..4507: mol_type = unassigned DNA
gagagagagagagagagagagagagagagagagacagtgagaaagaaagaaaaagagagcgcccttgtgcacgcgctaggccaagagcgcgccgctgtgcgcgcgcccgcctagcgaggacagggtctccatgacaaccggcctggccggctagcagtgctctgctcacttggctgcgaggagcgccacgaaaggtcagaggaaggagctgtgggaagctcgcagcaggtatcggagcttaagccagtggatttgggggccctgggctccctagccggctgcggtgtgagaatggagtgggcaggaaagcagcgggactttcagggctctgggtttgcagagagccgaaatgaccatgactgccaacaagaattccagcatcacccacggagctggtggcactaaagcccctcgggggactctgagcaggtctcagtcagtctctccacctccagttctctccccaccaaggagtcccatctacccgctcagtgatagtgaaacctcagcctgcaggtaccccagccactccagctcccgggtgctcctcaaggaccggcaccccccagctccttcaccccagaatcctcaagatccctccccagatacttccccacccacctgtcccttcaagaccgccagcttcggttatttggacagaagcccttcggcgtgcaagagagacgcccaaaaggaaagtgtccaaggcgcagcccaggatgtagcaggggtcgctgcctgcctcccccttgcccagagcacgccattcccggggccagcagctggcccccggggcgtcttgctgacccgtaccggtacccgcgcccacagcctgggcatccgggagaagatatcagcatgggaaggtcgccgagaggcgtcgcccaggatgagcatgtgtggagagaagcgggagggctctgggagcgagtgggcggccagtgagggctgccccagcctgggctgtcccagcgtggtgccgtccccctgcagctctgaaaagacctttgatttcaagggcctccggaggatgagcaggaccttctccgagtgttcctacccagagactgaggaggagggagaggcgctccctgtccgggactctttctaccggctggagaaacggctgggccggagtgagcccagcgccttcctcagggggcatggcagcaggaaggagagctcagcagtgctgagccggatccagaaaattgaacaggtcctgaaggagcagccgggccgggggctcccccagctccccagcagctgctacagcgtggaccgggggaaaaggaagactggaaccttgggctccttggaggagccggcagggggcgcgagtgtgagcgctggcagccgggcagtcggagtggctggtgttgcgggggaggcgggcccacccccagagagggaaggcagtggttccactaagcccgggacccctggaaatagccctagctcccagcggctgccatcgaagagttccctcgatcccgctgtgaaccctgtccccaaacccaagcgcacctttgaatacgaggctgacaagaaccccaagagtaagcccagtaatggtctacctccttcacccacacctgctgctccacctcccttgccctccaccccagccccgccagtcacccggagacccaagaaggacatgcgtggtcaccgcaagtcccagagcagaaaatcctttgagtttgaggatgcatccagtctccagtccctgtacccctcttctcccactgagaatggtactgagaaccaacccaagtttggatccaaaagcactttagaagaaaatgcctatgaagatattgtgggagatctgcccaaggagaatccatatgaggatgtggacttaaagagccgaagagcaggacgaaaatcccagcaactgtctgagaactccttggactctttgcacaggatgtggagtcctcaggacaggaagtacaacagcccgcccacacagctttccctgaaacccaacagccagtccctgcgcagtgggaactggtcagaaaggaagagccaccggctgccacgattacccaagaggcacagccatgacgacatgctgctgctggctcagctgagtctgccgtcctcaccctccagcctcaatgaagacagcctcagcaccaccagcgagctgctgtccagccgccgggcccgccgcattcccaagcttgtccaaagaattaactccatctacaatgccaagagaggaaagaagagattaaaaaagttgtctatgtccagcattgaaacagcatcactgagagatgaaaacagtgagagcgagagcgactctgatgacaggttcaaagcccacacacagcgcctggtccacatccagtcgatgctgaagcgcgcccccagctatcgcacgctggagctggagctgctggagtggcaggagcgggagctttttgagtactttgtggtggtgtccctcaagaagaagccatcgcgaaacacctacctccccgaagtctcctaccagtttcccaagctggaccgacccaccaagcagatgcgagaggcagaggaaaggctcaaagccattccccagttttgcttccctgatgccaaggactggcttcctgtgtcagagtatagcagtgagaccttttctttcatgctgactggggaagatggcagcagacgctttggctactgcaggcgcttactgccaagtgggaaagggccccggttgccagaggtgtactgtgtcatcagccgccttggctgcttcggcttgttttccaaggtcctagatgaggtggagcgccggcgtgggatctccgctgcattggtctatcctttcatgagaagtctcatggagtcgcccttcccagccccagggaagaccatcaaagtgaagacattcctgccaggtgctggcaatgaggtgttagagctgcggcggcccatggactcaaggctggagcacgtggactttgagtgcctttttacctgcctcagtgtgcgccagctcatccgaatctttgcctcactgctgctggagcgccgggtcatttttgtggcagataagctcagtaccctctccagctgctcccacgcggtggtggccttgctctaccccttctcctggcagcacaccttcattcctgtcctcccggcctccatgattgacatcgtctgctgtcccacccccttcctggttggcctgctctccagctccctccccaaactgaaggagctgcctgtggaggaggcgctgatggtgaatctgggatctgaccgattcatccgacagatggacgacgaagacacgttgttacctaggaagttacaggcagctctggagcaggctctggagaggaagaatgagctgatctcccaggactctgacagcgactccgacgatgaatgtaataccctcaatgggctggtgtcggaggtgtttatccggttctttgtggagaccgttgggcactactccctctttctgacacagagtgagaagggagagagggcctttcagcgagaggccttccgcaaatctgtggcctccaaaagcatccgccgctttcttgaggtttttatggagtctcagatgtttgctggcttcatccaagacagggagctaagaaagtgtcgggcaaagggcctttttgagcagcgagtggagcagtacttagaagaactcccagacactgagcagagtggaatgaataagtttctccgaggtttgggcaacaaaatgaagtttctccacaagaagaattaagcctccttctcagtagcagagtccagtgccttgcagagcctgaagcctggggagaaggcccagcctgggaccctctgggctgctgtggctcctctgcccccacagatcctatcctccaagccagcccacctctgccttcatcatatcccaggatactgtttgtaaataatctgctgtaagctttcttaactgttttttgtaacaagcaaagagaatatggcaaatatttgtatattcccaaggggccgggtgctttcctgtcctgccagagcatggatgaagtttcgctgggtgctcgtgactggccagttttgtgcagctgactgtctcagccaaaccactgatcttccctggaggccttcggcctgcctgcctgcctgaggtccccgctgccagtcccgggccctggagagcagatgctgtcttgttatgtacaggaggaccttttaaaaaaatcaagtttctattttttgctggtagtccgcatacccataccctctgtttttgaaaggcaaaggccaatcagtccccatttgtagcatggcaccagggtcttaggcctagtcctctcattcctcccaccctccgagatggtcagtgtgtcatgggaagcccacccccagctctgccagtgctctctgggcctggctcccagtcagtggtggccacgatgcggtacagggcatccctccttcccatctacgggtgttctcaataaacaatgtacagttgtttgggcccaga

SEQ ID NO: 30378 - DNA, 4315 bp, Homo sapiens
  source 1..4315: mol_type = unassigned DNA
cacagatttcacaccctttggagagtttctttcttggataattcaggaagatgagagactgcttaggcgccaccactagtaccatgagtccctgcactggttaaagccatcgccacaacctggacaggcagcaagggctctgggtttgcagagagccgaaatgaccatgactgccaacaagaattccagcatcacccacggagctggtggcactaaagcccctcgggggactctgagcaggtctcagtcagtctctccacctccagttctctccccaccaaggagtcccatctacccgctcagtgatagtgaaacctcagcctgcaggtaccccagccactccagctcccgggtgctcctcaaggaccggcaccccccagctccttcaccccagaatcctcaagatccctccccagatacttccccacccacctgtcccttcaagaccgccagcttcggttatttggacagaagcccttcggcgtgcaagagagacgcccaaaaggaaagtgtccaaggcgcagcccaggatgtagcaggggtcgctgcctgcctcccccttgcccagagcacgccattcccggggccagcagctggcccccggggcgtcttgctgacccgtaccggtacccgcgcccacagcctgggcatccgggagaagatatcagcatgggaaggtcgccgagaggcgtcgcccaggatgagcatgtgtggagagaagcgggagggctctgggagcgagtgggcggccagtgagggctgccccagcctgggctgtcccagcgtggtgccgtccccctgcagctctgaaaagacctttgatttcaagggcctccggaggatgagcaggaccttctccgagtgttcctacccagagactgaggaggagggagaggcgctccctgtccgggactctttctaccggctggagaaacggctgggccggagtgagcccagcgccttcctcagggggcatggcagcaggaaggagagctcagcagtgctgagccggatccagaaaattgaacaggtcctgaaggagcagccgggccgggggctcccccagctccccagcagctgctacagcgtggaccgggggaaaaggaagactggaaccttgggctccttggaggagccggcagggggcgcgagtgtgagcgctggcagccgggcagtcggagtggctggtgttgcgggggaggcgggcccacccccagagagggaaggcagtggttccactaagcccgggacccctggaaatagccctagctcccagcggctgccatcgaagagttccctcgatcccgctgtgaaccctgtccccaaacccaagcgcacctttgaatacgaggctgacaagaaccccaagagtaagcccagtaatggtctacctccttcacccacacctgctgctccacctcccttgccctccaccccagccccgccagtcacccggagacccaagaaggacatgcgtggtcaccgcaagtcccagagcagaaaatcctttgagtttgaggatgcatccagtctccagtccctgtacccctcttctcccactgagaatggtactgagaaccaacccaagtttggatccaaaagcactttagaagaaaatgcctatgaagatattgtgggagatctgcccaaggagaatccatatgaggatgtggacttaaagagccgaagagcaggacgaaaatcccagcaactgtctgagaactccttggactctttgcacaggatgtggagtcctcaggacaggaagtacaacagcccgcccacacagctttccctgaaacccaacagccagtccctgcgcagtgggaactggtcagaaaggaagagccaccggctgccacgattacccaagaggcacagccatgacgacatgctgctgctggctcagctgagtctgccgtcctcaccctccagcctcaatgaagacagcctcagcaccaccagcgagctgctgtccagccgccgggcccgccgcattcccaagcttgtccaaagaattaactccatctacaatgccaagagaggaaagaagagattaaaaaagttgtctatgtccagcattgaaacagcatcactgagagatgaaaacagtgagagcgagagcgactctgatgacaggttcaaagcccacacacagcgcctggtccacatccagtcgatgctgaagcgcgcccccagctatcgcacgctggagctggagctgctggagtggcaggagcgggagctttttgagtactttgtggtggtgtccctcaagaagaagccatcgcgaaacacctacctccccgaagtctcctaccagtttcccaagctggaccgacccaccaagcagatgcgagaggcagaggaaaggctcaaagccattccccagttttgcttccctgatgccaaggactggcttcctgtgtcagagtatagcagtgagaccttttctttcatgctgactggggaagatggcagcagacgctttggctactgcaggcgcttactgccaagtgggaaagggccccggttgccagaggtgtactgtgtcatcagccgccttggctgcttcggcttgttttccaaggtcctagatgaggtggagcgccggcgtgggatctccgctgcattggtctatcctttcatgagaagtctcatggagtcgcccttcccagccccagggaagaccatcaaagtgaagacattcctgccaggtgctggcaatgaggtgttagagctgcggcggcccatggactcaaggctggagcacgtggactttgagtgcctttttacctgcctcagtgtgcgccagctcatccgaatctttgcctcactgctgctggagcgccgggtcatttttgtggcagataagctcagtaccctctccagctgctcccacgcggtggtggccttgctctaccccttctcctggcagcacaccttcattcctgtcctcccggcctccatgattgacatcgtctgctgtcccacccccttcctggttggcctgctctccagctccctccccaaactgaaggagctgcctgtggaggaggcgctgatggtgaatctgggatctgaccgattcatccgacagatggacgacgaagacacgttgttacctaggaagttacaggcagctctggagcaggctctggagaggaagaatgagctgatctcccaggactctgacagcgactccgacgatgaatgtaataccctcaatgggctggtgtcggaggtgtttatccggttctttgtggagaccgttgggcactactccctctttctgacacagagtgagaagggagagagggcctttcagcgagaggccttccgcaaatctgtggcctccaaaagcatccgccgctttcttgaggtttttatggagtctcagatgtttgctggcttcatccaagacagggagctaagaaagtgtcgggcaaagggcctttttgagcagcgagtggagcagtacttagaagaactcccagacactgagcagagtggaatgaataagtttctccgaggtttgggcaacaaaatgaagtttctccacaagaagaattaagcctccttctcagtagcagagtccagtgccttgcagagcctgaagcctggggagaaggcccagcctgggaccctctgggctgctgtggctcctctgcccccacagatcctatcctccaagccagcccacctctgccttcatcatatcccaggatactgtttgtaaataatctgctgtaagctttcttaactgttttttgtaacaagcaaagagaatatggcaaatatttgtatattcccaaggggccgggtgctttcctgtcctgccagagcatggatgaagtttcgctgggtgctcgtgactggccagttttgtgcagctgactgtctcagccaaaccactgatcttccctggaggccttcggcctgcctgcctgcctgaggtccccgctgccagtcccgggccctggagagcagatgctgtcttgttatgtacaggaggaccttttaaaaaaatcaagtttctattttttgctggtagtccgcatacccataccctctgtttttgaaaggcaaaggccaatcagtccccatttgtagcatggcaccagggtcttaggcctagtcctctcattcctcccaccctccgagatggtcagtgtgtcatgggaagcccacccccagctctgccagtgctctctgggcctggctcccagtcagtggtggccacgatgcggtacagggcatccctccttcccatctacgggtgttctcaataaacaatgtacagttgtttgggccc

SEQ ID NO: 30379 - DNA, 1411 bp, Homo sapiens
  source 1..1411: mol_type = unassigned DNA
attatgacttcaaggaagaatggaggtggggcgcatagctggcaagaaaccccgtgggaacaaagaagggctctgggtttgcagagagccgaaatgaccatgactgccaacaagaattccagcatcacccacggagctggtggcactaaagcccctcgggggactctgagcagaaaatcctttgagtttgaggatgcatccagtctccagtccctgtacccctcttctcccactgagaatggtactgagaaccaacccaagtttggatccaaaagcactttagaagaaaatgcctatgaagatattgtgggagatctgcccaaggagaatccatatgaggatgtggacttaaagagccgaagagcaggacgaaaatcccagcaactgtctgagaactccttggactctttgcacaggatgtggagtcctcaggacaggaagtacaacagcccgcccacacagctttccctgaaacccaacagccagtccctgcgcagtgggaactggtcagaaaggaagagccaccggctgccacgattacccaagaggcacagccatgacgacatgctgctgctggctcagctgagtctgccgtcctcaccctccagcctcaatgaagacagcctcagcaccaccagcgagctgctgtccagccgccgggcccgccgcattcccaagcttgtccaaagaattaactccatctacaatgccaagagaggaaagaagagattaaaaaagttgtctatgtccagcattgaaacagcatcactgagagatgaaaacagtgagagcgagagcgactctgatgacaggttcaaagcccacacacagcgcctggtccacatccagtcgatgctgaagcgcgcccccagctatcgcacgctggagctggagctgctggagtggcaggagcgggagcttttgagtactttgtggtggtgtccctcaagaagaagccatcgcgaaacacctacctccccgaagtctcctaccagtttcccaaggaatgtgctttctccagctcttcacgtggctgctggctccttctcatttctcaggctctgctcaagtaggacctctttcaggaggtctgtccagacacctgcatggagcccctcccctgcccagcttgctctgctggaccgacccaccaagcagatgcgagaggcagaggaaaggctcaaagccattccccagttttgcttccctgatgccaaggactggcttcctgtgtcagagtatatgagaccttttctttcatgctgactggggaagatggcagcagacgctttggctactgcaggcgcttactgccaagtgggaaagggccccggttgccagaggtgtactgtgtcatcagccgccttggctgcttcggcttgttttccaaggtcctagatgaggtggagcg

SEQ ID NO: 30380 - DNA, 590 bp, Homo sapiens
  source 1..590: mol_type = unassigned DNA
agacccagacaactcttggtcggatggtgaggagcccggccgcagcccggggcgcggatgcctgcccgccgcccgccctctctgcaggagcggctcctcctccgggccgcgcggctcccggcgagaccccatccaggcgccgcgcccggcccggctggggaacgcagagggatggtgacagaatggatagtatagaaaatggattggaattgaggaggaaactagaagctaagaggagttaggaggcccttgtaacaatccagatttcacaccctttggagagtttctttcttggataattcaggaagatgagagactgcttaggcgccaccactagtaccatgagtccctgcactggttaaagccatcgccacaacctggacaggcagcaagggctctgggtttgcagagagccgaaatgaccatgactgccaacaagaattccagcatcacccacggagctggtggcactaaagcccctcgggggactctgagcaggtctcagtcagtctctccacctccagttctctccccaccaaggagtcccatctacccgctcagtgatagtgaaacctcagcctgcaggtacc

SEQ ID NO: 30381 - DNA, 580 bp, Homo sapiens
  source 1..580: mol_type = unassigned DNA
tccagacccagacaactcttggtcggatggtgaggagcccggccgcagcccggggcgcggatgcctgcccgccgcccgccctctctgcaggagcggctcctcctccgggccgcgcggctcccggcgagaccccatccaggcgccgcgcccggcccggctggggaacgcagagatttcacaccctttggagagtttctttcttggataattcagggtcttgctgtgttgctcgggctgctcttgaactcctgggctcaaacagtcctcttgcctcagcctcccaacgtgctgggattacgggagcaagccaccccactgtgtgcagcccagaagttgagcctgagaggaagatgagagactgcttaggcgccaccactagtaccatgagtccctgcactggttaaagccatcgccacaacctggacaggcagcaagggctctgggtttgcagagagccgaaatgaccatgactgccaacaagaattccagcatcacccacggagctggtggcactaaagcccctcgggggactctgagcaggtctcagtcagtctctccacctccagttctctccccacca

SEQ ID NO: 30382 - DNA, 600 bp, Homo sapiens
  source 1..600: mol_type = unassigned DNA
agcccggggcgcggatgcctgcccgccgcccgccctctctgcaggagcggctcctcctccgggccgcgcggctcccggcgagaccccatccaggcgccgcgcccggcccggctggggaacgcagaggaagatgagagactgcttaggcgccaccactagtaccatgagtccctgcactggttaaagccatcgccacaacctggacaggcagcaagaaaatcctttgagtttgaggatgcatccagtctccagtccctgtacccctcttctcccactgagaatggtactgagaaccaacccaagtttggatccaaaagcactttagaagaaaatgcctatgaagatattgtgggagatctgcccaaggagaatccatatgaggatgtggacttaaagagccgaagagcaggacgaaaatcccagcaactgtctgagaactccttggactctttgcacaggatgtggagtcctcaggacaggaagtacaacagcccgcccacacagctttccctgaaacccaacagccagtccctgcgcagtgggaactggtcagaaaggaagagccaccggctgccacgattacccaagaggcacagccat

SEQ ID NO: 30383 - DNA, 559 bp, Homo sapiens
  source 1..559: mol_type = unassigned DNA
tcccggcgagaccccatccaggcgccgcgcccggcccggctggggaacgcagagatttcacaccctttggagagtttctttcttggataattcagggtcttgctgtgttgctcgggctgctcttgaactcctgggctcaaacagtcctcttgcctcagcctcccaacgtgctgggattacgggagcaagccaccccactgtgtgcagcccagaagttgagcctgagaggaagatgagagactgcttaggcgccaccactagtaccatgagtccctgcactggttaaagccatcgccacaacctggacaggcagcaagggctctgggtttgcagagagccgaaatgaccatgactgccaacaagaattccagcatcacccacggagctggtggcactaaagcccctcgggggactctgagcagaaaatcctttgagtttgaggatgcatccagtctccagtccctgtacccctcttctcccactgagaatggtactgagaaccaacccaagtttggatccaaaagcactttagaagaaaatgcctatgaagatattgtgg

SEQ ID NO: 30384 - DNA, 887 bp, Homo sapiens
  source 1..887: mol_type = unassigned DNA
cttggtcggatggtgaggaggtgagggccgtccagtttgggggccaacttctcctccctgctgcccccggcccccgcctccctcacccctgtcccccaccctccctcgcacactctcggcgcggctttctcgctgcctccggcgcctccgagcgctcccctccgccgggctccagcagcccaccctctctgtcttgggtggaggcgcacatcctccacgccccctccactcaaatctgcgctccctcccctctctctccctgcagcccggccgcagcccggggcgcggatgcctgcccgccgcccgccctctctgcaggagcggctcctcctccgggccgcgcggctcccggcgagaccccatccaggcgccgcgcccggcccggctggggaacgcagaggaagatgagagactgcttaggcgccaccactagtaccatgagtccctgcactggttaaagccatcgccacaacctggacaggcagcaagggctctgggtttgcagagagccgaaatgaccatgactgccaacaagaattccagcatcacccacggagctggtggcactaaagcccctcgggggactctgagcaggtctcagtcagtctctccacctccagttctctccccaccaaggagtcccatctacccgctcagtgatagtgaaacctcagcctgcaggtaccccagccactccagctcccgggtgctcctcaaggaccggcaccccccagctccttcaccccagaatcctcaagatccctccccagatacttccccacccacctgtcccttcaagaccgccagcttcggttatttggacagaagcccttcggcgtgcaagagagacgcccaaaaggaaagtgtccaaggcgcagcccaggatg

SEQ ID NO: 30385 - DNA, 523 bp, Homo sapiens
  source 1..523: mol_type = unassigned DNA
gccgcgcccggcccggctggggaacgcagagatttcacaccctttggagagtttctttcttggataattcagggctctgggtttgcagagagccgaaatgaccatgactgccaacaagaattccagcatcacccacggagctggtggcactaaagcccctcgggggactctgagcaggtctcagtcagtctctccacctccagttctctccccaccaaggagtcccatctacccgctcagtgatagtgaaacctcagcctgcaggtaccccagccactccagctcccgggtgctcctcaaggaccggcaccccccagctccttcaccccagaatcctcaagatccctccccagatacttccccacccacctgtcccttcaagaccgccagcttcggttatttggacagaagcccttcggcgtgcaagagagacgcccaaaaggaaagtgtccaaggcgcagcccaggatgtagcaggggtcgctgcctgcctcccccttgcccagagcacgccattcccgggg

SEQ ID NO: 30386 - DNA, 3019 bp, Homo sapiens
  source 1..3019: mol_type = unassigned DNA
tttcaggaagatgagagactgcttaggcgccaccactagtaccatgagtccctgcactggttaaagccatcgccacaacctggacaggcagcaagggctctgggtttgcagagagccgaaatgaccatgactgccaacaagaattccagcatcacccacggagctggtggcactaaagcccctcgggggactctgagcagaaaatcctttgagtttgaggatgcatccagtctccagtccctgtacccctcttctcccactgagaatggtactgagaaccaacccaagtttggatccaaaagcactttagaagaaaatgcctatgaagatattgtgggagatctgcccaaggagaatccatatgaggatgtggacttaaagagccgaagagcaggacgaaaatcccagcaactgtctgagaactccttggactctttgcacaggatgtggagtcctcaggacaggaagtacaacagcccgcccacacagctttccctgaaacccaacagccagtccctgcgcagtgggaactggtcagaaaggaagagccaccggctgccacgattacccaagaggcacagccatgacgacatgctgctgctggctcagctgagtctgccgtcctcaccctccagcctcaatgaagacagcctcagcaccaccagcgagctgctgtccagccgccgggcccgccgcattcccaagcttgtccaaagaattaactccatctacaatgccaagagaggaaagaagagattaaaaaagttgtctatgtccagcattgaaacagcatcactgagagatgaaaacagtgagagcgagagcgactctgatgacaggttcaaagcccacacacagcgcctggtccacatccagtcgatgctgaagcgcgcccccagctatcgcacgctggagctggagctgctggagtggcaggagcgggagctttttgagtactttgtggtggtgtccctcaagaagaagccatcgcgaaacacctacctccccgaagtctcctaccagtttcccaagctggaccgacccaccaagcagatgcgagaggcagaggaaaggctcaaagccattccccagttttgcttccctgatgccaaggactggcttcctgtgtcagagtatagcagtgagaccttttctttcatgctgactggggaagatggcagcagacgctttggctactgcaggcgcttactgccaagtgggaaagggccccggttgccagaggtgtactgtgtcatcagccgccttggctgcttcggcttgttttccaaggtcctagatgaggtggagcgccggcgtgggatctccgctgcattggtctatcctttcatgagaagtctcatggagtcgcccttcccagccccagggaagaccatcaaagtgaagacattcctgccaggtgctggcaatgaggtgttagagctgcggcggcccatggactcaaggctggagcacgtggactttgagtgcctttttacctgcctcagtgtgcgccagctcatccgaatctttgcctcactgctgctggagcgccgggtcatttttgtggcagataagctcagtaccctctccagctgctcccacgcggtggtggccttgctctaccccttctcctggcagcacaccttcattcctgtcctcccggcctccatgattgacatcgtctgctgtcccacccccttcctggttggcctgctctccagctccctccccaaactgaaggagctgcctgtggaggaggcgctgatggtgaatctgggatctgaccgattcatccgacagatggacgacgaagacacgttgttacctaggaagttacaggcagctctggagcaggctctggagaggaagaatgagctgatctcccaggactctgacagcgactccgacgatgaatgtaataccctcaatgggctggtgtcggaggtgtttatccggttctttgtggagaccgttgggcactactccctctttctgacacagagtgagaagggagagagggcctttcagcgagaggccttccgcaaatctgtggcctccaaaagcatccgccgctttcttgaggtttttatggagtctcagatgtttgctggcttcatccaagacagggagctaagaaagtgtcgggcaaagggcctttttgagcagcgagtggagcagtacttagaagaactcccagacactgagcagagtggaatgaataagtttctccgaggtttgggcaacaaaatgaagtttctccacaagaagaattaagcctccttctcagtagcagagtccagtgccttgcagagcctgaagcctggggagaaggcccagcctgggaccctctgggctgctgtggctcctctgcccccacagatcctatcctccaagccagcccacctctgccttcatcatatcccaggatactgtttgtaaataatctgctgtaagctttcttaactgttttttgtaacaagcaaagagaatatggcaaatatttgtatattcccaaggggccgggtgctttcctgtcctgccagagcatggatgaagtttcgctgggtgctcgtgactggccagttttgtgcagctgactgtctcagccaaaccactgatcttccctggaggccttcggcctgcctgcctgcctgaggtccccgctgccagtcccgggccctggagagcagatgctgtcttgttatgtacaggaggaccttttaaaaaaatcaagtttctattttttgctggtagtccgcatacccataccctctgtttttgaaaggcaaaggccaatcagtccccatttgtagcatggcaccagggtcttaggcctagtcctctcattcctcccaccctccgagatggtcagtgtgtcatgggaagcccacccccagctctgccagtgctctctgggcctggctcccagtcagtggtggccacgatgcggtacagggcatccctccttcccatctacgggtgttctcaataaacaatgtacagttgtttgggcccagag

SEQ ID NO: 30387 - DNA, 550 bp, Homo sapiens
  source 1..550: mol_type = unassigned DNA
gttgacactctgaatggtttgtgaaggcatcctctggcccctgaaggcattaccatccttaccaggtttaaaatctttcagagtgcacccagcatcatcagctcctgcaagcagaaagggcccaagggagcatgaacacacactggggtcttgctgtgttgctcgggctgctcttgaactcctgggctcaaacagtcctcttgcctcagcctcccaacgtgctgggattacgggagcaagccaccccactgtgtgcagcccagaagttgagcctgagaggaagatgagagactgcttaggcgccaccactagtaccatgagtccctgcactggttaaagccatcgccacaacctggacaggcagcaagggctctgggtttgcagagagccgaaatgaccatgactgccaacaagaattccagcatcacccacggagctggtggcactaaagcccctcgggggactctgagcaggtctcagtcagtctctccacctccagttctctccccaccaaggagtcccatctacccgctcagtgatagtgaaacct

SEQ ID NO: 30388 - DNA, 573 bp, Homo sapiens
  source 1..573: mol_type = unassigned DNA
gtgcgcgcccggtcccgcccctgccctcccagcccttttccctctgctcccgactcccggccccggcagcggtgtccagctccatttcacaccctttggagagtttctttcttggataattcaggaagatgagagactgcttaggcgccaccactagtaccatgagtccctgcactggttaaagccatcgccacaacctggacaggcagcaagggctctgggtttgcagagagccgaaatgaccatgactgccaacaagaattccagcatcacccacggagctggtggcactaaagcccctcgggggactctgagcaggtctcagtcagtctctccacctccagttctctccccaccaaggagtcccatctacccgctcagtgatagtgaaacctcagcctgcaggtaccccagccactccagctcccgggtgctcctcaaggaccggcaccccccagctccttcaccccagaatcctcaagatccctccccagatacttccccacccacctgtcccttcaagaccgccagcttcggttatttggacagaagcccttcggcgtgcaagagaga

SEQ ID NO: 30389 - DNA, 576 bp, Homo sapiens
  source 1..576: mol_type = unassigned DNA
agacccagacaactcttggtcggatggtgaggagcccggccgcagcccggggcgcggatgcctgcccgccgcccgccctctctgcaggagcggctcctcctccgggccgcgcggctcccggcgagaccccatccaggcgccgcgcccggcccggctggggaacgcagagggtcttgctgtgttgctcgggctgctcttgaactcctgggctcaaacagtcctcttgcctcagcctcccaacgtgctgggattacgggagcaagccaccccactgtgtgcagcccagaagttgagcctgagaggaagatgagagactgcttaggcgccaccactagtaccatgagtccctgcactggttaaagccatcgccacaacctggacaggcagcaagggctctgggtttgcagagagccgaaatgaccatgactgccaacaagaattccagcatcacccacggagctggtggcactaaagcccctcgggggactctgagcaggtctcagtcagtctctccacctccagttctctccccaccaaggagtcccatctacccgctcagtgatagtgaaacctcag

SEQ ID NO: 30390 - DNA, 514 bp, Homo sapiens
  source 1..514: mol_type = unassigned DNA
aaacttagggggtctgccgtgtcccagggactgtgctcattttctgacaggagcaatattattaccgactgtgacagcagctcccactaagcctgcaccttagctgcagatccttagcagggcagagagacaaggctgtatttgtatcaggaagatgagagactgcttaggcgccaccactagtaccatgagtccctgcactggttaaagccatcgccacaacctggacaggcagcaagggctctgggtttgcagagagccgaaatgaccatgactgccaacaagaattccagcatcacccacggagctggtggcactaaagcccctcgggggactctgagcaggtctcagtcagtctctccacctccagttctctccccaccaaggagtcccatctacccgctcagtgatagtgaaacctcagcctgcaggtaccccagccactccagctcccgggtgctcctcaaggaccggcaccccccagctccttcaccccagaatcctcaagatccct

SEQ ID NO: 30391 - DNA, 631 bp, Homo sapiens
  source 1..631: mol_type = unassigned DNA
agaccccgttgtgctttgctccagacccagacaactcttggtcggatggtgaggagcccggccgcagcccggggcgcggatgcctgcccgccgcccgccctctctgcaggagcggctcctcctccgggccgcgcggctcccggcgagaccccatccaggcgccgcgcccggcccggctggggaacgcagagatttcacaccctttggagagtttctttcttggataattcaggaagatgagagactgcttaggcgccaccactagtaccatgagtccctgcactggttaaagccatcgccacaacctggacaggcagcaagggctctgggtttgcagagagccgaaatgaccatgactgccaacaagaattccagcatcacccacggagctggtggcactaaagcccctcgggggactctgagcaggtctcagtcagtctctccacctccagttctctccccaccaaggagtcccatctacccgctcagtgatagtgaaacctcagcctgcaggtaccccagccactccagctcccgggtgctcctcaaggaccggcaccccccagctccttcaccccagaatcctcaagatccctccccagatacttccccacccacctgtcccttcaag

SEQ ID NO: 30392 - DNA, 560 bp, Homo sapiens
  source 1..560: mol_type = unassigned DNA
agtgctctgctcacttggctgcgaggagcgccacgaaaggtcagaggaaggagctgtgggaagctcgcagcagggctctgggtttgcagagagccgaaatgaccatgactgccaacaagaattccagcatcacccacggagctggtggcactaaagcccctcgggggactctgagcaggtctcagtcagtctctccacctccagttctctccccaccaaggagtcccatctacccgctcagtgatagtgaaacctcagcctgcaggtaccccagccactccagctcccgggtgctcctcaaggaccggcaccccccagctccttcaccccagaatcctcaagatccctccccagatacttccccacccacctgtcccttcaagaccgccagcttcggttatttggacagaagcccttcggcgtgcaagagagacgcccaaaaggaaagtgtccaaggcgcagcccaggatgtagcaggggtcgctgcctgcctcccccttgcccagagcacgccattcccggggccagcagctggcccccggggcgtcttgctgacccgt

SEQ ID NO: 30393 - DNA, 940 bp, Homo sapiens
  source 1..940: mol_type = unassigned DNA
acttggctgcgaggagcgccacgaaaggtcagaggaaggagctgtgggaagctcgcagcaggtatcggagcttaagccagtggatttgggggccctgggctccctagccggctgcggtgtgagaatggagtgggcaggaaagcagcgggactttcagaaaatcctttgagtttgaggatgcatccagtctccagtccctgtacccctcttctcccactgagaatggtactgagaaccaacccaagtttggatccaaaagcactttagaagaaaatgcctatgaagatattgtgggagatctgcccaaggagaatccatatgaggatgtggacttaaagagccgaagagcaggacgaaaatcccagcaactgtctgagaactccttggactctttgcacaggatgtggagtcctcaggacaggaagtacaacagcccgcccacacagctttccctgaaacccaacagccagtccctgcgcagtgggaactggtcagaaaggaagagccaccggctgccacgattacccaagaggcacagccatgacgacatgctgctgctggctcagctgagtctgccgtcctcaccctccagcctcaatgaagacagcctcagcaccaccagcgagctgctgtccagccgccgggcccgccgcattcccaagcttgtccaaagaattaactccatctacaatgccaagagaggaaagaagagattaaaaaagttgtctatgtccagcattgaaacagcatcactgagagatgaaaacagtgagagcgagagcgactctgatgacaggttcaaagcccacacacagcgcctggtccacatccagtcgatgctgaagcgcgcccccagctatcgcacgctggagctggagctgctggagtggcaggagcgggagctttttgagtactttgtggtggtgtccctcaagaagaa

SEQ ID NO: 30394 - DNA, 2679 bp, Homo sapiens
  source 1..2679: mol_type = unassigned DNA
gaagaaaacaagtccactcactgtcttctcccttctcccctctgagctgttcaagcaagttcccaggagcagttcagagcccctgttggactggaagggaggtaggaggagtggaatgcatgcaaaaaccgagctgatcaaaagacagtgctgtttcatggaagcctcccagaactgagagagagagagagagagagagagagagagagacagtgagaaagaaagaaaaagagagcgcccttgtgcacgcgctaggccaagagcgcgccgctgtgcgcgcgcccgcctagcgaggacagggtctccatgacaaccggcctggccggctagcagtgctctgctcacttggctgcgaggagcgccacgaaaggtcagaggaaggagctgtgggaagctcgcagcaggtatcggagcttaagccagtggatttgggggccctgggctccctagccggctgcggtgtgagaatggagtgggcaggaaagcagcgggactttcagggctctgggtttgcagagagccgaaatgaccatgactgccaacaagaattccagcatcacccacggagctggtggcactaaagcccctcgggggactctgagcagaaaatcctttgagtttgaggatgcatccagtctccagtccctgtacccctcttctcccactgagaatggtactgagaaccaacccaagtttggatccaaaagcactttagaagaaaatgcctatgaagatattgtgggagatctgcccaaggagaatccatatgaggatgtggacttaaagagccgaagagcaggacgaaaatcccagcaactgtctgagaactccttggactctttgcacaggatgtggagtcctcaggacaggaagtacaacagcccgcccacacagctttccctgaaacccaacagccagtccctgcgcagtgggaactggtcagaaaggaagagccaccggctgccacgattacccaagaggcacagccatgacgacatgctgctgctggctcagctgagtctgccgtcctcaccctccagcctcaatgaagacagcctcagcaccaccagcgagctgctgtccagccgccgggcccgccgcattcccaagcttgtccaaagaattaactccatctacaatgccaagagaggaaagaagagattaaaaaagttgtctatgtccagcattgaaacagcatcactgagagatgaaaacagtgagagcgagagcgactctgatgacaggttcaaagcccacacacagcgcctggtccacatccagtcgatgctgaagcgcgcccccagctatcgcacgctggagctggagctgctggagtggcaggagcgggagctttttgagtactttgtggtggtgtccctcaagaagaagccatcgcgaaacacctacctccccgaagtctcctaccagtttcccaagctggaccgacccaccaagcagatgcgagaggcagaggaaaggctcaaagccattccccagttttgcttccctgatgccaaggactggcttcctgtgtcagagtatagcagtgagaccttttctttcatgctgactggggaagatggcagcagacgctttggctactgcaggcgcttactgccaagtgggaaagggccccggttgccagaggtgtactgtgtcatcagccgccttggctgcttcggcttgttttccaaggtcctagatgaggtggagcgccggcgtgggatctccgctgcattggtctatcctttcatgagaagtctcatggagtcgcccttcccagccccagggaagaccatcaaagtgaagacattcctgccaggtgctggcaatgaggtgttagagctgcggcggcccatggactcaaggctggagcacgtggactttgagtgcctttttacctgcctcagtgtgcgccagctcatccgaatctttgcctcactgctgctggagcgccgggtcatttttgtggcagataagctcagtaccctctccagctgctcccacgcggtggtggccttgctctaccccttctcctggcagcacaccttcattcctgtcctcccggcctccatgattgacatcgtctgctgtcccacccccttcctggttggcctgctctccagctccctccccaaactgaaggagctgcctgtggaggaggcgctgatggtgaatctgggatctgaccgattcatccgacagatggacgacgaagacacgttgttacctaggaagttacaggcagctctggagcaggctctggagaggaagaatgagctgatctcccaggactctgacagcgactccgacgatgaatgtaataccctcaatgggctggtgtcggaggtgtttatccggttctttgtggagaccgttgggcactactccctctttctgacacagagtgagaagggagagagggcctttcagcgagaggccttccgcaaatctgtggcctccaaaagcatccgccgctttcttgaggtttttatggagtctcagatgtttgctggcttcatccaagacagggagctaagaaagtgtcgggcaaagggcctttttgagcagcgagtggagcagtacttagaagaactcccagacactgagcagagtggaatgaataagtttctccgaggtttgggcaacaaaatgaagtttctccacaagaagaattaa

SEQ ID NO: 30395 - DNA, 588 bp, Homo sapiens
  source 1..588: mol_type = unassigned DNA
ttgactttcacttccccaggcctcagtgcctcttcccacagaggctgggttttctccttgttgctgcctgagcaggtgaccttgggatggttcccacagagcagtgtggctccaggcactgccctttgctgtctacttcagcacctgtggcttcagggctctgggtttgcagagagccgaaatgaccatgactgccaacaagaattccagcatcacccacggagctggtggcactaaagcccctcgggggactctgagcagaaaatcctttgagtttgaggatgcatccagtctccagtccctgtacccctcttctcccactgagaatggtactgagaaccaacccaagtttggatccaaaagcactttagaagaaaatgcctatgaagatattgtgggagatctgcccaaggagaatccatatgaggatgtggacttaaagagccgaagagcaggacgaaaatcccagcaactgtctgagaactccttggactctttgcacaggatgtggagtcctcaggacaggaagtacaacagcccgcccacacagctttccctgaaacccaacagccagtccctgcgcagtgg

SEQ ID NO: 30396 - DNA, 534 bp, Homo sapiens
  source 1..534: mol_type = unassigned DNA
gatgcctgcccgccgcccgccctctctgcaggagcggctcctcctccgggccgcgcggctcccggcgagaccccatccaggcgccgcgcccggcccggctggggaacgcagagatttcacaccctttggagagtttctttcttggataattcagggtcttgctgtgttgctcgggctgctcttgaactcctgggctcaaacagtcctcttgcctcagcctcccaacgtgctgggattacgggagcaagccaccccactgtgtgcagcccagaagttgagcctgagagggctctgggtttgcagagagccgaaatgaccatgactgccaacaagaattccagcatcacccacggagctggtggcactaaagcccctcgggggactctgagcaggtctcagtcagtctctccacctccagttctctccccaccaaggagtcccatctacccgctcagtgatagtgaaacctcagcctgcaggtaccccagccactccagctcccgggtgctcctcaaggaccggcaccccccagct

SEQ ID NO: 30397 - DNA, 751 bp, Homo sapiens
  source 1..751: mol_type = unassigned DNA
acataatatccagtgcgtcctccctggcactccgattctcagtagtcatgaaccagctggcttctatatctctcaccaatcacagggtcttgctgtgttgctcgggctgctcttgaactcctgggctcaaacagtcctcttgcctcagcctcccaacgtgctgggattacgggagcaagccaccccactgtgtgcagcccagaagttgagcctgagaggaagatgagagactgcttaggcgccaccactagtaccatgagtccctgcactggttaaagccatcgccacaacctggacaggcagcaagggctctgggtttgcagagagccgaaatgaccatgactgccaacaagaattccagcatcacccacggagctggtggcactaaagcccctcgggggactctgagcaggtctcagtcagtctctccacctccagttctctccccaccaaggagtcccatctacccgctcagtgatagtgaaacctcagcctgcaggtaccccagccactccagctcccgggtgctcctcaaggaccggcaccccccagctccttcaccccagaatcctcaagatccctccccagatacttccccacccacctgtcccttcaagaccgccagcttcggttatttggacagaagcccttcggcgtgcaagagagacgcccaaaaggaaagtgtccaaggcgcagcccaggatgtagcaggggtcgctgcctgcctcccccttgcccagagcacgccatt

SEQ ID NO: 30398 - DNA, 3396 bp, Homo sapiens
  source 1..3396: mol_type = unassigned DNA
ttctgcctgcttcctgaggagtggggtctgagttcctctggggcgtaaggcacattcagacatctgtagaacaagtgtgggactcagtggcacccaggctcaatcctgctgctgagcagaggtgctggagtgagtcctgctctgcagcaggaaaatagggaaaggggtgcagagagggctgtgttctgagttccccagggacctgttcaccccacggattctgccaccaggattgagctaggactgacccggcccatggtgttactctattttagaaaatgtgtgtgttggaggggtgggggcaggagatacagcttgtggaaaggagtgccactcaacatcttcaagggcagggattctgttttggacttttctgagattttctggtaatgccaatacaatgcccgctgccagagattttagaactagtcctgagaagcaagaactcccctcacccccaccctttggcccagactccttccaagcctttcacacctcccctgtgtcacagcaggagagtttgttccaaaaggggagtgttgatggttctctttttgctgagatcagcggtagagggaatagacactacagtaggagagtcatcgaacagatcattactgaacacttcctccttgctaatcactgttccgttccgaggttgcctcagtgaacaacacaaaaccctgccctaaaagacttgttgaacggcatcgtaggagatctgcccaaggagaatccatatgaggatgtggacttaaagagccgaagagcaggacgaaaatcccagcaactgtctgagaactccttggactctttgcacaggatgtggagtcctcaggacaggaagtacaacagcccgcccacacagctttccctgaaacccaacagccagtccctgcgcagtgggaactggtcagaaaggaagagccaccggctgccacgattacccaagaggcacagccatgacgacatgctgctgctggctcagctgagtctgccgtcctcaccctccagcctcaatgaagacagcctcagcaccaccagcgagctgctgtccagccgccgggcccgccgcattcccaagcttgtccaaagaattaactccatctacaatgccaagagaggaaagaagagattaaaaaagttgtctatgtccagcattgaaacagcatcactgagagatgaaaacagtgagagcgagagcgactctgatgacaggttcaaagcccacacacagcgcctggtccacatccagtcgatgctgaagcgcgcccccagctatcgcacgctggagctggagctgctggagtggcaggagcgggagctttttgagtactttgtggtggtgtccctcaagaagaagccatcgcgaaacacctacctccccgaagtctcctaccagtttcccaagctggaccgacccaccaagcagatgcgagaggcagaggaaaggctcaaagccattccccagttttgcttccctgatgccaaggactggcttcctgtgtcagagtatagcagtgagaccttttctttcatgctgactggggaagatggcagcagacgctttggctactgcaggcgcttactgccaagtgggaaagggccccggttgccagaggtgtactgtgtcatcagccgccttggctgcttcggcttgttttccaaggtcctagatgaggtggagcgccggcgtgggatctccgctgcattggtctatcctttcatgagaagtctcatggagtcgcccttcccagccccagggaagaccatcaaagtgaagacattcctgccaggtgctggcaatgaggtgttagagctgcggcggcccatggactcaaggctggagcacgtggactttgagtgcctttttacctgcctcagtgtgcgccagctcatccgaatctttgcctcactgctgctggagcgccgggtcatttttgtggcagataagctcagtaccctctccagctgctcccacgcggtggtggccttgctctaccccttctcctggcagcacaccttcattcctgtcctcccggcctccatgattgacatcgtctgctgtcccacccccttcctggttggcctgctctccagctccctccccaaactgaaggagctgcctgtggaggaggcgctgatggtgaatctgggatctgaccgattcatccgacagatggacgacgaagacacgttgttacctaggaagttacaggcagctctggagcaggctctggagaggaagaatgagctgatctcccaggactctgacagcgactccgacgatgaatgtaataccctcaatgggctggtgtcggaggtgtttatccggttctttgtggagaccgttgggcactactccctctttctgacacagagtgagaagggagagagggcctttcagcgagaggccttccgcaaatctgtggcctccaaaagcatccgccgctttcttgaggtttttatggagtctcagatgtttgctggcttcatccaagacagggagctaagaaagtgtcgggcaaagggcctttttgagcagcgagtggagcagtacttagaagaactcccagacactgagcagagtggaatgaataagtttctccgaggtttgggcaacaaaatgaagtttctccacaagaagaattaagcctccttctcagtagcagagtccagtgccttgcagagcctgaagcctggggagaaggcccagcctgggaccctctgggctgctgtggctcctctgcccccacagatcctatcctccaagccagcccacctctgccttcatcatatcccaggatactgtttgtaaataatctgctgtaagctttcttaactgttttttgtaacaagcaaagagaatatggcaaatatttgtatattcccaaggggccgggtgctttcctgtcctgccagagcatggatgaagtttcgctgggtgctcgtgactggccagttttgtgcagctgactgtctcagccaaaccactgatcttccctggaggccttcggcctgcctgcctgcctgaggtccccgctgccagtcccgggccctggagagcagatgctgtcttgttatgtacaggaggaccttttaaaaaaatcaagtttctattttttgctggtagtccgcatacccataccctctgtttttgaaaggcaaaggccaatcagtccccatttgtagcatggcaccagggtcttaggcctagtcctctcattcctcccaccctccgagatggtcagtgtgtcatgggaagcccacccccagctctgccagtgctctctgggcctggctcccagtcagtggtggccacgatgcggtacagggcatccctccttcccatctacgggtgttctcaataaacaatgtacagttgtttgggcccag

SEQ ID NO: 30399 - DNA, 502 bp, Homo sapiens
  source 1..502: mol_type = unassigned DNA
gggccatgagggctccaccctcatgaatggattaatgctgtcattgctagagtttgtttctgataaaaacaagtccggccccctcctgccctctctctcttttgtgtgtactgttgtgcccttctgcctttctgctatgggatgatgcaggaagaaggcccgcaccagattcagccatcaatcttaagacttccaagcctctggaaccgtaagaaataaatcctcacttcattagcataaattcagggctctgggtttgcagagagccgaaatgaccatgactgccaacaagaattccagcatcacccacggagctggtggcactaaagcccctcgggggactctgagcagaaaatcctttgagtttgaggatgcatccagtctccagtccctgtacccctcttctcccactgagaatggtactgagaaccaacccaagtttggatccaaaagcactttagaagaaaatgcctatgaagatattgtgggagatctgcccaag

SEQ ID NO: 30400 - DNA, 299 bp, Homo sapiens
  source 1..299: mol_type = unassigned DNA
acataatatccagtgcgtcctccctggcactccgattctcagtagtcatgaaccagctggcttctatatctctcaccaatcacaggtaatttaggtctccctcaggaagatgagagactgcttaggcgccaccactagtaccatgagtccctgcactggttaaagccatcgccacaacctggacaggcagcaagggctctgggtttgcagagagccgaaatgaccatgactgccaacaagaattccagcatcacccacggagctggtggcactaaagcccctcgggggactctgagcag

SEQ ID NO: 30401 - DNA, 1309 bp, Homo sapiens
  source 1..1309: mol_type = unassigned DNA
gtagcctccccactgcagacgggcagctgcatgactcatgagctgaggggccaggcagaagccattctctttggttcacaggaattctgcttgtttatttgtgtgtgtgtgagttcgtgtgtttccttcttcccttctcccccttctctaactcttcctcctctgcaggagatctgcccaaggagaatccatatgaggatgtggacttaaagagccgaagagcaggacgaaaatcccagcaactgtctgagaactccttggactctttgcacaggatgtggagtcctcaggacaggaagtacaacagcccgcccacacagctttccctgaaacccaacagccagtccctgcgcagtgggaactggtcagaaaggaagagccaccggctgccacgattacccaagaggcacagccatgacgacatgctgctgctggctcagctgagtctgccgtcctcaccctccagcctcaatgaagacagcctcagcaccaccagcgagctgctgtccagccgccgggcccgccgcattcccaagcttgtccaaagaattaactccatctacaatgccaagagaggaaagaagagattaaaaaagttgtctatgtccagcattgaaacagcatcactgagagatgaaaacagtgagagcgagagcgactctgatgacaggttcaaagcccacacacagcgcctggtccacatccagtcgatgctgaagcgcgcccccagctatcgcacgctggagctggagctgctggagtggcaggagcgggagctttttgagtactttgtggtggtgtccctcaagaagaagccatcgcgaaacacctacctccccgaagtctcctaccagtttcccaagctggaccgacccaccaagcagatgcgagaggcagaggaaaggctcaaagccattccccagttttgcttccctgatgccaaggactggcttcctgtgtcagagtatagcagtgagaccttttctttcatgctgactggggaagatggcagcagacgctttggctactgcaggcgcttactgccaagtgggaaagggccccggttgccagaggtgtactgtgtcatcagccgccttggctgcttcggcttgttttccaaggtcctagatgaggtggagcgccggcgtgggatctccgctgcattggtctatcctttcatgagaagtctcatggagtcgcccttcccagccccagggaagaccatcaaagtgaagacattcctgccaggtgctggcaatgaggtgttagagctgcggcggcccatggactcaaggctggagcacgtgga

SEQ ID NO: 30402 - DNA, 583 bp, Homo sapiens
  source 1..583: mol_type = unassigned DNA
gtcacataatatccagtgcgtcctccctggcactccgattctcagtagtcatgaaccagctggcttctatatctctcaccaatcacaggtaatttaggtctccctcagggtcttgctgtgttgctcgggctgctcttgaactcctgggctcaaacagtcctcttgcctcagcctcccaacgtgctgggattacgggagcaagccaccccactgtgtgcagcccagaagttgagcctgagaggaagatgagagactgcttaggcgccaccactagtaccatgagtccctgcactggttaaagccatcgccacaacctggacaggcagcaagggctctgggtttgcagagagccgaaatgaccatgactgccaacaagaattccagcatcacccacggagctggtggcactaaagcccctcgggggactctgagcagaaaatcctttgagtttgaggatgcatccagtctccagtccctgtacccctcttctcccactgagaatggtactgagaaccaacccaagtttggatccaaaagcactttagaagaaaatgcctatgaagatattgtgggagatctgccc

SEQ ID NO: 30403 - DNA, 556 bp, Homo sapiens
  source 1..556: mol_type = unassigned DNA
gtgtgtatgagaaaatgacataaagtttcagaccccgttgtgctttgctccagacccagacaactcttggtcggatggtgaggagcccggccgcagcccggggcgcggatgcctgcccgccgcccgccctctctgcaggagcggctcctcctccgggccgcgcggctcccggcgagaccccatccaggcgccgcgcccggcccggctggggaacgcagaggaagatgagagactgcttaggcgccaccactagtaccatgagtccctgcactggttaaagccatcgccacaacctggacaggcagcaagggctctgggtttgcagagagccgaaatgaccatgactgccaacaagaattccagcatcacccacggagctggtggcactaaagcccctcgggggactctgagcaggtctcagtcagtctctccacctccagttctctccccaccaaggagtcccatctacccgctcagtgatagtgaaacctcagcctgcaggtaccccagccactccagctcccgggtgctcctcaaggaccggcaccccccagct

SEQ ID NO: 30404 - DNA, 638 bp, Homo sapiens
  source 1..638: mol_type = unassigned DNA
gattactgtgctttgggattaaagtgtcctgccgtttctggaagagactgctagtcataaagacaggtagggctgaagggtggaggtagggtctccagctgcagttgtcaagaacccaacgtgaaggctgactgagcagagaaactgctgctgcccagaaagaaagcacttttagcagtgggctctgggtttgcagagagccgaaatgaccatgactgccaacaagaattccagcatcacccacggagctggtggcactaaagcccctcgggggactctgagcaggtctcagtcagtctctccacctccagttctctccccaccaaggagtcccatctacccgctcagtgatagtgaaacctcagcctgcaggtaccccagccactccagctcccgggtgctcctcaaggaccggcaccccccagctccttcaccccagaatcctcaagatccctccccagatacttccccacccacctgtcccttcaagaccgccagcttcggttatttggacagaagcccttcggcgtgcaagagagacgcccaaaaggaaagtgtccaaggcgcagcccaggatgtagcaggggtcgctgcctgcctcccccttgcccagagcacgccattcccggggccagcag

SEQ ID NO: 30405 - DNA, 4545 bp, Homo sapiens
  source 1..4545: mol_type = unassigned DNA
gggggtcgggggtcgggggctgggggctgaggactgagtcgagccagcagcccagggcatctgtccacgctgtcagaggagcctctgggcgtggggctggcccttagagggctactgcgctgcttaacttgcctttcacagaaaaccactggaggagatactcacaaaaatgaaggggaagaacaggaaacaggaagacatgagatgaaggaaacaggagattcaacatggatttcacaccctttggagagtttctttcttggataattcaggaagatgagagactgcttaggcgccaccactagtaccatgagtccctgcactggttaaagccatcgccacaacctggacaggcagcaagggctctgggtttgcagagagccgaaatgaccatgactgccaacaagaattccagcatcacccacggagctggtggcactaaagcccctcgggggactctgagcaggtctcagtcagtctctccacctccagttctctccccaccaaggagtcccatctacccgctcagtgatagtgaaacctcagcctgcaggtaccccagccactccagctcccgggtgctcctcaaggaccggcaccccccagctccttcaccccagaatcctcaagatccctccccagatacttccccacccacctgtcccttcaagaccgccagcttcggttatttggacagaagcccttcggcgtgcaagagagacgcccaaaaggaaagtgtccaaggcgcagcccaggatgtagcaggggtcgctgcctgcctcccccttgcccagagcacgccattcccggggccagcagctggcccccggggcgtcttgctgacccgtaccggtacccgcgcccacagcctgggcatccgggagaagatatcagcatgggaaggtcgccgagaggcgtcgcccaggatgagcatgtgtggagagaagcgggagggctctgggagcgagtgggcggccagtgagggctgccccagcctgggctgtcccagcgtggtgccgtccccctgcagctctgaaaagacctttgatttcaagggcctccggaggatgagcaggaccttctccgagtgttcctacccagagactgaggaggagggagaggcgctccctgtccgggactctttctaccggctggagaaacggctgggccggagtgagcccagcgccttcctcagggggcatggcagcaggaaggagagctcagcagtgctgagccggatccagaaaattgaacaggtcctgaaggagcagccgggccgggggctcccccagctccccagcagctgctacagcgtggaccgggggaaaaggaagactggaaccttgggctccttggaggagccggcagggggcgcgagtgtgagcgctggcagccgggcagtcggagtggctggtgttgcgggggaggcgggcccacccccagagagggaaggcagtggttccactaagcccgggacccctggaaatagccctagctcccagcggctgccatcgaagagttccctcgatcccgctgtgaaccctgtccccaaacccaagcgcacctttgaatacgaggctgacaagaaccccaagagtaagcccagtaatggtctacctccttcacccacacctgctgctccacctcccttgccctccaccccagccccgccagtcacccggagacccaagaaggacatgcgtggtcaccgcaagtcccagagcagaaaatcctttgagtttgaggatgcatccagtctccagtccctgtacccctcttctcccactgagaatggtactgagaaccaacccaagtttggatccaaaagcactttagaagaaaatgcctatgaagatattgtgggagatctgcccaaggagaatccatatgaggatgtggacttaaagagccgaagagcaggacgaaaatcccagcaactgtctgagaactccttggactctttgcacaggatgtggagtcctcaggacaggaagtacaacagcccgcccacacagctttccctgaaacccaacagccagtccctgcgcagtgggaactggtcagaaaggaagagccaccggctgccacgattacccaagaggcacagccatgacgacatgctgctgctggctcagctgagtctgccgtcctcaccctccagcctcaatgaagacagcctcagcaccaccagcgagctgctgtccagccgccgggcccgccgcattcccaagcttgtccaaagaattaactccatctacaatgccaagagaggaaagaagagattaaaaaagttgtctatgtccagcattgaaacagcatcactgagagatgaaaacagtgagagcgagagcgactctgatgacaggttcaaagcccacacacagcgcctggtccacatccagtcgatgctgaagcgcgcccccagctatcgcacgctggagctggagctgctggagtggcaggagcgggagctttttgagtactttgtggtggtgtccctcaagaagaagccatcgcgaaacacctacctccccgaagtctcctaccagtttcccaagctggaccgacccaccaagcagatgcgagaggcagaggaaaggctcaaagccattccccagttttgcttccctgatgccaaggactggcttcctgtgtcagagtatagcagtgagaccttttctttcatgctgactggggaagatggcagcagacgctttggctactgcaggcgcttactgccaagtgggaaagggccccggttgccagaggtgtactgtgtcatcagccgccttggctgcttcggcttgttttccaaggtcctagatgaggtggagcgccggcgtgggatctccgctgcattggtctatcctttcatgagaagtctcatggagtcgcccttcccagccccagggaagaccatcaaagtgaagacattcctgccaggtgctggcaatgaggtgttagagctgcggcggcccatggactcaaggctggagcacgtggactttgagtgcctttttacctgcctcagtgtgcgccagctcatccgaatctttgcctcactgctgctggagcgccgggtcatttttgtggcagataagctcagtaccctctccagctgctcccacgcggtggtggccttgctctaccccttctcctggcagcacaccttcattcctgtcctcccggcctccatgattgacatcgtctgctgtcccacccccttcctggttggcctgctctccagctccctccccaaactgaaggagctgcctgtggaggaggcgctgatggtgaatctgggatctgaccgattcatccgacagatggacgacgaagacacgttgttacctaggaagttacaggcagctctggagcaggctctggagaggaagaatgagctgatctcccaggactctgacagcgactccgacgatgaatgtaataccctcaatgggctggtgtcggaggtgtttatccggttctttgtggagaccgttgggcactactccctctttctgacacagagtgagaagggagagagggcctttcagcgagaggccttccgcaaatctgtggcctccaaaagcatccgccgctttcttgaggtttttatggagtctcagatgtttgctggcttcatccaagacagggagctaagaaagtgtcgggcaaagggcctttttgagcagcgagtggagcagtacttagaagaactcccagacactgagcagagtggaatgaataagtttctccgaggtttgggcaacaaaatgaagtttctccacaagaagaattaagcctccttctcagtagcagagtccagtgccttgcagagcctgaagcctggggagaaggcccagcctgggaccctctgggctgctgtggctcctctgcccccacagatcctatcctccaagccagcccacctctgccttcatcatatcccaggatactgtttgtaaataatctgctgtaagctttcttaactgttttttgtaacaagcaaagagaatatggcaaatatttgtatattcccaaggggccgggtgctttcctgtcctgccagagcatggatgaagtttcgctgggtgctcgtgactggccagttttgtgcagctgactgtctcagccaaaccactgatcttccctggaggccttcggcctgcctgcctgcctgaggtccccgctgccagtcccgggccctggagagcagatgctgtcttgttatgtacaggaggaccttttaaaaaaatcaagtttctattttttgctggtagtccgcatacccataccctctgtttttgaaaggcaaaggccaatcagtccccatttgtagcatggcaccagggtcttaggcctagtcctctcattcctcccaccctccgagatggtcagtgtgtcatgggaagcccacccccagctctgccagtgctctctgggcctggctcccagtcagtggtggccacgatgcggtacagggcatccctccttcccatctacgggtgttctcaataaacaatgtacagttgtttgggcccagag

SEQ ID NO: 30406 - DNA, 564 bp, Homo sapiens
  source 1..564: mol_type = unassigned DNA
taatatccagtgcgtcctccctggcactccgattctcagtagtcatgaaccagctggcttctatatctctcaccaatcacaggaagatgagagactgcttaggcgccaccactagtaccatgagtccctgcactggttaaagccatcgccacaacctggacaggcagcaagggctctgggtttgcagagagccgaaatgaccatgactgccaacaagaattccagcatcacccacggagctggtggcactaaagcccctcgggggactctgagcaggtctcagtcagtctctccacctccagttctctccccaccaaggagtcccatctacccgctcagtgatagtgaaacctcagcctgcaggtaccccagccactccagctcccgggtgctcctcaaggaccggcaccccccagctccttcaccccagaatcctcaagatccctccccagatacttccccacccacctgtcccttcaagaccgccagcttcggttatttggacagaagcccttcggcgtgcaagagagacgcccaaaaggaaagtgtccaaggcgcagccca

SEQ ID NO: 30407 - DNA, 659 bp, Homo sapiens
  source 1..659: mol_type = unassigned DNA
agacccagacaactcttggtcggatggtgaggaggtgagggccgtccagtttgggggccaacttctcctccctgctgcccccggcccccgcctccctcacccctgtcccccaccctccctcgcacactctcggcgcggctttctcgctgcctccggcgcctccgagcgctcccctccgccgggctccagcagcccaccctctctgtcttgggtggaggcgcacatcctccacgccccctccactcaaatctgcgctccctcccctctctctccctgcagcccggccgcagcccggggcgcggatgcctgcccgccgcccgccctctctgcaggagcggctcctcctccgggccgcgcggctcccggcgagaccccatccaggcgccgcgcccggcccggctggggaacgcagagatttcacaccctttggagagtttctttcttggataattcaggaagatgagagactgcttaggcgccaccactagtaccatgagtccctgcactggttaaagccatcgccacaacctggacaggcagcaagggctctgggtttgcagagagccgaaatgaccatgactgccaacaagaattccagcatcacccacggagctggtggcactaaagcccctcgggggactctgagcaggtctcagtca

SEQ ID NO: 30408 - DNA, 2899 bp, Homo sapiens
  source 1..2899: mol_type = unassigned DNA
gggacctttagagagttagcaataaggctggagaaggaaaagccggcgcgcccgcggcccgcgcgatttcccgccgagcccgcgtccccggcggcgggcgggctccgggggcgcccgggccgcggcggcggcggcggcgcgagctgcgcctccgggccggtgaatcatcccggcagacaccaagagccgcggcagcagagaggagcgctgaaacatggctgaagcggccacgggctttctggagcagctcaagtcctgcatagtttggtcttggacgtatctgtggaccgtgtggttcttcatcgtgctattcctggtctacatcctgcgggtgcctttgaaaatcaacgacaacttgagcacagtgagcatgtttttgaacacattaacaccgaagttctacgtggccctaacaggcacttcctcactaatatcagggcttattttgatatttgaatggtggtattttcgcaaatacggaacttcattcattgaacaagtctcagtaagccacttgcgcccccttctgggaggggttgacaacaactcttccaacaattctaattccagtaacggggactcagattccaataggcaaagtgtctcagaatgcaaagtatggcgaaatccactaaatttatttaggggtgctgaatacaatcggtatacttgggtgacaggacgagagcctcttacttactatgacatgaatctctctgcccaagaccaccagacattctttacttgtgactcggaccatctgcgtcccgcagatgcaataatgcagaaagcctggagagagagaaacccccaagctaggatttctgcagctcatgaagccttggagataaatgaaattaggtccagagttgaagttcccctaattgcttcctctaccatctgggagataaaattgttaccaaagtgtgcaactgcttatattctcttggctgaagaggaagcaacaaccattgctgaagcagaaaaattatttaagcaggccctgaaggctggagatggctgttaccgacgctctcagcagctacaacatcatggatcccagtatgaagcccaacatagacgagacaccaatgtcttggtgtacatcaaaagaaggctagcaatgtgtgccagaagactcgggaggaccagggaagcagtgaaaatgatgagagatttaatgaaggagttcccccttctgagtatgttcaatatccatgaaaaccttttagaagcccttctggaactacaagcatatgctgatgttcaggcagtcttagcaaagtatgatgatataagcttaccaaagtcagcaacaatatgctacacagctgctttgctcaaagcaagagctgtctctgacaaattctctcctgaggctgcatctcggcgggggctgagcacagcagagatgaatgcagtagaggccattcatagagctgtggaattcaatcctcatgtgccaaaatacctactagaaatgaaaagcttaatcctacccccagaacatatcctgaagagaggagacagtgaagcaatagcatatgcattctttcatcttgcacactggaagagagtggaaggggctttgaatcttttgcattgtacgtgggaaggcacttttcggatgatcccttatcccttggaaaaggggcacctattttatccttacccaatctgtacagaaacagcagaccgagagctgcttccatctttccatgaagtctcagtttacccaaagaaggagcttcccttctttattctctttactgctggattatgttccttcacagccatgctggccctcctgacacatcagttcccggaacttatgggggtcttcgcaaaagctatgattgacattttctgctcggcagagttcagggactggaattgcaagagtattttcatgcgtgttgaagatgaactggaaatccctccggcacctcaatctcaacatttccaaaactgaactcatcacccctcttcccccaccaccaaaactgctcctcctcctgtattcctgacctccgccatccaccccgttgctcaagccggaaactcggcagcccttccaaactcttccctctctcactccccacatcccatcgtctcggccttcacaatctgtcagttctaacctcctaagcaactaggccttcagtaaatgtgattcacctcttctttccctccttttcccaaagcatccctcttagtctaggtccttgttgtttcttgcctgaactcctgccatagtcttaactggtctccttgcttcctgtcttatcctccaccgtctttcttttatactgacacaagaatggtctttctgaattgcacatgtgagcatgtcacttccctgcttaaatttctccagtggattcccagggacttcaggatcaagtcctagttgttcagcatggcatccaagactctttatgatctggcccttgcttacctctcagccttagctctcccaactcttgcacagtcactgctcttcagccatagtggatcactcaccattcccagatgtaccaggctctcgcacacctctgcacctttgcacgtgctgtttgctgtgcgtggaatgcccttcactgtcaccaccctgctcatccactctactaatgcctcttcattcttttatactcagctttctttaaagttcttctaagctgagttaggtgtctgtcctttatgatcccgcagtattccatgaatacgtatattctcacatttattgtactgtattataattgttgaaaacttgtctgtcccatttagaatgtgagctccttgagagcagaacggtgtcttcattatctctgtatccccaaggctttgcacagtgccttgctcatagtaggttttcaataaatgattattaaataaataa

SEQ ID NO: 30409 - DNA, 2360 bp, Homo sapiens
  source 1..2360: mol_type = unassigned DNA
gtcttactgctacagcagggctggggattgcagtatccgctgttgctgctgctcccagtcctgcccctgctgctacctagtccagcctcaccgcatcccagaagaggcacgtcggccttcatttgcctagtggattttcaaaagcagctcttcggtttttggtgctgttaagagaccttgcatttcaatcacaccgggagaaaactgaagctcgtaacaggagaatctggcagctggacacagcttggactgcattgtctggcttcatgacccctgctgtgtagccggctcatctcttcactctcacatgtacactctcctcgcttttctttcttttttttttcccttttctttcttctaatttttaaaaagcagcctctggagccagccatgtttggcactgaatcttcatagaaaaatatttgttgaatgagtgaacgtgggatctctgttcattttggtatattactttgctttctgggctgagctcaggacagatgccaaagcctttccctctaatgacatcaaagccctacttctaaaaccagactggatgtgattcccttctacaaacagattcagtaaagaaatgtgaatactcccacaaaaagcccatgagcatgtttttgaacacattaacaccgaagttctacgtggccctaacaggcacttcctcactaatatcagggcttattttgatatttgaatggtggtattttcgcaaatacggaacttcattcattgaacaagtctcagtaagccacttgcgcccccttctgggaggggttgacaacaactcttccaacaattctaattccagtaacggggactcagattccaataggcaaagtgtctcagaatgcaaagtatggcgaaatccactaaatttatttaggggtgctgaatacaatcggtatacttgggtgacaggacgagagcctcttacttactatgacatgaatctctctgcccaagaccaccagacattctttacttgtgactcggaccatctgcgtcccgcagatgcaataatgcagaaagcctggagagagagaaacccccaagctaggatttctgcagctcatgaagccttggagataaatgagtgtgcaactgcttatattctcttggctgaagaggaagcaacaaccattgctgaagcagaaaaattatttaagcaggccctgaaggctggagatggctgttaccgacgctctcagcagctacaacatcatggatcccagtatgaagcccaacatagacgagacaccaatgtcttggtgtacatcaaaagaaggctagcaatgtgtgccagaagactcgggaggaccagggaagcagtgaaaatgatgagagatttaatgaaggagttcccccttctgagtatgttcaatatccatgaaaaccttttagaagcccttctggaactacaagcatatgctgatgttcaggcagtcttagcaaagtatgatgatataagcttaccaaagtcagcaacaatatgctacacagctgctttgctcaaagcaagagctgtctctgacaaattctctcctgaggctgcatctcggcgggggctgagcacagcagagatgaatgcagtagaggccattcatagagctgtggaattcaatcctcatgtgccaaaatacctactagaaatgaaaagcttaatcctacccccagaacatatcctgaagagaggagacagtgaagcaatagcatatgcattctttcatcttgcacactggaagagagtggaaggggctttgaatcttttgcattcttttcggatgatcccttatcccttggaaaaggggcacctattttatccttacccaatctgtacagaaacagcagaccgagagctgcttccatctttccatgaagtctcagtttacccaaagaaggagcttcccttctttattctctttactgctggattatgttccttcacagccatgctggccctcctgacacatcagttcccggaacttatgggggtcttcgcaaaagctttcctcagcactttgtttgcccccttaaactttgtcatggagaaagtggagagcatcctcccatccagtctgtggcaccagctaacacggatctgagagaagccctgtcctccactcacctcacccgccgctgccaccatctcctctgtgccaactccttgtggaccgcaagaaagcatgactttgaaaaagggaagccattccgagattttaaaatgttcatggactattccatattaaaagctgtttttgttgtacaaaattcactgatgttcagttctattttattttgccttcagaaaagaagaaagtcaaaaataaaacttttgtgtattacagcaa

SEQ ID NO: 30410 - DNA, 2113 bp, Homo sapiens
  source 1..2113: mol_type = unassigned DNA
cctgcccctgctgctacctagtccagcctcaccgcatcccagaagaggcacgtcggccttcatttgcctagtggattttcaaaagcagctcttcggtttttggtgctgttaagagaccttgcatttcaatcacaccgggagaaaactgaagctcgtaacaggagaatctggcagctggacacagcttggactgcattgtctggcttcatgacccctgctgtgtagccggctcatctcttcactctcacatgtacactctcctcgcttttctttcttttttttttcccttttctttcttctaatttttaaaaagcagcctctggagccagccatgtttggcactgaatcttcattgagcatgtttttgaacacattaacaccgaagttctacgtggccctaacaggcacttcctcactaatatcagggcttattttgatatttgaatggtggtattttcgcaaatacggaacttcattcattgaacaagtctcagtaagccacttgcgcccccttctgggaggggttgacaacaactcttccaacaattctaattccagtaacggggactcagattccaataggcaaagtgtctcagaatgcaaagtatggcgaaatccactaaatttatttaggggtgctgaatacaatcggtatacttgggtgacaggacgagagcctcttacttactatgacatgaatctctctgcccaagaccaccagacattctttacttgtgactcggaccatctgcgtcccgcagatgcaataatgcagaaagcctggagagagagaaacccccaagctaggatttctgcagctcatgaagccttggagataaatgagtgtgcaactgcttatattctcttggctgaagaggaagcaacaaccattgctgaagcagaaaaattatttaagcaggccctgaaggctggagatggctgttaccgacgctctcagcagctacaacatcatggatcccagtatgaagcccaacatagacgagacaccaatgtcttggtgtacatcaaaagaaggctagcaatgtgtgccagaagactcgggaggaccagggaagcagtgaaaatgatgagagatttaatgaaggagttcccccttctgagtatgttcaatatccatgaaaaccttttagaagcccttctggaactacaagcatatgctgatgttcaggcagtcttagcaaagtatgatgatataagcttaccaaagtcagcaacaatatgctacacagctgctttgctcaaagcaagagctgtctctgacaaattctctcctgaggctgcatctcggcgggggctgagcacagcagagatgaatgcagtagaggccattcatagagctgtggaattcaatcctcatgtgccaaaatacctactagaaatgaaaagcttaatcctacccccagaacatatcctgaagagaggagacagtgaagcaatagcatatgcattctttcatcttgcacactggaagagagtggaaggggctttgaatcttttgcattgtacgtgggaaggcacttttcggatgatcccttatcccttggaaaaggggcacctattttatccttacccaatctgtacagaaacagcagaccgagagctgcttccatctttccatgaagtctcagtttacccaaagaaggagcttcccttctttattctctttactgctggattatgttccttcacagccatgctggccctcctgacacatcagttcccggaacttatgggggtcttcgcaaaagctttcctcagcactttgtttgcccccttaaactttgtcatggagaaagtggagagcatcctcccatccagtctgtggcaccagctaacacggatctgagagaagccctgtcctccactcacctcacccgccgctgccaccatctcctctgtgccaactccttgtggaccgcaagaaagcatgactttgaaaaagggaagccattccgagattttaaaatgttcatggactattccatattaaaagctgtttttgttgtacaaaattcactgatgttcagttctattttattttgccttcagaaaagaagaaagtcaaaaataaaacttttgtgtattacagcaa

SEQ ID NO: 30411 - DNA, 2182 bp, Homo sapiens
  source 1..2182: mol_type = unassigned DNA
cctgcccctgctgctacctagtccagcctcaccgcatcccagaagaggcacgtcggccttcatttgcctagtggattttcaaaagcagctcttcggtttttggtgctgttaagagaccttgcatttcaatcacaccgggagaaaactgaagctcgtaacaggagaatctggcagctggacacagcttggactgcattgtctggcttcatgacccctgctgtgtagccggctcatctcttcactctcacatgtacactctcctcgcttttctttcttttttttttcccttttctttcttctaatttttaaaaagcagcctctggagccagccatgtttggcactgaatcttcattgagcatgtttttgaacacattaacaccgaagttctacgtggccctaacaggcacttcctcactaatatcagggcttattttgatatttgaatggtggtattttcgcaaatacggaacttcattcattgaacaagtctcagtaagccacttgcgcccccttctgggaggggttgacaacaactcttccaacaattctaattccagtaacggggactcagattccaataggcaaagtgtctcagaatgcaaagtatggcgaaatccactaaatttatttaggggtgctgaatacaatcggtatacttgggtgacaggacgagagcctcttacttactatgacatgaatctctctgcccaagaccaccagacattctttacttgtgactcggaccatctgcgtcccgcagatgcaataatgcagaaagcctggagagagagaaacccccaagctaggatttctgcagctcatgaagccttggagataaatgaaattaggtccagagttgaagttcccctaattgcttcctctaccatctgggagataaaattgttaccaaagtgtgcaactgcttatattctcttggctgaagaggaagcaacaaccattgctgaagcagaaaaattatttaagcaggccctgaaggctggagatggctgttaccgacgctctcagcagctacaacatcatggatcccagtatgaagcccaacatagacgagacaccaatgtcttggtgtacatcaaaagaaggctagcaatgtgtgccagaagactcgggaggaccagggaagcagtgaaaatgatgagagatttaatgaaggagttcccccttctgagtatgttcaatatccatgaaaaccttttagaagcccttctggaactacaagcatatgctgatgttcaggcagtcttagcaaagtatgatgatataagcttaccaaagtcagcaacaatatgctacacagctgctttgctcaaagcaagagctgtctctgacaaattctctcctgaggctgcatctcggcgggggctgagcacagcagagatgaatgcagtagaggccattcatagagctgtggaattcaatcctcatgtgccaaaatacctactagaaatgaaaagcttaatcctacccccagaacatatcctgaagagaggagacagtgaagcaatagcatatgcattctttcatcttgcacactggaagagagtggaaggggctttgaatcttttgcattgtacgtgggaaggcacttttcggatgatcccttatcccttggaaaaggggcacctattttatccttacccaatctgtacagaaacagcagaccgagagctgcttccatctttccatgaagtctcagtttacccaaagaaggagcttcccttctttattctctttactgctggattatgttccttcacagccatgctggccctcctgacacatcagttcccggaacttatgggggtcttcgcaaaagctttcctcagcactttgtttgcccccttaaactttgtcatggagaaagtggagagcatcctcccatccagtctgtggcaccagctaacacggatctgagagaagccctgtcctccactcacctcacccgccgctgccaccatctcctctgtgccaactccttgtggaccgcaagaaagcatgactttgaaaaagggaagccattccgagattttaaaatgttcatggactattccatattaaaagctgtttttgttgtacaaaattcactgatgttcagttctattttattttgccttcagaaaagaagaaagtcaaaaataaaacttttgtgtattacagcaa

SEQ ID NO: 30412 - DNA, 2110 bp, Homo sapiens
  source 1..2110: mol_type = unassigned DNA
ttagcaataaggctggagaaggaaaagccggcgcgcccgcggcccgcgcgatttcccgccgagcccgcgtccccggcggcgggcgggctccgggggcgcccgggccgcggcggcggcggcggcgcgagctgcgcctccgggccggtgaatcatcccggcagacaccaagagccgcggcagcagagaggagcgctgaaacatggctgaagcggccacgggctttctggagcagctcaagtcctgcatagtttggtcttggacgtatctgtggaccgtgtggttcttcatcgtgctattcctggtctacatcctgcgggtgcctttgaaaatcaacgacaacttgagcacagtgagcatgtttttgaacacattaacaccgaagttctacgtggccctaacaggcacttcctcactaatatcagggcttattttgatatttgaatggtggtattttcgcaaatacggaacttcattcattgaacaagtctcagtaagccacttgcgcccccttctgggaggggttgacaacaactcttccaacaattctaattccagtaacggggactcagattccaataggcaaagtgtctcagaatgcaaagtatggcgaaatccactaaatttatttaggggtgctgaatacaatcggtatacttgggtgacaggacgagagcctcttacttactatgacatgaatctctctgcccaagaccaccagacattctttacttgtgactcggaccatctgcgtcccgcagatgcaataatgcagaaagcctggagagagagaaacccccaagctaggatttctgcagctcatgaagccttggagataaatgagtgtgcaactgcttatattctcttggctgaagaggaagcaacaaccattgctgaagcagaaaaattatttaagcaggccctgaaggctggagatggctgttaccgacgctctcagcagctacaacatcatggatcccagtatgaagcccaacatagacgagacaccaatgtcttggtgtacatcaaaagaaggctagcaatgtgtgccagaagactcgggaggaccagggaagcagtgaaaatgatgagagatttaatgaaggagttcccccttctgagtatgttcaatatccatgaaaaccttttagaagcccttctggaactacaagcatatgctgatgttcaggcagtcttagcaaagtatgatgatataagcttaccaaagtcagcaacaatatgctacacagctgctttgctcaaagcaagagctgtctctgacaaattctctcctgaggctgcatctcggcgggggctgagcacagcagagatgaatgcagtagaggccattcatagagctgtggaattcaatcctcatgtgccaaaatacctactagaaatgaaaagcttaatcctacccccagaacatatcctgaagagaggagacagtgaagcaatagcatatgcattctttcatcttgcacactggaagagagtggaaggggctttgaatcttttgcattgtacgtgggaaggcacttttcggatgatcccttatcccttggaaaaggggcacctattttatccttacccaatctgtacagaaacagcagaccgagagctgcttccatctttccatgaagtctcagtttacccaaagaaggagcttcccttctttattctctttactgctggattatgttccttcacagccatgctggccctcctgacacatcagttcccggaacttatgggggtcttcgcaaaagctttcctcagcactttgtttgcccccttaaactttgtcatggagaaagtggagagcatcctcccatccagtctgtggcaccagctaacacggatctgagagaagccctgtcctccactcacctcacccgccgctgccaccatctcctctgtgccaactccttgtggaccgcaagaaagcatgactttgaaaaagggaagccattccgagattttaaaatgttcatggactattccatattaaaagctgtttttgttgtacaaaattcactgatgttcagttctattttattttgccttcagaaaagaagaaagtcaaaaataaaacttttgtgtattacagcaa

SEQ ID NO: 30413 - DNA, 577 bp, Homo sapiens
  source 1..577: mol_type = unassigned DNA
acaccaagagccgcggcagcagagaggagcgctgaaacatggctgaagcggccacgggctttctggagcagctcaagtcctgcatagtttggtcttggacgtatctgtggaccgtgtggttcttcatcgtgctattcctggtctacatcctgcgggtgcctttgaaaatcaacgacaacttgagcacagagaaaaatatttgttgaatgagtgaacgtgggatctctgttcattttggtatattactttgctttctgggctgagctcaggacagatgccaaagcctttccctctaatgacatcaaagccctacttctaaaaccagactggatgtgattcccttctacaaacagattcagtaaagaaatgtgaatactcccacaaaaagcccatgagcatgtttttgaacacattaacaccgaagttctacgtggccctaacaggcacttcctcactaatatcagggcttattttgatatttgaatggtggtattttcgcaaatacggaacttcattcattgaacaagtctcagtaagccacttgcgcccccttctgggaggggttgacaacaactct

SEQ ID NO: 30414 - DNA, 542 bp, Homo sapiens
  source 1..542: mol_type = unassigned DNA
cgtttcattttctggctgatagagttgtacttggaaaatactcagtttcctgcttactgcttcattatggattatacagagaaaaatatttgttgaatgagtgaacgtgggatctctgttcattttggtatattactttgctttctgggctgagctcaggacagatgccaaagcctttccctctaatgacatcaaagccctacttctaaaaccagactggatgtgattcccttctacaaacagattcagtaaagaaatgtgaatactcccacaaaaagcccatgagcatgtttttgaacacattaacaccgaagttctacgtggccctaacaggcacttcctcactaatatcagggcttattttgatatttgaatggtggtattttcgcaaatacggaacttcattcattgaacaagtctcagtaagccacttgcgcccccttctgggaggggttgacaacaactcttccaacaattctaattccagtaacggggactcagattccaataggcaaagtgtctcagaatgcaaagtatggcga

SEQ ID NO: 30415 - DNA, 6667 bp, Homo sapiens
  source 1..6667: mol_type = unassigned DNA
tctggaaaagaaggcgagatcttctagagcctctaatcttggcatccttcgtgccctcaccttgtcgcttctgtagagataaagaaggaatgacttaatttctgttccggttggttctcttggtacctgaagatacatccagaaagtgcccagaagaaacttcctgctggaaaaaatgaaaaagcagtatttataacattagaatctggataatttgttaacatggcagaaaataatgaaaatattagtaaaaatgtagatgtaaggcccaaaactagtcggagcagaagtgccgacagaaaagacggttatgtgtggagtggaaagaagttatcttggtcaaaaaagagtgagagttattcagatgctgagacagtgaatggtatagagaaaaccgaagtgtctttaaggaaccaagaaaggaagcacagctgttcatccattgagttggacttagatcattcctgtgggcatcgatttttaggccgatctcttaaacagaaactgcaagatgccgtggggcagtgttttccaataaagaattgtagtagtcggcactcttcagggcttccgtctaaaaggaaaattcatatcagtgaactcatgttagataagtgtcctttcccacctcgatcagatttagcctttaggtggcattttattaaacgacacactgctcctataaattccaaatcagatgaatgggtaagcacagacttgtctcagactgaattgagggatggtcagctaaaacgaagaaatatggaagaaaatataaactgtttctcacataccaatgttcagccctgtgtcataaccaccgacaatgctttgtgtagagaaggtcctatgactggctctgtgatgaacctggtttcaaataacagtatagaagatagtgatatggattccgatgatgaaattctaacactttgcacaagttccagaaaaagaaacaaacccaaatgggatttggatgatgaaatcctgcagttggaaacacctcctaaataccacacgcagattgattatgtccactgtcttgtaccagacctccttcagatcaataacaacccatgttactggggagtgatggataaatacgcagccgaagcactactggaaggaaaaccagagggtacctttttacttcgagactcagcacaggaagactatttattctctgttagttttagacgctatagtcgttctcttcatgctagaattgaacagtggaatcacaactttagctttgatgcacatgacccctgtgtcttccattctcctgacattactgggctcctagaacattataaggacccaagcgcctgtatgttctttgaaccacttctatccactcccttaattcggactttccctttttccctgcagcatatatgcagaacagttatttgtaactgtacaacttatgatggcatcgatgcccttccaattccttcttctatgaaattatatctgaaggaatatcattataaatcaaaagttagagtactcaggattgatgcaccagaacagcaatgctagtaacaggatgggaacatgggaatgataatatatattttttcttttaatattttatttttctttttatgccactttggatttttctacaaaggcagtggtgtccaaaataaaatctctgccctaaattttactaataaatccatttttctagtgatacacaaattgtttaaggttatacactcgagcttaaatagatatttttaaccaggtgtttggtttttgtttttaccgtgtaggttgtatacttacattttttctttccttaatttatacatgatcctttttccttaatttatacatgatccaggcacatttgaaatttggtaggcattgcaaacacatttgaatattgtgtatttcatactattctttaaaagtaatcttatgtcctttcctacatgtaaaatattttgttaatctatgccattagtagtattatatataaaatatagttccccgtcccccttttcattgagtttgatattcttcagtaaagctgaatgttgtaattcaccattcatactaatgttattgacttttgtaacttactaatagggatgttaaaagtaacaaaaccaagtcaaacttggtgtatttttattttaaatattaactctaaagcaggattactaaatttgattaatctggtcaatgagaatcaaatggaaacatatcattctggaggtgcacttactcttctacaatgtggccggatcatttgtcattcctgaataggtctttctctcaacctgcaagagctaaaccatcttcaaaacataaatcttgttcctttctcattggaagctttgaaaataatgataacactattagtagctagtagttactaaagtgctaaagtaattgtggggtttttctgtattagcttatgaactgttgcttctacttagcccttttatagaaactctgagctgttactttggggaaattccacaatgtattagcagccacaaatttccactggtaaccaaagagtacctaagtagtttttcattattttaagttgaatttgaataaagattccagaaataaacatggagctcagtattcaggaagcttaatactgtttttgatctacaagatccaaataattatccctatcttcagaattaacttagtctgtaatgtggcttcaaaaaaagaaagccttttgacagctacatgacttacaccatacagaacagtactggacaaaaggggtgatattttaaatttactatcccagaaacagggcaacgtttttagaaacatctttagcccaaagtaactagtaaaaataaatggagtggtatcctatcttctttttttaaggaatcaatgaataataaatgtagatagacaattttcttctggtgagctgtctaaccctttgtacacattgacatttttaatatcgtaactgatttcttgatgctagtttagctatattaggaaactgcttctacctagattgaaagaaatttgactcataaacttccaagttagaacaaatatttcttcattattgttgcttttatgtgagtagcatttccctatcttgcagttctgttaacatgaaaatggcatttttccataatagctttaaaataattttttagtaattattacaaaattaaggaaaatctctattaccgttatcttttagcattttttttttcctcagtgatctcaagattgtcttagtctcaatgagatgtagctacaaaaatggcacctcttagcagtgatgaggctcaggatatcggatatcataacaccaatgtcaggataaatatctcttctaaagacgatatttaccttttacaaggttagaaaagtctcatactacctcatctttattgtggcgcttttgtagatcactgagaagcttatcttattaaccaatataccacttcctaaatatccatctttggtgaaagaaaatagtgtggtaagagtacccatgattatagttttttatcagaatttgataagattttctgtttctgtgaaacaattattttaaatatttttcttttaaaaataactttttatcagtacagaaaaacctaagggatgactagcttacaaatattctgttaaggggtagttttataaagaaaaatgatatatagttatgttgtcttttatagtgttaaaattagtatttatatgaaagtcaagatctaagtaccttttcatataattcaaactgattgcttgtgatatgttttctctggcttttttattttttcaacttcaaggtattaacagctgttaacacttaaaaagtactgccacatatgtagccttgaagtagttgatctaataaatgagagcagggaggagattcattgactctgaaatgatttttatttttcctttggtatttgctacagtgaaaagaagtttggaaagtagatacataaagacttgagaagggaattgtttaagggaaaagaaaagagtaataattttttttaaaacattaaggaattggaattcagaaaggttacccccttcctctgtgtctttgtaaggatacatttggaagaacatacagtattcagaaactaacctatataaaatgtaaacaatatattgattgcactatataaatgagtaaattttgagaggaacaatgtgggaatgtataaatttgtctaaaattttataactgttgaacaaagggaagatttgaacagtgtaaattccagagttgagaaagcatttagcatggtggaaatgtggagagcttattggtgagagaggatggagctaagagaaataagatcaaatattaaaattaggaatttaggcattacctcagggaaaagccttgacagtgaaaagaaactacttaatcgctaatagctagtctggaccagacacttaactgcgctttgggaatcatcctgggctaatcaggaaataaacttgacttttctatttttctctgaagctttacaggacatactcccactcccatttttttctaagcctacagcatcttgattcatagtataattcctgaagtatgctgaatggactttttaaggttcctttagcatttttgtatagagttatatgtgatctttctataaccatgccattcacttaaataattcatgaagggaatggtttaatttaaaggaagacctaataggaagaagattaaaggaagcttttagtcagcctgtggctagatttattgatttggtgatcaaacctgtgctatttcctgaatttcagctaatggccaactgtggtcaaagaatggctttcagttaaagttttgacttcttattataaataatataaagaatgtctcagtaattagaaatcccttaataagtagaacaaatgtggcaagtaggactcctatcggtatacaaattccatttctttttataagaaaaacacataaaccattatcatttattcatgagccaaagccattaagaagataaatccagttatcagcttcctgtctctgaagtttggatcattttatagatccacgcaatagagagcttccttcctatgaaacaaaaaccttgagatctctttttttttgagacagagtctcgctgttgtcagcccaggctggagtgcaatggcgcaatctcggttcactgcaacctctgccttccaggttccagcaattctcctacctcagctcccaagtagctgagatgacaggcgtgtgccaccacgcccagctaatttttgtatttttagtagcgatggtgtttcactacattggccaggctggtctcgaactcctgacctcaggtgaccacccgcctcagcctcccaaagtgctgggattacaggcatgagccactgtgcccggccaagatctaactcacgcttacttttcattaaaatatttcttgtcgcttttagctattgtcagaatccaataaacagcttacgcattcattttggtaaagcaaatttcacaggaaaatagacaaaattataagagattcctggagacaacacaaggaaaacaatgtttaaaagcaaaatagcctgtgtaatgttaggtaatgtaatgcccaagtgaataaaagatttttcgtcaagcaaactactgtttctactttgggggaaaaaagtcagttttacatttgtaatttaaggaaagaacagaaagcacaaaggtttttcttttctttattaatggcctactagaaatgagcagtgcaagagtctacctgtactattctaatacagtaagatattggacacaaaatggaggtaactttttaaaatagattggcttggaagttgaaatgtagattaatggatataacccaatagaaagggattttcaaataaaaccaaagtctatttttttatttactttctaattttgaacagatgactcagtcctaaatctttgcctttatttcctataaaatgtaggtgatacttgtaactcgacttcctggagttaattcttcagcaagaggtgaccctgggagcgtactttaaaataattgctgtacagccattgagtactaacatgatgataggttttcaaaatatctttgtagtggatgctgcataattacattcacttctcttagactgtaaaagactttcttgacttgttttaacagtagagatagcagtacaatttgaatttatggtttaggctctgcaattagaggaacaattgcagtttcctcctacccttcatatggtctgtgtaaaactgatgtttgcttaacttattttaaaagttgattacgttttcagaaaataaagataatcacttttgccatggttataatcaaatctaagctttcagacttgagagccatggtgtaaaactcaaggaggtttatttaaattatgctgactttgctagaattggataaattctgtataagccaagtatgagttcacatgtactcgaatatacagttttcacaaagctattactctcatcagtcaggcttgtatgatctattccttaccacaaaagaagtagacaattgccacttttatttctaatccttaagttgaatgtttcttcttggatgtaagttcaaataaattgatctggataaattttcatttctacttaattaaaacttcctatgtaaaatcc

SEQ ID NO: 30416 - DNA, 6779 bp, Homo sapiens
  source 1..6779: mol_type = unassigned DNA
ctgaacacggaagtggtggcggcgcccagggaaccggcggaggcgatgaccgtgacggctgggttgggaccggaacgccgaagcggggttgggggtggcagaaaagcatctgctttgtaagacctacacgaggtgcaggagtggttgggcctcccctctccacttaagcaagcgcccagactgatggcgatggtgatggcagcagttactcgcacaaccccagttaagctgcgctccgggagatacatccagaaagtgcccagaagaaacttcctgctggaaaaaatgaaaaagcagtatttataacattagaatctggataatttgttaacatggcagaaaataatgaaaatattagtaaaaatgtagatgtaaggcccaaaactagtcggagcagaagtgccgacagaaaagacggttatgtgtggagtggaaagaagttatcttggtcaaaaaagagtgagagttattcagatgctgagacagtgaatggtatagagaaaaccgaagtgtctttaaggaaccaagaaaggaagcacagctgttcatccattgagttggacttagatcattcctgtgggcatcgatttttaggccgatctcttaaacagaaactgcaagatgccgtggggcagtgttttccaataaagaattgtagtagtcggcactcttcagggcttccgtctaaaaggaaaattcatatcagtgaactcatgttagataagtgtcctttcccacctcgatcagatttagcctttaggtggcattttattaaacgacacactgctcctataaattccaaatcagatgaatgggtaagcacagacttgtctcagactgaattgagggatggtcagctaaaacgaagaaatatggaagaaaatataaactgtttctcacataccaatgttcagccctgtgtcataaccaccgacaatgctttgtgtagagaaggtcctatgactggctctgtgatgaacctggtttcaaataacagtatagaagatagtgatatggattccgatgatgaaattctaacactttgcacaagttccagaaaaagaaacaaacccaaatgggatttggatgatgaaatcctgcagttggaaacacctcctaaataccacacgcagattgattatgtccactgtcttgtaccagacctccttcagatcaataacaacccatgttactggggagtgatggataaatacgcagccgaagcactactggaaggaaaaccagagggtacctttttacttcgagactcagcacaggaagactatttattctctgttagttttagacgctatagtcgttctcttcatgctagaattgaacagtggaatcacaactttagctttgatgcacatgacccctgtgtcttccattctcctgacattactgggctcctagaacattataaggacccaagcgcctgtatgttctttgaaccacttctatccactcccttaattcggactttccctttttccctgcagcatatatgcagaacagttatttgtaactgtacaacttatgatggcatcgatgcccttccaattccttcttctatgaaattatatctgaaggaatatcattataaatcaaaagttagagtactcaggattgatgcaccagaacagcaatgctagtaacaggatgggaacatgggaatgataatatatattttttcttttaatattttatttttctttttatgccactttggatttttctacaaaggcagtggtgtccaaaataaaatctctgccctaaattttactaataaatccatttttctagtgatacacaaattgtttaaggttatacactcgagcttaaatagatatttttaaccaggtgtttggtttttgtttttaccgtgtaggttgtatacttacattttttctttccttaatttatacatgatcctttttccttaatttatacatgatccaggcacatttgaaatttggtaggcattgcaaacacatttgaatattgtgtatttcatactattctttaaaagtaatcttatgtcctttcctacatgtaaaatattttgttaatctatgccattagtagtattatatataaaatatagttccccgtcccccttttcattgagtttgatattcttcagtaaagctgaatgttgtaattcaccattcatactaatgttattgacttttgtaacttactaatagggatgttaaaagtaacaaaaccaagtcaaacttggtgtatttttattttaaatattaactctaaagcaggattactaaatttgattaatctggtcaatgagaatcaaatggaaacatatcattctggaggtgcacttactcttctacaatgtggccggatcatttgtcattcctgaataggtctttctctcaacctgcaagagctaaaccatcttcaaaacataaatcttgttcctttctcattggaagctttgaaaataatgataacactattagtagctagtagttactaaagtgctaaagtaattgtggggtttttctgtattagcttatgaactgttgcttctacttagcccttttatagaaactctgagctgttactttggggaaattccacaatgtattagcagccacaaatttccactggtaaccaaagagtacctaagtagtttttcattattttaagttgaatttgaataaagattccagaaataaacatggagctcagtattcaggaagcttaatactgtttttgatctacaagatccaaataattatccctatcttcagaattaacttagtctgtaatgtggcttcaaaaaaagaaagccttttgacagctacatgacttacaccatacagaacagtactggacaaaaggggtgatattttaaatttactatcccagaaacagggcaacgtttttagaaacatctttagcccaaagtaactagtaaaaataaatggagtggtatcctatcttctttttttaaggaatcaatgaataataaatgtagatagacaattttcttctggtgagctgtctaaccctttgtacacattgacatttttaatatcgtaactgatttcttgatgctagtttagctatattaggaaactgcttctacctagattgaaagaaatttgactcataaacttccaagttagaacaaatatttcttcattattgttgcttttatgtgagtagcatttccctatcttgcagttctgttaacatgaaaatggcatttttccataatagctttaaaataattttttagtaattattacaaaattaaggaaaatctctattaccgttatcttttagcattttttttttcctcagtgatctcaagattgtcttagtctcaatgagatgtagctacaaaaatggcacctcttagcagtgatgaggctcaggatatcggatatcataacaccaatgtcaggataaatatctcttctaaagacgatatttaccttttacaaggttagaaaagtctcatactacctcatctttattgtggcgcttttgtagatcactgagaagcttatcttattaaccaatataccacttcctaaatatccatctttggtgaaagaaaatagtgtggtaagagtacccatgattatagttttttatcagaatttgataagattttctgtttctgtgaaacaattattttaaatatttttcttttaaaaataactttttatcagtacagaaaaacctaagggatgactagcttacaaatattctgttaaggggtagttttataaagaaaaatgatatatagttatgttgtcttttatagtgttaaaattagtatttatatgaaagtcaagatctaagtaccttttcatataattcaaactgattgcttgtgatatgttttctctggcttttttattttttcaacttcaaggtattaacagctgttaacacttaaaaagtactgccacatatgtagccttgaagtagttgatctaataaatgagagcagggaggagattcattgactctgaaatgatttttatttttcctttggtatttgctacagtgaaaagaagtttggaaagtagatacataaagacttgagaagggaattgtttaagggaaaagaaaagagtaataattttttttaaaacattaaggaattggaattcagaaaggttacccccttcctctgtgtctttgtaaggatacatttggaagaacatacagtattcagaaactaacctatataaaatgtaaacaatatattgattgcactatataaatgagtaaattttgagaggaacaatgtgggaatgtataaatttgtctaaaattttataactgttgaacaaagggaagatttgaacagtgtaaattccagagttgagaaagcatttagcatggtggaaatgtggagagcttattggtgagagaggatggagctaagagaaataagatcaaatattaaaattaggaatttaggcattacctcagggaaaagccttgacagtgaaaagaaactacttaatcgctaatagctagtctggaccagacacttaactgcgctttgggaatcatcctgggctaatcaggaaataaacttgacttttctatttttctctgaagctttacaggacatactcccactcccatttttttctaagcctacagcatcttgattcatagtataattcctgaagtatgctgaatggactttttaaggttcctttagcatttttgtatagagttatatgtgatctttctataaccatgccattcacttaaataattcatgaagggaatggtttaatttaaaggaagacctaataggaagaagattaaaggaagcttttagtcagcctgtggctagatttattgatttggtgatcaaacctgtgctatttcctgaatttcagctaatggccaactgtggtcaaagaatggctttcagttaaagttttgacttcttattataaataatataaagaatgtctcagtaattagaaatcccttaataagtagaacaaatgtggcaagtaggactcctatcggtatacaaattccatttctttttataagaaaaacacataaaccattatcatttattcatgagccaaagccattaagaagataaatccagttatcagcttcctgtctctgaagtttggatcattttatagatccacgcaatagagagcttccttcctatgaaacaaaaaccttgagatctctttttttttgagacagagtctcgctgttgtcagcccaggctggagtgcaatggcgcaatctcggttcactgcaacctctgccttccaggttccagcaattctcctacctcagctcccaagtagctgagatgacaggcgtgtgccaccacgcccagctaatttttgtatttttagtagcgatggtgtttcactacattggccaggctggtctcgaactcctgacctcaggtgaccacccgcctcagcctcccaaagtgctgggattacaggcatgagccactgtgcccggccaagatctaactcacgcttacttttcattaaaatatttcttgtcgcttttagctattgtcagaatccaataaacagcttacgcattcattttggtaaagcaaatttcacaggaaaatagacaaaattataagagattcctggagacaacacaaggaaaacaatgtttaaaagcaaaatagcctgtgtaatgttaggtaatgtaatgcccaagtgaataaaagatttttcgtcaagcaaactactgtttctactttgggggaaaaaagtcagttttacatttgtaatttaaggaaagaacagaaagcacaaaggtttttcttttctttattaatggcctactagaaatgagcagtgcaagagtctacctgtactattctaatacagtaagatattggacacaaaatggaggtaactttttaaaatagattggcttggaagttgaaatgtagattaatggatataacccaatagaaagggattttcaaataaaaccaaagtctatttttttatttactttctaattttgaacagatgactcagtcctaaatctttgcctttatttcctataaaatgtaggtgatacttgtaactcgacttcctggagttaattcttcagcaagaggtgaccctgggagcgtactttaaaataattgctgtacagccattgagtactaacatgatgataggttttcaaaatatctttgtagtggatgctgcataattacattcacttctcttagactgtaaaagactttcttgacttgttttaacagtagagatagcagtacaatttgaatttatggtttaggctctgcaattagaggaacaattgcagtttcctcctacccttcatatggtctgtgtaaaactgatgtttgcttaacttattttaaaagttgattacgttttcagaaaataaagataatcacttttgccatggttataatcaaatctaagctttcagacttgagagccatggtgtaaaactcaaggaggtttatttaaattatgctgactttgctagaattggataaattctgtataagccaagtatgagttcacatgtactcgaatatacagttttcacaaagctattactctcatcagtcaggcttgtatgatctattccttaccacaaaagaagtagacaattgccacttttatttctaatccttaagttgaatgtttcttcttggatgtaagttcaaataaattgatctggataaattttcatttctacttaattaaaacttcctatgtaaaatccaa

SEQ ID NO: 30417 - DNA, 4110 bp, Homo sapiens
  source 1..4110: mol_type = unassigned DNA
gcggcgcccagggaaccggcggaggcgatgaccgtgacggctgggttgggaccggaacgccgaagcggggttgggggtggcagaaaagcatctgctttgtaagacctacacgaggtgcaggagtggttgggcctcccctctccacttaagcaagcgcccagactgatggcgatggtgatggcagcagttactcgcacaaccccagttaagctgcgctccgggaggagttcatctgttgtctgctctccagtgacttccgtttgtggagcctaagtgtttctacagaatccaactcaaatatcaaggactatgatcagaatgctttcaaggagtttttgggcacatgatggcagatacatccagaaagtgcccagaagaaacttcctgctggaaaaaatgaaaaagcagtatttataacattagaatctggataatttgttaacatggcagaaaataatgaaaatattagtaaaaatgtagatgtaaggcccaaaactagtcggagcagaagtgccgacagaaaagacggttatgtgtggagtggaaagaagttatcttggtcaaaaaagagtgagagttattcagatgctgagacagtgaatggtatagagaaaaccgaagtgtctttaaggaaccaagaaaggaagcacagctgttcatccattgagttggacttagatcattcctgtgggcatcgatttttaggccgatctcttaaacagaaactgcaagatgccgtggggcagtgttttccaataaagaattgtagtagtcggcactcttcagggcttccgtctaaaaggaaaattcatatcagtgaactcatgttagataagtgtcctttcccacctcgatcagatttagcctttaggtggcattttattaaacgacacactgctcctataaattccaaatcagatgaatgggtaagcacagacttgtctcagactgaattgagggatggtcagctaaaacgaagaaatatggaagaaaatataaactgtttctcacataccaatgttcagccctgtgtcataaccaccgacaatgctttgtgtagagaaggtcctatgactggctctgtgatgaacctggtttcaaataacagtatagaagatagtgatatggattccgatgatgaaattctaacactttgcacaagttccagaaaaagaaacaaacccaaatgggatttggatgatgaaatcctgcagttggaaacacctcctaaataccacacgcagattgattatgtccactgtcttgtaccagacctccttcagatcaataacaacccatgttactggggagtgatggataaatacgcagccgaagcactactggaaggaaaaccagagggtacctttttacttcgagactcagcacaggaagactatttattctctgttagttttagacgctatagtcgttctcttcatgctagaattgaacagtggaatcacaactttagctttgatgcacatgacccctgtgtcttccattctcctgacattactgggctcctagaacattataaggacccaagcgcctgtatgttctttgaaccacttctatccactcccttaattcggactttccctttttccctgcagcatatatgcagaacagttatttgtaactgtacaacttatgatggcatcgatgcccttccaattccttcttctatgaaattatatctgaaggaatatcattataaatcaaaagttagagtactcaggattgatgcaccagaacagcaatgctagtaacaggatgggaacatgggaatgataatatatattttttcttttaatattttatttttctttttatgccactttggatttttctacaaaggcagtggtgtccaaaataaaatctctgccctaaattttactaataaatccatttttctagtgatacacaaattgtttaaggttatacactcgagcttaaatagatatttttaaccaggtgtttggtttttgtttttaccgtgtaggttgtatacttacattttttctttccttaatttatacatgatcctttttccttaatttatacatgatccaggcacatttgaaatttggtaggcattgcaaacacatttgaatattgtgtatttcatactattctttaaaagtaatcttatgtcctttcctacatgtaaaatattttgttaatctatgccattagtagtattatatataaaatatagttccccgtcccccttttcattgagtttgatattcttcagtaaagctgaatgttgtaattcaccattcatactaatgttattgacttttgtaacttactaatagggatgttaaaagtaacaaaaccaagtcaaacttggtgtatttttattttaaatattaactctaaagcaggattactaaatttgattaatctggtcaatgagaatcaaatggaaacatatcattctggaggtgcacttactcttctacaatgtggccggatcatttgtcattcctgaataggtctttctctcaacctgcaagagctaaaccatcttcaaaacataaatcttgttcctttctcattggaagctttgaaaataatgataacactattagtagctagtagttactaaagtgctaaagtaattgtggggtttttctgtattagcttatgaactgttgcttctacttagcccttttatagaaactctgagctgttactttggggaaattccacaatgtattagcagccacaaatttccactggtaaccaaagagtacctaagtagtttttcattattttaagttgaatttgaataaagattccagaaataaacatggagctcagtattcaggaagcttaatactgtttttgatctacaagatccaaataattatccctatcttcagaattaacttagtctgtaatgtggcttcaaaaaaagaaagccttttgacagctacatgacttacaccatacagaacagtactggacaaaaggggtgatattttaaatttactatcccagaaacagggcaacgtttttagaaacatctttagcccaaagtaactagtaaaaataaatggagtggtatcctatcttctttttttaaggaatcaatgaataataaatgtagatagacaattttcttctggtgagctgtctaaccctttgtacacattgacatttttaatatcgtaactgatttcttgatgctagtttagctatattaggaaactgcttctacctagattgaaagaaatttgactcataaacttccaagttagaacaaatatttcttcattattgttgcttttatgtgagtagcatttccctatcttgcagttctgttaacatgaaaatggcatttttccataatagctttaaaataattttttagtaattattacaaaattaaggaaaatctctattaccgttatcttttagcattttttttttcctcagtgatctcaagattgtcttagtctcaatgagatgtagctacaaaaatggcacctcttagcagtgatgaggctcaggatatcggatatcataacaccaatgtcaggataaatatctcttctaaagacgatatttaccttttacaaggttagaaaagtctcatactacctcatctttattgtggcgcttttgtagatcactgagaagcttatcttattaaccaatataccacttcctaaatatccatctttggtgaaagaaaatagtgtggtaagagtacccatgattatagttttttatcagaatttgataagattttctgtttctgtgaaacaattattttaaatatttttcttttaaaaataactttttatcagtacagaaaaacctaagggatgactagcttacaaatattctgttaaggggtagttttataaagaaaaatgatatatagttatgttgtcttttatagtgttaaaattagtatttatatgaaagtcaagatctaagtaccttttcatataattcaaactgattgcttgtgatatgttttctctggcttttttattttttcaacttcaaggtattaacagctgttaacacttaaaaagtactgccacatatgtagccttgaagtagttgatctaataaatgagagcagggagg

SEQ ID NO: 30418 - DNA, 4771 bp, Homo sapiens
  source 1..4771: mol_type = unassigned DNA
ggcagccgcgcagagcgcgcacccaagcggccggacctccccgactcccgggccgcccccgtctcgcgccctgcctccctccttcggccttcacctacccgcctccggattggccgctaggaatcccgcccctctaaagccctgcctgctattggtcacgattttataatcaatggataaagtgggaaaaatgtggaataacttcaaatacaggtgtcagaatctcttcggtcatgagggaggaagccgtagtgaaaatgtggacatgaactccaacagatgtttgtctgtcaaagagaaaaacatcagcataggagactcaactcctcagcaacaaagcagtcccttaagagaaaatattgccttacaactgggattaagcccttcgaagaattcttcaaggagaaatcaaaattgtgccacagaaatccctcaaattgttgaaataagcatcgaaaaggataatgattcttgtgttaccccaggaacaagacttgcacgaagagattcctactctcgacatgctccatggggtgggaagaaaaaacattcctgttctacaaagacccagagttcattggatgctgataaaaagtttggtagaactcgaagtggacttcaaaggagagagaggcgctacggcgtaagttctgtacacgacatggacagtgtttccagcagaactgtaggaagtcgctctctaagacagaggttgcaggatactgtgggcttgtgttttcccatgagaacttacagcaagcagtcaaagcctctcttttccaataaaagaaaaatccatctctctgaattaatgcttgagaaatgcccttttcctgctggctcagatttagcccaaaaatggcatttgattaaacagcatacagctcctgtgagcccacattcaacattttttgatacatttgatccatctttggtttctacagaagatgaagaagataggcttagagagagaaggcggcttagtattgaagaaggggttgatccccctcccaatgcacaaatacatacatttgaagctactgcacaggttaatccattatataaactgggaccaaaattagctcctggaatgactgaaataagtggggacagttctgcaattccacaagctaattgtgactcggaagaggatacaaccaccctgtgtttgcagtcacggaggcagaagcagcgtcagatatctggagacagccatacccatgttagcagacagggagcttggaaagtccacacacagattgattacatacactgcctcgtgcctgatttgcttcaaattacagggaatccctgttactggggagtgatggaccgttatgaagcagaagcccttctcgaagggaaacctgaaggcacgtttttgctcagggactctgcgcaagaggactacctcttctctgtgagcttccgccgctacaacagatccctgcatgcccgaattgagcagtggaatcacaactttagtttcgacgcccatgacccgtgtgtatttcactcctccactgtaacgggacttttagaacattataaagatcccagttcgtgcatgttttttgaaccattgcttactatatcactaaataggactttcccttttagcctgcagtatatctgtcgcgcggtaatctgcaggtgcactacgtatgatggaattgatgggctccctctaccctcaatgttacaggattttttaaaagagtatcattataaacaaaaagttagagttcgctggttggaacgagaaccagtcaaggcaaagtaaactctccggtccccaaaggttgttaactaggtccgctttcatgtgcatcagacagtacacctatagcaagcacacgtagcagtgttaggctttttcatacagtatgtaagcttagtgttagtatctgtcagatgctacctgctgttacttattcagataaacatggtgcctattggaacaatagcggatagagctacaggtgttcagtaagactacaaaaacattttgcctatttcgctaacagtttggtttttaatggctgtggtatttgagtgaggcaactctggggcatttgttatgaagaattctatttcttactgaagaacaaattattaatattggatgagtatttcaacagtgtgactaatgtttgaaattattttttctaagagtttttctataaccttccaaaagtcgtgatgtttgtagttactataaatcaagctttggaagtccaaaaagaataaaagactgccttccttttagaaaaaaatgcaattttctggccacaagggcatagtgcagttcacttacgtgttgatgtagtttataatcagacgccttttctcttctgcaaaaggtactgttaagtaaaccagattttctaaataggcattcttaaaatttcagacttacaaagctagtagtagaattttattgaaaggcctaggtattaattttttaaatgagtgctttaacttaaaacaggcgtttggaatagctgctgcaatgtagtcttgtgtgtgatttttttttaagttgatgtgcagtctaattgttgtttcataaaagttggatctgttcctatgcccaggatgattttgtgaaccgtgaagtacgtgagactagaagacgcccaaacaagtcagataatagtaactacaatggttgctgatgttgagattattgttgaactataattaataatttggatggcagaatttatctcttttttgtaaactctcataactgaattgcttaagtataatttatagaatttcagtgcagttcattcttaatggaaaatctgaaacctaaattgcagatttaaaaggtactgtacaaccattatatctgtaaataacttagcacctttttgtcacttagaataatatgtactactacttgagtgagcgcttttggaagttatatcaagttctagtgtttgcttcttagtaactgaactgaatttacagttctgtcctagacattttgcactaaagtagccgaatccactctcatgtcttttcgttaatgtgctctgtaccactggtgagtgctccatagtttccttacctgctgctacagaatgttattttacatccctatggctattgccaaggctacaaaaaaggaaagctatatttgtatgcaacactaaccttttgactgctaatgtatgtttctgcttgctgtgccttgttatggctgctttttttgtgctaataaagtatgtttggtgttctccttgtatatctgctgttttatacatttgcaacaatttctcttgtaaatggaatggtttggggtttttaaataagcattaactaacaacctttctatagttaatgcagagttaatgaacagtctaatattgacttatcagaataagctaactctaaatttaatgctctacatcttatcagtcataattatatatactgtggaacagtatctgtagttactgcaaattactgtacagtttaggttataacagaaaactgacagagaagtaataaacctattgatttctctgcttataaatgaaagattgaaactatccaatgacatattatagtaaatgagtatctgtaacctcccactgcatcagaagcaggttaaatgaagtcttgtgaatttgtaatagatcagtaccatttattggtttggggaccatcttaattaaaaataaatgcccaaaatgtagaactttaaccaaagacttgtcccttttaaagcaaaatggggattgaagggacttataatttctgttgtttctaattaaagtccctgaagatcatataccaaagtgtttgagaacttcatccaaacctactttaaagcattatgtgcaattaagttgttatgacataattatattgcctaattgttgggtcttttttcttgagcttataatgtacctggaaaataaacctcttgagaaaaagaaaagttcatactgattattggaaaaggactatatatgtgagcaagattgtgttttagagaggaaacttgaaactccaagaaagcacttgatgtttttatatgcttgtagcaaattgatgttctaactgtagttttatagaaagtattaatgcttttatgtatttcaaaactttcatatgttaaatggaaattgttttaaatgtgtttgagtttatgtaagcatgtatacactgtgctaaaagtcacatgtttcagtttgtgtataatattaatatgcaatttttggtttaaatttttgtcttaaaatattagtggcttacattttaaaaaagaaaaatcaccagcatgaacttgcacctaagtctatattcactgtgtccttttctgaatcccattgtagcctgtcaactaaatttgagtgttaacggtctttttaaagtgcatttaaatacaaaccaggaatttctttagaagttgagatacatctttatagttgaaataattaacccaagaaaaggttgctttgatttgtacccattctcattcattttcttcattcccttacacacacacacacacctctcccttccgcatacatataagtgtgtattatatatttatgtatgcacatatatacatttatgttgttaatattactttagatggcatttccacctgatacaaaaacatttagagatcttattctatagatattacctaaagagtattcttgtactattcgaattttattatctgcactaaaagtttagccttgctactttagccttgtttataatacagtcaccttacaaagagaaa

SEQ ID NO: 30419 - DNA, 4058 bp, Homo sapiens
  source 1..4058: mol_type = unassigned DNA
gggggttggggggaggggggaggggaaacgggtgaagaaggggaggcggcagggaagggggtgggggcctggcgggggcatccggcggagctggggtccccgggctccgtccggaggaagcgacgctgcgctcgctgggcagtcggaggggacgggacgcaccggagggcaggcggactcgccctgtcggtgactgcgccgtccgggcccgtcctgcctggccgcaggtgccctggatgaggccgccccgcgcgccccaaacgattttataatcaatggataaagtgggaaaaatgtggaataacttcaaatacaggtgtcagaatctcttcggtcatgagggaggaagccgtagtgaaaatgtggacatgaactccaacagatgtttgtctgtcaaagagaaaaacatcagcataggagactcaactcctcagcaacaaagcagtcccttaagagaaaatattgccttacaactgggattaagcccttcgaagaattcttcaaggagaaatcaaaattgtgccacagaaatccctcaaattgttgaaataagcatcgaaaaggataatgattcttgtgttaccccaggaacaagacttgcacgaagagattcctactctcgacatgctccatggggtgggaagaaaaaacattcctgttctacaaagacccagagttcattggatgctgataaaaagtttggtagaactcgaagtggacttcaaaggagagagaggcgctacggcgtaagttctgtacacgacatggacagtgtttccagcagaactgtaggaagtcgctctctaagacagaggttgcaggatactgtgggcttgtgttttcccatgagaacttacagcaagcagtcaaagcctctcttttccaataaaagaaaaatccatctctctgaattaatgcttgagaaatgcccttttcctgctggctcagatttagcccaaaaatggcatttgattaaacagcatacagctcctgtgagcccacattcaacattttttgatacatttgatccatctttggtttctacagaagatgaagaagataggcttagagagagaaggcggcttagtattgaagaaggggttgatccccctcccaatgcacaaatacatacatttgaagctactgcacaggttaatccattatataaactgggaccaaaattagctcctggaatgactgaaataagtggggacagttctgcaattccacaagctaattgtgactcggaagaggatacaaccaccctgtgtttgcagtcacggaggcagaagcagcgtcagatatctggagacagccatacccatgttagcagacagggagcttggaaagtccacacacagattgattacatacactgcctcgtgcctgatttgcttcaaattacagggaatccctgttactggggagtgatggaccgttatgaagcagaagcccttctcgaagggaaacctgaaggcacgtttttgctcagggactctgcgcaagaggactacctcttctctgtgagcttccgccgctacaacagatccctgcatgcccgaattgagcagtggaatcacaactttagtttcgacgcccatgacccgtgtgtatttcactcctccactgtaacgggacttttagaacattataaagatcccagttcgtgcatgttttttgaaccattgcttactatatcactaaataggactttcccttttagcctgcagtatatctgtcgcgcggtaatctgcaggtgcactacgtatgatggaattgatgggctccctctaccctcaatgttacaggattttttaaaagagtatcattataaacaaaaagttagagttcgctggttggaacgagaaccagtcaaggcaaagtaaactctccggtccccaaaggttgttaactaggtccgctttcatgtgcatcagacagtacacctatagcaagcacacgtagcagtgttaggctttttcatacagtatgtaagcttagtgttagtatctgtcagatgctacctgctgttacttattcagataaacatggtgcctattggaacaatagcggatagagctacaggtgttcagtaagactacaaaaacattttgcctatttcgctaacagtttggtttttaatggctgtggtatttgagtgaggcaactctggggcatttgttatgaagaattctatttcttactgaagaacaaattattaatattggatgagtatttcaacagtgtgactaatgtttgaaattattttttctaagagtttttctataaccttccaaaagtcgtgatgtttgtagttactataaatcaagctttggaagtccaaaaagaataaaagactgccttccttttagaaaaaaatgcaattttctggccacaagggcatagtgcagttcacttacgtgttgatgtagtttataatcagacgccttttctcttctgcaaaaggtactgttaagtaaaccagattttctaaataggcattcttaaaatttcagacttacaaagctagtagtagaattttattgaaaggcctaggtattaattttttaaatgagtgctttaacttaaaacaggcgtttggaatagctgctgcaatgtagtcttgtgtgtgatttttttttaagttgatgtgcagtctaattgttgtttcataaaagttggatctgttcctatgcccaggatgattttgtgaaccgtgaagtacgtgagactagaagacgcccaaacaagtcagataatagtaactacaatggttgctgatgttgagattattgttgaactataattaataatttggatggcagaatttatctcttttttgtaaactctcataactgaattgcttaagtataatttatagaatttcagtgcagttcattcttaatggaaaatctgaaacctaaattgcagatttaaaaggtactgtacaaccattatatctgtaaataacttagcacctttttgtcacttagaataatatgtactactacttgagtgagcgcttttggaagttatatcaagttctagtgtttgcttcttagtaactgaactgaatttacagttctgtcctagacattttgcactaaagtagccgaatccactctcatgtcttttcgttaatgtgctctgtaccactggtgagtgctccatagtttccttacctgctgctacagaatgttattttacatccctatggctattgccaaggctacaaaaaaggaaagctatatttgtatgcaacactaaccttttgactgctaatgtatgtttctgcttgctgtgccttgttatggctgctttttttgtgctaataaagtatgtttggtgttctccttgtatatctgctgttttatacatttgcaacaatttctcttgtaaatggaatggtttggggtttttaaataagcattaactaacaacctttctatagttaatgcagagttaatgaacagtctaatattgacttatcagaataagctaactctaaatttaatgctctacatcttatcagtcataattatatatactgtggaacagtatctgtagttactgcaaattactgtacagtttaggttataacagaaaactgacagagaagtaataaacctattgatttctctgcttataaatgaaagattgaaactatccaatgacatattatagtaaatgagtatctgtaacctcccactgcatcagaagcaggttaaatgaagtcttgtgaatttgtaatagatcagtaccatttattggtttggggaccatcttaattaaaaataaatgcccaaaatgtagaactttaaccaaagacttgtcccttttaaagcaaaatggggattgaagggacttataatttctgttgtttctaattaaagtccctgaagatcatataccaaagtgtttgagaacttcatccaaacctactttaaagcattatgtgcaattaagttgttatgacataattatattgcctaattgttgggtcttttttcttgagcttataatgtacctggaaaataaacctcttgagaaaaagaaaa

SEQ ID NO: 30420 - DNA, 3774 bp, Homo sapiens
  source 1..3774: mol_type = unassigned DNA
gtgcagaggtggcagttccgggcgccggggaggtgtagagaacagattcggaaactggggaggtctagcatgtggcgtaggagggggtcctcactccgcttcgcgattgccaaaacgagcctgccggaagcgccctaaggggttttcttctcccagggaaccagcggggaaactgaggctcggggtggagcgcaggattgtgggacgcgccaaggctgctgtctttcccagcagcagcggaagatgtcggacagcgaggacagcaacttttccgaggaggaggacagcgagcgcagcagtgacggcgaggaggccgaggtagacgaagagcggcggagtgcagcgggcagtgagaaagaagaagagcctgaggacgaagaggaggaggaagaggaggaggaatacgatgaggaagaggaggaagaagatgatgaccgaccccccaagaaaccccgccatggaggcttcattctggacgaggctgatgttgacgatgagtatgaggacgaggaccagtgggaggatggagcagaggacattctagagaaagaagagattgaagcctccaatatcgataatgttgtcctggatgaagatcgttctggggctcgccgcctgcaaaacctctggagggaccagcgagaagaagaactgggcgagtattacatgaagaaatacgccaagtcatctgtgggagagacggtgtatggaggatctgatgagctctcagacgacatcacccagcagcagctgctcccaggagtcaaggatcccaatctgtggactgtcaaatgtaagattggggaggaacgggccacggccatttccttgatgcgcaagttcattgcctaccagttcacagacacgcccctgcagatcaagtcagtagtggcaccagagcatgtgaagggctacatctacgtggaggcctacaagcagacccacgtgaagcaggccattgagggggtgggcaacctgcggcttggctactggaaccagcagatggtgcccatcaaggagatgacagacgtgctcaaagtggtgaaggaggtggccaacctgaaaccaaagtcctgggtccgcctcaagcggggcatctacaaggatgacattgctcaggtggactacgtggagcccagccagaacaccatctccctgaagatgatcccacgcatcgactacgatcgcatcaaggcccgcatgagcttgaaagactggtttgccaaaaggaagaagtttaagcggcctccacagaggctgtttgatgctgagaagatcaggtccctggggggtgatgttgcctctgatggtgacttcctcatctttgaggggaaccgttacagccggaagggctttctgttcaagagcttcgccatgtctgctgtgatcacggagggtgtgaagccaacactctctgagctggaaaagtttgaggaccagccagagggcattgacctggaggtggtgactgagagcacagggaaggagcgggagcacaacttccaacctggggacaacgtggaggtctgtgagggtgagctcatcaacctgcagggcaagatcctcagcgtggatggcaacaagatcaccatcatgcccaagcatgaggacctcaaggacatgttggagttcccagcccaggaacttagaaaatacttcaagatgggggaccacgtgaaggtgattgctggccgattcgagggcgacacaggcctcattgtgcgggtggaggagaatttcgttatcctgttctctgacctcaccatgcatgagctgaaggtgctcccccgggacctgcagctctgctcagagacagcatcaggtgtggatgttgggggccagcatgaatggggcgagctggtgcagctggatccccagactgtgggtgtcatcgtgcgactagaacgggagaccttccaggtgctgaacatgtacgggaaggtggtgactgtcagacatcaggctgtgacccggaagaaggacaaccgctttgctgtggccttggactcagagcagaacaacatccatgtgaaagacatcgttaaggtcattgatggcccccactcaggccgagaaggggagattcgccatctcttccgaagcttcgccttcctacattgcaagaaactggtggagaacgggggcatgtttgtctgcaagacccgccacctggtgctggctgggggctcaaagccccgtgatgtgaccaacttcaccgtgggtggctttgcgcctatgagtccccggatcagcagccccatgcaccccagtgctggaggtcagcgtggcggctttggtagcccaggtggcggcagtggtggcatgagcaggggccggggccggagggacaacgaactcatcggccagaccgtgcgcatctcccaggggccctacaaaggctacatcggtgtggtgaaagatgccacagagtccacggcccgtgtggagctgcactccacctgccagaccatctctgtggaccgtcagcggctcaccacggtgggctcacggcgcccgggcggcatgacctcgacctatgggaggacgcccatgtatggctcccagacgcccatgtatggctctggctcccgaacacccatgtacggctcacagacacccctccaggatggtagccgcaccccacactacggctcacagacgcccctgcatgatggcagccgcactcctgcccagagtggggcctgggaccccaacaaccccaacacgccgtcacgggctgaggaagaatatgagtatgctttcgatgatgagcccaccccgtccccgcaggcctatgggggaacccccaatccccaaacacctggctacccagacccctcgtccccacaggtcaacccacaatacaacccgcagacgccagggacgccggccatgtacaacacagaccagttctctccctatgctgccccctccccacaaggttcctaccagcccagccccagcccccagagctaccaccaggtggcgccaagcccagcaggctaccagaatacccactccccagccagctaccaccctacaccgtcgcccatggcctatcaggctagccccagcccgagccccgttggctacagtcctatgacacctggagctccctcccctggtggctacaacccacacacgccaggctcaggcatcgagcagaactccagcgactgggtaaccactgacattcaggtgaaggtgcgggacacctacctggatacacaggtggtgggacagacaggtgtcatccgcagtgtcacggggggcatgtgctctgtgtacctgaaggacagtgagaaggttgtcagcatttccagtgagcacctggagcctatcacccccaccaagaacaacaaggtgaaagtgatcctgggcgaggatcgggaagccacgggcgtcctactgagcattgatggtgaggatggcattgtccgtatggaccttgatgagcagctcaagatcctcaacctccgcttcctggggaagctcctggaagcctgaagcaggcagggccggtggacttcgtcggatgaagagtgatcctccttccttccctggcccttggctgtgacacaagatcctcctgcagggctaggcggattgttctggatttccttttgtttttccttttagttttccatcttttccctccctggtgctcattggaatctgagtagagtctgggggagggtccccaccttcctgtacctcctccccacagcttgcttttgttgtaccgtctttcaataaaaagaagctgtttggtct

SEQ ID NO: 30421 - DNA, 3553 bp, Homo sapiens
  source 1..3553: mol_type = unassigned DNA
agtcaggcgtcgtgcgaacagcagctggtaccgaaggcggaggtggagcccgagagggaaccagcggggaaactgaggctcggggtggagcgcaggattgtgggacgcgccaaggctgctgtctttcccagcagcagcggaagatgtcggacagcgaggacagcaacttttccgaggaggaggacagcgagcgcagcagtgacggcgaggaggccgaggtagacgaagagcggcggagtgcagcgggcagtgagaaagaagatgatgaccgaccccccaagaaaccccgccatggaggcttcattctggacgaggctgatgttgacgatgagtatgaggacgaggaccagtgggaggatggagcagaggacattctagagaaagaagagattgaagcctccaatatcgataatgttgtcctggatgaagatcgttctggggctcgccgcctgcaaaacctctggagggaccagcgagaagaagaactgggcgagtattacatgaagaaatacgccaagtcatctgtgggagagacggtgtatggaggatctgatgagctctcagacgacatcacccagcagcagctgctcccaggagtcaaggatcccaatctgtggactgtcaaatgtaagattggggaggaacgggccacggccatttccttgatgcgcaagttcattgcctaccagttcacagacacgcccctgcagatcaagtcagtagtggcaccagagcatgtgaagggctacatctacgtggaggcctacaagcagacccacgtgaagcaggccattgagggggtgggcaacctgcggcttggctactggaaccagcagatggtgcccatcaaggagatgacagacgtgctcaaagtggtgaaggaggtggccaacctgaaaccaaagtcctgggtccgcctcaagcggggcatctacaaggatgacattgctcaggtggactacgtggagcccagccagaacaccatctccctgaagatgatcccacgcatcgactacgatcgcatcaaggcccgcatgagcttgaaagactggtttgccaaaaggaagaagtttaagcggcctccacagaggctgtttgatgctgagaagatcaggtccctggggggtgatgttgcctctgatggtgacttcctcatctttgaggggaaccgttacagccggaagggctttctgttcaagagcttcgccatgtctgctgtgatcacggagggtgtgaagccaacactctctgagctggaaaagtttgaggaccagccagagggcattgacctggaggtggtgactgagagcacagggaaggagcgggagcacaacttccaacctggggacaacgtggaggtctgtgagggtgagctcatcaacctgcagggcaagatcctcagcgtggatggcaacaagatcaccatcatgcccaagcatgaggacctcaaggacatgttggagttcccagcccaggaacttagaaaatacttcaagatgggggaccacgtgaaggtgattgctggccgattcgagggcgacacaggcctcattgtgcgggtggaggagaatttcgttatcctgttctctgacctcaccatgcatgagctgaaggtgctcccccgggacctgcagctctgctcagagacagcatcaggtgtggatgttgggggccagcatgaatggggcgagctggtgcagctggatccccagactgtgggtgtcatcgtgcgactagaacgggagaccttccaggtgctgaacatgtacgggaaggtggtgactgtcagacatcaggctgtgacccggaagaaggacaaccgctttgctgtggccttggactcagagcagaacaacatccatgtgaaagacatcgttaaggtcattgatggcccccactcaggccgagaaggggagattcgccatctcttccgaagcttcgccttcctacattgcaagaaactggtggagaacgggggcatgtttgtctgcaagacccgccacctggtgctggctgggggctcaaagccccgtgatgtgaccaacttcaccgtgggtggctttgcgcctatgagtccccggatcagcagccccatgcaccccagtgctggaggtcagcgtggcggctttggtagcccaggtggcggcagtggtggcatgagcaggggccggggccggagggacaacgaactcatcggccagaccgtgcgcatctcccaggggccctacaaaggctacatcggtgtggtgaaagatgccacagagtccacggcccgtgtggagctgcactccacctgccagaccatctctgtggaccgtcagcggctcaccacggtgggctcacggcgcccgggcggcatgacctcgacctatgggaggacgcccatgtatggctcccagacgcccatgtatggctctggctcccgaacacccatgtacggctcacagacacccctccaggatggtagccgcaccccacactacggctcacagacgcccctgcatgatggcagccgcactcctgcccagagtggggcctgggaccccaacaaccccaacacgccgtcacgggctgaggaagaatatgagtatgctttcgatgatgagcccaccccgtccccgcaggcctatgggggaacccccaatccccaaacacctggctacccagacccctcgtccccacaggtcaacccacaatacaacccgcagacgccagggacgccggccatgtacaacacagaccagttctctccctatgctgccccctccccacaaggttcctaccagcccagccccagcccccagagctaccaccaggtggcgccaagcccagcaggctaccagaatacccactccccagccagctaccaccctacaccgtcgcccatggcctatcaggctagccccagcccgagccccgttggctacagtcctatgacacctggagctccctcccctggtggctacaacccacacacgccaggctcaggcatcgagcagaactccagcgactgggtaaccactgacattcaggtgaaggtgcgggacacctacctggatacacaggtggtgggacagacaggtgtcatccgcagtgtcacggggggcatgtgctctgtgtacctgaaggacagtgagaaggttgtcagcatttccagtgagcacctggagcctatcacccccaccaagaacaacaaggtgaaagtgatcctgggcgaggatcgggaagccacgggcgtcctactgagcattgatggtgaggatggcattgtccgtatggaccttgatgagcagctcaagatcctcaacctccgcttcctggggaagctcctggaagcctgaagcaggcagggccggtggacttcgtcggatgaagagtgatcctccttccttccctggcccttggctgtgacacaagatcctcctgcagggctaggcggattgttctggatttccttttgtttttccttttagttttccatcttttccctccctggtgctcattggaatctgagtagagtctgggggagggtccccaccttcctgtacctcct

SEQ ID NO: 30422 - DNA, 3698 bp, Homo sapiens
  source 1..3698: mol_type = unassigned DNA
aacgggtaggttctcgcgagaggacccgtcagccccagtcaggcgtcgtgcgaacagcagctggtaccgaaggcggaggtggagcccgagagggaaccagcggggaaactgaggctcggggtggagcgcaggattgtgggacgcgccaaggctgctgtctttcccagcagcagcggaagatgtcggacagcgaggacagcaacttttccgaggaggaggacagcgagcgcagcagtgacggcgaggaggccgaggtagacgaagagcggcggagtgcagcgggcagtgagaaagaagaagagcctgaggacgaagaggaggaggaagaggaggaggaatacgatgaggaagaggaggaagaagatgatgaccgaccccccaagaaaccccgccatggaggcttcattctggacgaggctgatgttgacgatgagtatgaggacgaggaccagtgggaggatggagcagaggacattctagagaaagcctccaatatcgataatgttgtcctggatgaagatcgttctggggctcgccgcctgcaaaacctctggagggaccagcgagaagaagaactgggcgagtattacatgaagaaatacgccaagtcatctgtgggagagacggtgtatggaggatctgatgagctctcagacgacatcacccagcagcagctgctcccaggagtcaaggatcccaatctgtggactgtcaaatgtaagattggggaggaacgggccacggccatttccttgatgcgcaagttcattgcctaccagttcacagacacgcccctgcagatcaagtcagtagtggcaccagagcatgtgaagggctacatctacgtggaggcctacaagcagacccacgtgaagcaggccattgagggggtgggcaacctgcggcttggctactggaaccagcagatggtgcccatcaaggagatgacagacgtgctcaaagtggtgaaggaggtggccaacctgaaaccaaagtcctgggtccgcctcaagcggggcatctacaaggatgacattgctcaggtggactacgtggagcccagccagaacaccatctccctgaagatgatcccacgcatcgactacgatcgcatcaaggcccgcatgagcttgaaagactggtttgccaaaaggaagaagtttaagcggcctccacagaggctgtttgatgctgagaagatcaggtccctggggggtgatgttgcctctgatggtgacttcctcatctttgaggggaaccgttacagccggaagggctttctgttcaagagcttcgccatgtctgctgtgatcacggagggtgtgaagccaacactctctgagctggaaaagtttgaggaccagccagagggcattgacctggaggtggtgactgagagcacagggaaggagcgggagcacaacttccaacctggggacaacgtggaggtctgtgagggtgagctcatcaacctgcagggcaagatcctcagcgtggatggcaacaagatcaccatcatgcccaagcatgaggacctcaaggacatgttggagttcccagcccaggaacttagaaaatacttcaagatgggggaccacgtgaaggtgattgctggccgattcgagggcgacacaggcctcattgtgcgggtggaggagaatttcgttatcctgttctctgacctcaccatgcatgagctgaaggtgctcccccgggacctgcagctctgctcagagacagcatcaggtgtggatgttgggggccagcatgaatggggcgagctggtgcagctggatccccagactgtgggtgtcatcgtgcgactagaacgggagaccttccaggtgctgaacatgtacgggaaggtggtgactgtcagacatcaggctgtgacccggaagaaggacaaccgctttgctgtggccttggactcagagcagaacaacatccatgtgaaagacatcgttaaggtcattgatggcccccactcaggccgagaaggggagattcgccatctcttccgaagcttcgccttcctacattgcaagaaactggtggagaacgggggcatgtttgtctgcaagacccgccacctggtgctggctgggggctcaaagccccgtgatgtgaccaacttcaccgtgggtggctttgcgcctatgagtccccggatcagcagccccatgcaccccagtgctggaggtcagcgtggcggctttggtagcccaggtggcggcagtggtggcatgagcaggggccggggccggagggacaacgaactcatcggccagaccgtgcgcatctcccaggggccctacaaaggctacatcggtgtggtgaaagatgccacagagtccacggcccgtgtggagctgcactccacctgccagaccatctctgtggaccgtcagcggctcaccacggtgggctcacggcgcccgggcggcatgacctcgacctatgggaggacgcccatgtatggctcccagacgcccatgtatggctctggctcccgaacacccatgtacggctcacagacacccctccaggatggtagccgcaccccacactacggctcacagacgcccctgcatgatggcagccgcactcctgcccagagtggggcctgggaccccaacaaccccaacacgccgtcacgggctgaggaagaatatgagtatgctttcgatgatgagcccaccccgtccccgcaggcctatgggggaacccccaatccccaaacacctggctacccagacccctcgtccccacaggtcaacccacaatacaacccgcagacgccagggacgccggccatgtacaacacagaccagttctctccctatgctgccccctccccacaaggttcctaccagcccagccccagcccccagagctaccaccaggtggcgccaagcccagcaggctaccagaatacccactccccagccagctaccaccctacaccgtcgcccatggcctatcaggctagccccagcccgagccccgttggctacagtcctatgacacctggagctccctcccctggtggctacaacccacacacgccaggctcaggcatcgagcagaactccagcgactgggtaaccactgacattcaggtgaaggtgcgggacacctacctggatacacaggtggtgggacagacaggtgtcatccgcagtgtcacggggggcatgtgctctgtgtacctgaaggacagtgagaaggttgtcagcatttccagtgagcacctggagcctatcacccccaccaagaacaacaaggtgaaagtgatcctgggcgaggatcgggaagccacgggcgtcctactgagcattgatggtgaggatggcattgtccgtatggaccttgatgagcagctcaagatcctcaacctccgcttcctggggaagctcctggaagcctgaagcaggcagggccggtggacttcgtcggatgaagagtgatcctccttccttccctggcccttggctgtgacacaagatcctcctgcagggctaggcggattgttctggatttccttttgtttttccttttagttttccatcttttccctccctggtgctcattggaatctgagtagagtctgggggagggtccccaccttcctgtacctcctccccacagcttgcttttgttgtaccgtctttcaataaaaagaagctgtttggtct

SEQ ID NO: 30423 - DNA, 3710 bp, Homo sapiens
  source 1..3710: mol_type = unassigned DNA
aacgggtaggttctcgcgagaggacccgtcagccccagtcaggcgtcgtgcgaacagcagctggtaccgaaggcggaggtggagcccgagagggaaccagcggggaaactgaggctcggggtggagcgcaggattgtgggacgcgccaaggctgctgtctttcccagcagcagcggaagatgtcggacagcgaggacagcaacttttccgaggaggaggacagcgagcgcagcagtgacggcgaggaggccgaggtagacgaagagcggcggagtgcagcgggcagtgagaaagaagaagagcctgaggacgaagaggaggaggaagaggaggaggaatacgatgaggaagaggaggaagaagatgatgaccgaccccccaagaaaccccgccatggaggcttcattctggacgaggctgatgttgacgatgagtatgaggacgaggaccagtgggaggatggagcagaggacattctagagaaagaagagattgaagcctccaatatcgataatgttgtcctggatgaagatcgttctggggctcgccgcctgcaaaacctctggagggaccagcgagaagaagaactgggcgagtattacatgaagaaatacgccaagtcatctgtgggagagacggtgtatggaggatctgatgagctctcagacgacatcacccagcagcagctgctcccaggagtcaaggatcccaatctgtggactgtcaaatgtaagattggggaggaacgggccacggccatttccttgatgcgcaagttcattgcctaccagttcacagacacgcccctgcagatcaagtcagtagtggcaccagagcatgtgaagggctacatctacgtggaggcctacaagcagacccacgtgaagcaggccattgagggggtgggcaacctgcggcttggctactggaaccagcagatggtgcccatcaaggagatgacagacgtgctcaaagtggtgaaggaggtggccaacctgaaaccaaagtcctgggtccgcctcaagcggggcatctacaaggatgacattgctcaggtggactacgtggagcccagccagaacaccatctccctgaagatgatcccacgcatcgactacgatcgcatcaaggcccgcatgagcttgaaagactggtttgccaaaaggaagaagtttaagcggcctccacagaggctgtttgatgctgagaagatcaggtccctggggggtgatgttgcctctgatggtgacttcctcatctttgaggggaaccgttacagccggaagggctttctgttcaagagcttcgccatgtctgctgtgatcacggagggtgtgaagccaacactctctgagctggaaaagtttgaggaccagccagagggcattgacctggaggtggtgactgagagcacagggaaggagcgggagcacaacttccaacctggggacaacgtggaggtctgtgagggtgagctcatcaacctgcagggcaagatcctcagcgtggatggcaacaagatcaccatcatgcccaagcatgaggacctcaaggacatgttggagttcccagcccaggaacttagaaaatacttcaagatgggggaccacgtgaaggtgattgctggccgattcgagggcgacacaggcctcattgtgcgggtggaggagaatttcgttatcctgttctctgacctcaccatgcatgagctgaaggtgctcccccgggacctgcagctctgctcagagacagcatcaggtgtggatgttgggggccagcatgaatggggcgagctggtgcagctggatccccagactgtgggtgtcatcgtgcgactagaacgggagaccttccaggtgctgaacatgtacgggaaggtggtgactgtcagacatcaggctgtgacccggaagaaggacaaccgctttgctgtggccttggactcagagcagaacaacatccatgtgaaagacatcgttaaggtcattgatggcccccactcaggccgagaaggggagattcgccatctcttccgaagcttcgccttcctacattgcaagaaactggtggagaacgggggcatgtttgtctgcaagacccgccacctggtgctggctgggggctcaaagccccgtgatgtgaccaacttcaccgtgggtggctttgcgcctatgagtccccggatcagcagccccatgcaccccagtgctggaggtcagcgtggcggctttggtagcccaggtggcggcagtggtggcatgagcaggggccggggccggagggacaacgaactcatcggccagaccgtgcgcatctcccaggggccctacaaaggctacatcggtgtggtgaaagatgccacagagtccacggcccgtgtggagctgcactccacctgccagaccatctctgtggaccgtcagcggctcaccacggtgggctcacggcgcccgggcggcatgacctcgacctatgggaggacgcccatgtatggctcccagacgcccatgtatggctctggctcccgaacacccatgtacggctcacagacacccctccaggatggtagccgcaccccacactacggctcacagacgcccctgcatgatggcagccgcactcctgcccagagtggggcctgggaccccaacaaccccaacacgccgtcacgggctgaggaagaatatgagtatgctttcgatgatgagcccaccccgtccccgcaggcctatgggggaacccccaatccccaaacacctggctacccagacccctcgtccccacaggtcaacccacaatacaacccgcagacgccagggacgccggccatgtacaacacagaccagttctctccctatgctgccccctccccacaaggttcctaccagcccagccccagcccccagagctaccaccaggtggcgccaagcccagcaggctaccagaatacccactccccagccagctaccaccctacaccgtcgcccatggcctatcaggctagccccagcccgagccccgttggctacagtcctatgacacctggagctccctcccctggtggctacaacccacacacgccaggctcaggcatcgagcagaactccagcgactgggtaaccactgacattcaggtgaaggtgcgggacacctacctggatacacaggtggtgggacagacaggtgtcatccgcagtgtcacggggggcatgtgctctgtgtacctgaaggacagtgagaaggttgtcagcatttccagtgagcacctggagcctatcacccccaccaagaacaacaaggtgaaagtgatcctgggcgaggatcgggaagccacgggcgtcctactgagcattgatggtgaggatggcattgtccgtatggaccttgatgagcagctcaagatcctcaacctccgcttcctggggaagctcctggaagcctgaagcaggcagggccggtggacttcgtcggatgaagagtgatcctccttccttccctggcccttggctgtgacacaagatcctcctgcagggctaggcggattgttctggatttccttttgtttttccttttagttttccatcttttccctccctggtgctcattggaatctgagtagagtctgggggagggtccccaccttcctgtacctcctccccacagcttgcttttgttgtaccgtctttcaataaaaagaagctgtttggtct

SEQ ID NO: 30424 - DNA, 3742 bp, Homo sapiens
  source 1..3742: mol_type = unassigned DNA
agagaacagattcggaaactggggaggtctagcatgtggcgtaggagggggtcctcactccgcttcgcgattgccaaaacgagcctgccggaagcgccctaaggggttttcttctcccagggaaccagcggggaaactgaggctcggggtggagcgcaggattgtgggacgcgccaaggctgctgtctttcccagcagcagcggaagatgtcggacagcgaggacagcaacttttccgaggaggaggacagcgagcgcagcagtgacggcgaggaggccgaggtagacgaagagcggcggagtgcagcgggcagtgagaaagaagaagagcctgaggacgaagaggaggaggaagaggaggaggaatacgatgaggaagaggaggaagaagatgatgaccgaccccccaagaaaccccgccatggaggcttcattctggacgaggctgatgttgacgatgagtatgaggacgaggaccagtgggaggatggagcagaggacattctagagaaagaagagattgaagcctccaatatcgataatgttgtcctggatgaagatcgttctggggctcgccgcctgcaaaacctctggagggaccagcgagaagaagaactgggcgagtattacatgaagaaatacgccaagtcatctgtgggagagacggtgtatggaggatctgatgagctctcagacgacatcacccagcagcagctgctcccaggagtcaaggatcccaatctgtggactgtcaaatgtaagattggggaggaacgggccacggccatttccttgatgcgcaagttcattgcctaccagttcacagacacgcccctgcagatcaagtcagtagtggcaccagagcatgtgaagggctacatctacgtggaggcctacaagcagacccacgtgaagcaggccattgagggggtgggcaacctgcggcttggctactggaaccagcagatggtgcccatcaaggagatgacagacgtgctcaaagtggtgaaggaggtggccaacctgaaaccaaagtcctgggtccgcctcaagcggggcatctacaaggatgacattgctcaggtggactacgtggagcccagccagaacaccatctccctgaagatgatcccacgcatcgactacgatcgcatcaaggcccgcatgagcttgaaagactggtttgccaaaaggaagaagtttaagcggcctccacagaggctgtttgatgctgagaagatcaggtccctggggggtgatgttgcctctgatggtgacttcctcatctttgaggggaaccgttacagccggaagggctttctgttcaagagcttcgccatgtctgctgtgatcacggagggtgtgaagccaacactctctgagctggaaaagtttgaggaccagccagagggcattgacctggaggtggtgactgagagcacagggaaggagcgggagcacaacttccaacctggggacaacgtggaggtctgtgagggtgagctcatcaacctgcagggcaagatcctcagcgtggatggcaacaagatcaccatcatgcccaagcatgaggacctcaaggacatgttggagttcccagcccaggaacttagaaaatacttcaagatgggggaccacgtgaaggtgattgctggccgattcgagggcgacacaggcctcattgtgcgggtggaggagaatttcgttatcctgttctctgacctcaccatgcatgagctgaaggtgctcccccgggacctgcagctctgctcagagacagcatcaggtgtggatgttgggggccagcatgaatggggcgagctggtgcagctggatccccagactgtgggtgtcatcgtgcgactagaacgggagaccttccaggtgctgaacatgtacgggaaggtggtgactgtcagacatcaggctgtgacccggaagaaggacaaccgctttgctgtggccttggactcagagcagaacaacatccatgtgaaagacatcgttaaggtcattgatggcccccactcaggccgagaaggggagattcgccatctcttccgaagcttcgccttcctacattgcaagaaactggtggagaacgggggcatgtttgtctgcaagacccgccacctggtgctggctgggggctcaaagccccgtgatgtgaccaacttcaccgtgggtggctttgcgcctatgagtccccggatcagcagccccatgcaccccagtgctggaggtcagcgtggcggctttggtagcccaggtggcggcagtggtggcatgagcaggggccggggccggagggacaacgaactcatcggccagaccgtgcgcatctcccaggggccctacaaaggctacatcggtgtggtgaaagatgccacagagtccacggcccgtgtggagctgcactccacctgccagaccatctctgtggaccgtcagcggctcaccacggtgggctcacggcgcccgggcggcatgacctcgacctatgggaggacgcccatgtatggctcccagacgcccatgtatggctctggctcccgaacacccatgtacggctcacagacacccctccaggatggtagccgcaccccacactacggctcacagacgcccctgcatgatggcagccgcactcctgcccagagtggggcctgggaccccaacaaccccaacacgccgtcacgggctgaggaagaatatgagtatgctttcgatgatgagcccaccccgtccccgcaggcctatgggggaacccccaatccccaaacacctggctacccagacccctcgtccccacaggtcaacccacaatacaacccgcagacgccagggacgccggccatgtacaacacagaccagttctctccctatgctgccccctccccacaaggttcctaccagcccagccccagcccccagagctaccaccaggtggcgccaagcccagcaggctaccagaatacccactccccagccagctaccaccctacaccgtcgcccatggcctatcaggctagccccagcccgagccccgttggctacagtcctatgacacctggagctccctcccctggtggctacaacccacacacgccaggctcaggcatcgagcagaactccagcgactgggtaaccactgacattcaggtgaaggtgcgggacacctacctggatacacaggtggtgggacagacaggtgtcatccgcagtgtcacggggggcatgtgctctgtgtacctgaaggacagtgagaaggttgtcagcatttccagtgagcacctggagcctatcacccccaccaagaacaacaaggtgaaagtgatcctgggcgaggatcgggaagccacgggcgtcctactgagcattgatggtgaggatggcattgtccgtatggaccttgatgagcagctcaagatcctcaacctccgcttcctggggaagctcctggaagcctgaagcaggcagggccggtggacttcgtcggatgaagagtgatcctccttccttccctggcccttggctgtgacacaagatcctcctgcagggctaggcggattgttctggatttccttttgtttttccttttagttttccatcttttccctccctggtgctcattggaatctgagtagagtctgggggagggtccccaccttcctgtacctcctccccacagcttgcttttgttgtaccgtctttcaataaaaagaagctgtttggtctaaaa

SEQ ID NO: 30425 - DNA, 3902 bp, Homo sapiens
  source 1..3902: mol_type = unassigned DNA
aagccttttcttccctctaggccagaggaccccacctggagccctagtagccaaggggaagagttaagaaggaggaaagtaagatgtcggccccgcactccgcccaggccagccctgcctctctcaagatggcgacctggaagtgcgtcgcccgtgccagccccggaaatctcgtgttaggcgaggtcaacgggtaggttctcgcgagaggacccgtcagccccagtcaggcgtcgtgcgaacagcagctggtaccgaaggcggaggtggagcccgagagggaaccagcggggaaactgaggctcggggtggagcgcaggattgtgggacgcgccaaggctgctgtctttcccagcagcagcggaagatgtcggacagcgaggacagcaacttttccgaggaggaggacagcgagcgcagcagtgacggcgaggaggccgaggtagacgaagagcggcggagtgcagcgggcagtgagaaagaagaagagcctgaggacgaagaggaggaggaagaggaggaggaatacgatgaggaagaggaggaagaagatgatgaccgaccccccaagaaaccccgccatggaggcttcattctggacgaggctgatgttgacgatgagtatgaggacgaggaccagtgggaggatggagcagaggacattctagagaaagaagagattgaagcctccaatatcgataatgttgtcctggatgaagatcgttctggggctcgccgcctgcaaaacctctggagggaccagcgagaagaagaactgggcgagtattacatgaagaaatacgccaagtcatctgtgggagagacggtgtatggaggatctgatgagctctcagacgacatcacccagcagcagctgctcccaggagtcaaggatcccaatctgtggactgtcaaatgtaagattggggaggaacgggccacggccatttccttgatgcgcaagttcattgcctaccagttcacagacacgcccctgcagatcaagtcagtagtggcaccagagcatgtgaagggctacatctacgtggaggcctacaagcagacccacgtgaagcaggccattgagggggtgggcaacctgcggcttggctactggaaccagcagatggtgcccatcaaggagatgacagacgtgctcaaagtggtgaaggaggtggccaacctgaaaccaaagtcctgggtccgcctcaagcggggcatctacaaggatgacattgctcaggtggactacgtggagcccagccagaacaccatctccctgaagatgatcccacgcatcgactacgatcgcatcaaggcccgcatgagcttgaaagactggtttgccaaaaggaagaagtttaagcggcctccacagaggctgtttgatgctgagaagatcaggtccctggggggtgatgttgcctctgatggtgacttcctcatctttgaggggaaccgttacagccggaagggctttctgttcaagagcttcgccatgtctgctgtgatcacggagggtgtgaagccaacactctctgagctggaaaagtttgaggaccagccagagggcattgacctggaggtggtgactgagagcacagggaaggagcgggagcacaacttccaacctggggacaacgtggaggtctgtgagggtgagctcatcaacctgcagggcaagatcctcagcgtggatggcaacaagatcaccatcatgcccaagcatgaggacctcaaggacatgttggagttcccagcccaggaacttagaaaatacttcaagatgggggaccacgtgaaggtgattgctggccgattcgagggcgacacaggcctcattgtgcgggtggaggagaatttcgttatcctgttctctgacctcaccatgcatgagctgaaggtgctcccccgggacctgcagctctgctcagagacagcatcaggtgtggatgttgggggccagcatgaatggggcgagctggtgcagctggatccccagactgtgggtgtcatcgtgcgactagaacgggagaccttccaggtgctgaacatgtacgggaaggtggtgactgtcagacatcaggctgtgacccggaagaaggacaaccgctttgctgtggccttggactcagagcagaacaacatccatgtgaaagacatcgttaaggtcattgatggcccccactcaggccgagaaggggagattcgccatctcttccgaagcttcgccttcctacattgcaagaaactggtggagaacgggggcatgtttgtctgcaagacccgccacctggtgctggctgggggctcaaagccccgtgatgtgaccaacttcaccgtgggtggctttgcgcctatgagtccccggatcagcagccccatgcaccccagtgctggaggtcagcgtggcggctttggtagcccaggtggcggcagtggtggcatgagcaggggccggggccggagggacaacgaactcatcggccagaccgtgcgcatctcccaggggccctacaaaggctacatcggtgtggtgaaagatgccacagagtccacggcccgtgtggagctgcactccacctgccagaccatctctgtggaccgtcagcggctcaccacggtgggctcacggcgcccgggcggcatgacctcgacctatgggaggacgcccatgtatggctcccagacgcccatgtatggctctggctcccgaacacccatgtacggctcacagacacccctccaggatggtagccgcaccccacactacggctcacagacgcccctgcatgatggcagccgcactcctgcccagagtggggcctgggaccccaacaaccccaacacgccgtcacgggctgaggaagaatatgagtatgctttcgatgatgagcccaccccgtccccgcaggcctatgggggaacccccaatccccaaacacctggctacccagacccctcgtccccacaggtcaacccacaatacaacccgcagacgccagggacgccggccatgtacaacacagaccagttctctccctatgctgccccctccccacaaggttcctaccagcccagccccagcccccagagctaccaccaggtggcgccaagcccagcaggctaccagaatacccactccccagccagctaccaccctacaccgtcgcccatggcctatcaggctagccccagcccgagccccgttggctacagtcctatgacacctggagctccctcccctggtggctacaacccacacacgccaggctcaggcatcgagcagaactccagcgactgggtaaccactgacattcaggtgaaggtgcgggacacctacctggatacacaggtggtgggacagacaggtgtcatccgcagtgtcacggggggcatgtgctctgtgtacctgaaggacagtgagaaggttgtcagcatttccagtgagcacctggagcctatcacccccaccaagaacaacaaggtgaaagtgatcctgggcgaggatcgggaagccacgggcgtcctactgagcattgatggtgaggatggcattgtccgtatggaccttgatgagcagctcaagatcctcaacctccgcttcctggggaagctcctggaagcctgaagcaggcagggccggtggacttcgtcggatgaagagtgatcctccttccttccctggcccttggctgtgacacaagatcctcctgcagggctaggcggattgttctggatttccttttgtttttccttttagttttccatcttttccctccctggtgctcattggaatctgagtagagtctgggggagggtccccaccttcctgtacctcctccccacagcttgcttttgttgtaccgtctttcaataaaaagaagctgtttggtctaaaa

SEQ ID NO: 30426 - DNA, 5876 bp, Homo sapiens
  source 1..5876: mol_type = unassigned DNA
cgactccattttcctcggtgggggcttagcgcactggaggagcggcgggcttcagacagttatcttcaggcagagtgagaagctgcagcaatgtctgattttgtggaaagcgaggctgaggagtcagaggaagaatacaatgatgaaggcgaggtggtaccccgagtcaccaagaaatttgtggaagaggaggatgatgatgaggaggaggaggaggagaacctagatgatcaggatgagcaaggcaacttgaaaggctttatcaatgacgatgatgatgaagatgaaggggaggaggatgagggcagtgactctggtgattcagaagatgatgttggccacaagaagagaaaacgcacctcttttgatgaccgcctggaggatgatgattttgacctcattgaggagaatttgggtgtcaaagtcaaaagaggacaaaagtaccggcgtgtcaaaaaaatgtcagatgacgaggacgatgacgaggaggaatatggcaaggaggaacatgaaaaagaagctattgcggaagaaatcttccaggatggggaaggggaagaagggcaggaggccatggaggcccccatggctcctccagaggaggaggaagaagatgatgaggagtcagatattgacgacttcattgtggatgatgatggacagcctctgaaaaaacctaagtggcggaaaaagcttcctggatacacagacgcggccctgcaagaagcccaggaaatcttcggtgtggactttgactatgatgaatttgagaaatacaatgagtatgatgaagaactggaggaagagtatgagtatgaggatgatgaggctgagggtgaaatccgagtgcgccccaagaagaccaccaagaagcgtgtgagccgtaggagcatctttgaaatgtatgagcccagtgagctagaaagcagccacctcacagatcaggacaatgaaatccgagccactgacctgcctgagaggttccagctccgctccatcccagtcaagggggctgaagatgatgaactagaagaagaagctgactggatctacaggaatgcttttgccacaccaaccatttctctccaggaaagctgtgattacctagaccgagggcagccagccagcagcttcagtcggaaagggcccagcacaattcagaagatcaaagaggccctgggcttcatgcgaaatcagcattttgaggtgccttttattgccttctatcgaaaggagtatgtggagcctgagttgcacatcaatgacctatggagagtctggcagtgggatgaaaagtggacccagctgcggatccgtaaagagaacctaacacggctgtttgagaagatgcaggcttatcagtatgaacagatctctgctgaccctgacaaacctcttgctgatggcatccgggctctggacaccactgacatggagaggctcaaggatgtccaatcaatggatgagctgaaagatgtctacaaccattttcttctttattatggccgagacatccctaagatgcagaacgccgccaaagctagccgcaagaagctgaagcgtgtcagggaagagggagatgaagaaggtgaaggtgacgaggcagaagatgaggagcagagggggcctgagctcaagcaagcctctcgccgagacatgtacaccatctgccagagtgctgggctagatggcctggccaaaaagtttgggcttactcccgagcagtttggggagaacctgcgggatagctaccagcggcacgagacagagcagtttcccgcggagcccttggagctggccaaggattacgtttgcagccagttccctactccagaagctgtgctagaaggcgcccgctacatggtagccctgcagattgcccgtgagccccttgtccggcaggtgctgaggcaaaccttccaagagagagccaagttaaatataacccccaccaagaaaggtagaaaggatgtggatgaggcccactatgcctattccttcaagtatttaaagaacaagcctgttaaggaactgagagatgaccagtttctcaagatatgcctggctgaagacgaagggctcctcaccactgacatcagcatagatttgaagggagtggaaggctatggcaacgaccagacatattttgaggagataaaacagttttactaccgagatgagttcagccaccaggtgcaggagtggaaccggcagcgcaccatggccatcgaacgggctttacagcagttcctctatgtgcagatggccaaagaactcaagaacaagctgctggctgaagccaaggaatatgtcataaaggcctgtagtcgaaagctctacaattggttgagagtggcaccctaccgaccagatcagcaggtggaagaagatgacgactttatggacgagaaccaagggaagggcattcgagtcctcggcattgctttctcctctgccagagatcaccctgtgttctgcgccctggtcaatggtgaaggagaagtgacagacttccttcgactgccccattttaccaaacggcgaactgcatggagagaggaagagcgggaaaagaaggctcaagacattgaaacgctaaagaaatttctcctgaataagaagcctcatgtagtgacagttgcaggagagaacagggacgcccagatgttgattgaagatgtgaagcgcattgtacatgagctggaccagggccagcagctgtcatctattggggtagagctggttgacaacgagttggccattctctatatgaacagcaagaagtcagaggcagagttccgggattatcctccagtgctgagacaggccgtctccctggcccggcgcatccaggaccctctgattgaatttgcccaggtgtgcagttccgatgaagacatcctgtgtctcaagtttcaccccttgcaggagcatgtggtgaaagaggagctgctcaacgccttgtactgtgaatttatcaaccgagtcaatgaggtcggggtcgatgtcaaccgtgccattgcccacccttacagccaggccttgatccagtatgtttgtggcctgggacctcggaaagggacccacctcctgaagatcctgaagcagaacaacacccggctcgagagccggacccagctggtcaccatgtgccacatgggtcccaaagtcttcatgaattgtgctggcttcctcaagatcgacacggcctccctgggggacagcactgactcatatattgaagtccttgatggttcccgtgtccaccctgagacttatgagtgggctaggaagatggcagtggatgccctggaatacgatgaatcagccgaggatgccaatcctgcaggagcccttgaagaaatcttggaaaacccagagcgactgaaagacctggaccttgatgcctttgcagaagagctggagaggcagggctatggtgacaaacacatcacactctatgacatccgggcagagctgagctgtcgatataaggacctccggacagcctaccgctctcccaacacagaggagatcttcaatatgttaaccaaagaaacaccagagaccttctacattggaaagctcatcatctgcaatgtcactggcattgcccacaggcgtccccagggtgagagctatgaccaggcgatccgcaatgatgagacagggctgtggcagtgccccttctgtcagcaggacaatttccctgaactaagcgaggtgtggaaccactttgacagcggttcgtgcccaggccaggccatcggtgtcaaaacacggctagacaatggtgtcaccggcttcatccccaccaaattcctcagtgacaaagtggtaaagcggccagaagaacgagtgaaggtgggaatgactgttcactgccgcatcatgaagattgacattgagaagttcagtgcagacctgacctgccgcacctcagacctcatggacaggaacaatgagtggaagctgcccaaagacacctactatgactttgatgctgaagctgcagaccacaagcaggaggaggacatgaagcggaagcagcagcggaccacatacatcaagagagtgatcgcacacccatccttccataatatcaatttcaagcaagcagaaaagatgatggagaccatggaccagggtgatgtgattatccgaccaagcagcaagggcgagaaccacctgacagtgacctggaaagtcagtgatggcatctaccagcatgtggatgtgcgggaggagggcaaggaaaatgccttcagcctgggagccactctgtggatcaacagtgaggaattcgaagatttggatgagattgttgctcgctatgtccagcccatggcatcctttgcccgggaccttctgaatcacaagtattatcaggactgcagcggtggggaccgcaagaaattagaggagctgctcatcaaaactaagaaggagaagcccaccttcatcccttatttcatctgtgcctgcaaggaactgcccggcaagttcctactgggataccagccccggggtaaacccaggatagaatatgtaacggtgactccagagggattccggtaccggggccagatcttcccaaccgtgaatggactgtttagatggtttaaggatcactaccaggatcctgtaccaggcatcacccctagcagcagcagcaggacccggacacctgcctctatcaatgctaccccagccaacatcaaccttgcagatctgacacgggctgtgaatgccctgcctcagaacatgacttcacagatgttcagtgccattgctgcggtgacaggccaaggacagaaccctaatgccaccccagcccagtgggcctccagccagtacggctatggcggcagtggaggcggcagcagtgcttaccacgtattcccaacgccagcccagcagccagtggccacaccactaatgacccctagctactcctacacgaccccaagccagcccatcaccacccctcagtaccaccagctccaggccagcaccaccccacagtcggcccaggcccagccccagccctcttccagctcccggcaacggcagcagcagccaaagtccaacagccatgcagccatcgactggggaaaaatggcggagcagtggctgcaggaaaaggaggcagaacggcggaaacagaagcagcggctgacacctcggccctcccccagccccatgatcgaaagcacccccatgtccattgctggcgatgccaccccactcctggacgagatggatcggtagggggcctgctcctcggactctggttacctctgaggctgggaaaggcctggctgcccactgcctccctccctgcccctccttttatgtccataaagtggcgtgaagtgagacgttctctttggtggtcaacccggatgggtgacaggctggatggccttgtgaacttgagctcagtgtatgctaggcaacaattctcccgctccagaccctcaccgaccacctgtcctgggaccaggctgggaggggagtgtggcagggaggaggaagaggaaggtgagaatgagtagaacagttttgtattctactccctacaagccattttgaacttctgccctcaccggactctgggctgtgactggggcaccaaactcagcacatgagtctcccctagctctcgtggggagagggatgctatttattcagtttggggcaggagggagaggagggaaagtatttctgaccctgatgccaacagccgggtggctgtccaagcaggattgcaggggacacagggaagcactgcccagcccctgcctggctgccctttcccccctgctgctgccaccgcttcctgcctgtcatttgaataaacagtgtttctattg

SEQ ID NO: 30427 - DNA, 2876 bp, Homo sapiens
  source 1..2876: mol_type = unassigned DNA
cgactccattttcctcggtgggggcttagcgcactggaggagcggcgggcttcagacagttatcttcaggcagagtgagaagctgcagcaatgtctgattttgtggaaagcgaggctgaggagtcagaggaagaatacaatgatgaaggcgaggtggtaccccgagtcaccaagaaatttgtggaagaggaggatgatgatgaggaggaggaggaggagaacctagatgatcaggatgagcaaggcaacttgaaaggctttatcaatgacgatgatgatgaagatgaaggggaggaggatgagggcagtgactctggtgattcagaagatgatgttggccacaagaagagaaaacgcacctcttttgatgaccgcctggaggatgatgattttgacctcattgaggagaatttgggtgtcaaagtcaaaagaggacaaaagtaccggcgtgtcaaaaaaatgtcagatgacgaggacgatgacgaggaggaatatggcaaggaggaacatgaaaaagaagctattgcggaagaaatcttccaggatggggaaggggaagaagggcaggaggccatggaggcccccatggctcctccagaggaggaggaagaagatgatgaggagtcagatattgacgacttcattgtggatgatgatggacagcctctgaaaaaacctaagtggcggaaaaagcttcctggatacacagacgcggccctgcaagaagcccaggaaatcttcggtgtggactttgactatgatgaatttgagaaatacaatgagtatgatgaagaactggaggaagagtatgagtatgaggatgatgaggctgagggtgaaatccgagtgcgccccaagaagaccaccaagaagcgtgtgagccgtaggagcatctttgaaatgtatgagcccagtgagctagaaagcagccacctcacagatcaggacaatgaaatccgagccactgacctgcctgagaggttccagctccgctccatcccagtcaagggggctgaagatgatgaactagaagaagaagctgactggatctacaggaatgcttttgccacaccaaccatttctctccaggaaagctgtgattacctagaccgagggcagccagccagcagcttcagtcggaaagggcccagcacaattcagaagatcaaagaggccctgggcttcatgcgaaatcagcattttgaggtgccttttattgccttctatcgaaaggagtatgtggagcctgagttgcacatcaatgacctatggagagtctggcagtgggatgaaaagtggacccagctgcggatccgtaaagagaacctaacacggctgtttgagaagatgcaggcttatcagtatgaacagatctctgctgaccctgacaaacctcttgctgatggcatccgggctctggacaccactgacatggagaggctcaaggatgtccaatcaatggatgagctgaaagatgtctacaaccattttcttctttattatggccgagacatccctaagatgcagaacgccgccaaagctagccgcaagaagctgaagcgtgtcagggaagagggagatgaagaaggtgaaggtgacgaggcagaagatgaggagcagagggggcctgagctcaagcaagcctctcgccgagacatgtacaccatctgccagagtgctgggctagatggcctggccaaaaagtttgggcttactcccgagcagtttggggagaacctgcgggatagctaccagcggcacgagacagagcagtttcccgcggagcccttggagctggccaaggattacgtttgcagccagttccctactccagaagctgtgctagaaggcgcccgctacatggtagccctgcagattgcccgtgagccccttgtccggcaggtgctgaggcaaaccttccaagagagagccaagctaatgacccctagctactcctacacgaccccaagccagcccatcaccacccctcagtaccaccagctccaggccagcaccaccccacagtcggcccaggcccagccccagccctcttccagctcccggcaacggcagcagcagccaaagtccaacagccatgcagccatcgactggggaaaaatggcggagcagtggctgcaggaaaaggaggcagaacggcggaaacagaagcagcggctgacacctcggccctcccccagccccatgatcgaaagcacccccatgtccattgctggcgatgccaccccactcctggacgagatggatcggtagggggcctgctcctcggactctggttacctctgaggctgggaaaggcctggctgcccactgcctccctccctgcccctccttttatgtccataaagtggcgtgaagtgagacgttctctttggtggtcaacccggatgggtgacaggctggatggccttgtgaacttgagctcagtgtatgctaggcaacaattctcccgctccagaccctcaccgaccacctgtcctgggaccaggctgggaggggagtgtggcagggaggaggaagaggaaggtgagaatgagtagaacagttttgtattctactccctacaagccattttgaacttctgccctcaccggactctgggctgtgactggggcaccaaactcagcacatgagtctcccctagctctcgtggggagagggatgctatttattcagtttggggcaggagggagaggagggaaagtatttctgaccctgatgccaacagccgggtggctgtccaagcaggattgcaggggacacagggaagcactgcccagcccctgcctggctgccctttcccccctgctgctgccaccgcttcctgcctgtcatttgaataaacagtgtttctattg

SEQ ID NO: 30428 - DNA, 2484 bp, Homo sapiens
  source 1..2484: mol_type = unassigned DNA
gcgtcactgtccgccgccgtgtccgcggctgcgccagacagtgtagaacctgcggcctcgatgtccttctcccgtgccctattgtgggctcggctcccggcggggcgccaggctggccaccgggcagccatctgctctgcccttcgtccccactttgggccctttcccggggttctggggcaagtttctgtccttgccaccgcctcctcctctgcctccggtggctccaaaataccaaacacgtccttgttcgtgcccctgactgtgaaacctcagggccccagcgccgacggcgacgtcggggccgagctaacccggcctctggacaagaatgaagtaaagaaggtcttagacaaattttacaagaggaaagaaattcagaaactgggtgctgattatggacttgatgctcgtctcttccaccaagctttcataagctttagaaattatattatgcagtctcattccctggatgtggacattcacattgttttgaatgatatttgcttcggtgcagctcatgcggatgatttattcccatttttcttgagacatgccaaacaaatatttcctgtgttggactgtaaggatgatctacgtaaaatcagtgacttaagaataccacctaactggtacccagatgctagagccatgcagcggaagataatatttcattcaggccccacaaacagtggaaagacttatcacgcaatccagaaatacttctcagcaaagtctggagtgtattgtggccctctaaaattactggcacatgagatcttcgaaaagagtaatgctgctggtgtgccatgtgacttggtgacaggtgaagagcgtgtgacagttcagccaaatgggaaacaggcttcacatgtttcttgtacagttgagatgtgcagtgttacaactccttatgaagtggctgtaattgatgaaattcaaatgattagagatccagccagaggatgggcctggaccagagcacttctaggactgtgtgctgaagaggttcatttgtgtggagaacctgctgctattgacctggtgatggagcttatgtacacaacgggggaggaagtggaggttcgagactataagaggcttacccccatttctgtgctggaccatgcactagaatctttagataaccttcggcctggggactgcattgtctgttttagcaagaatgatatttattctgtgagtcggcagattgaaattcggggattagaatcagctgttatatatggcagtctcccacctgggaccaaacttgctcaagcaaaaaagtttaatgatcccaatgacccatgcaaaatcttggttgctacagatgcaattggcatgggacttaatttgagcataaggagaattattttttactcccttataaagcccagtatcaatgaaaagggagagagagaactagaaccaatcacaacctctcaagccctgcagattgctggcagagctggcagattcagctcacggtttaaagaaggagaggttacaacaatgaatcatgaagatctcagtttattaaaggaaattttgaagaggcctgtggatcctataagggcagctggtcttcatccaactgctgagcagattgaaatgtttgcctaccatctccctgatgcaacactgtccaatctcattgatatttttgtagacttttcacaagttgatgggcagtattttgtctgcaatatggatgattttaaattttctgcagagttgatccagcatattccactaagtctgcgagtgaggtatgttttctgcacagctcctatcaacaagaagcagccttttgtgtgttcttcactgttacagtttgccaggcagtatagcaggaatgagcccctgacctttgcatggttacgccgatacatcaaatggcctttacttccacctaagaatattaaagacctcatggatcttgaagctgtccacgatgtcttggatctttacttgtggctaagctaccgatttatggatatgtttccagatgccagccttattcgagatctccagaaagaactagatggtattatccaagatggtgtgcacaatatcactaaattgattaaaatgtctgagacgcataagctgttgaatttggagggctttccatcagggagccagtcacgattgtcaggaaccttaaagagccaagctagaaggacacgcggcaccaaagctctagggagtaaagctactgagccacccagccccgatgcaggagagctgtcccttgcttccagattggtgcagcaaggactcctcactccagacatgctgaaacagctagaaaaagagtggatgacacaacaaactgaacacaacaaagaaaaaacagagtctgggactcatccaaaagggacgagaagaaagaagaaggaacctgattcggactagttttctgttcctgtttttttttttttatttaattttgcaaataaaaatttattttgaatcctt

SEQ ID NO: 30429 - DNA, 794 bp, Homo sapiens
  source 1..794: mol_type = unassigned DNA
ctcgatgtccttctcccgtgccctattgtgggctcggctcccggcggggcgccaggctggccaccgggcagccatctgctctgcccttcgtccccactttgggccctttcccggggttctggggcaagtttctgtccttgccaccgcctcctcctctgcctccggtggctccaaaataccaaacacgtccttgttcgtgcccctgactgtgaaacctcagggccccagcgccgacggcgacgtcggggccgagctaacccggcctctggacaagaatgaagtggctgtaattgatgaaattcaaatgattagagatccagccagaggatgggcctggaccagagcacttctaggactgtgtgctgaagaggttcatttgtgtggagaacctgctgctattgacctggtgatggagcttatgtacacaacgggggaggaagtggaggttcgagactataagaggcttacccccatttctgtgctggaccatgcactagaatctttagataaccttcggcctggggactgcattgtctgttttagcaagaatgatatttattctgtgagtcggcagattgaaattcggggattagaatcagctgttatatatggcagtctcccacctgggaccaaacttgctcaagcaaaaaagtttaatgatcccaatgacccatgcaaaatcttggttgctacagatgcaattggcatgggacttaatttgagcataaggagaattattttttactcccttataaagcccagtatcaatgaaaagggagagagagaactagaac

SEQ ID NO: 30430 - DNA, 1233 bp, Homo sapiens
  source 1..1233: mol_type = unassigned DNA
atggcggcggtcggggccgaggcgcgaggagcttggtgtgtgccttgcctagtttcacttgatactcttcaggaattatgtagaaaagaaaagctcacatgtaaatcgattggaatcaccaaaaggaatctaaacaattatgaggtggaatacttgtgtgactacaaggtagtaaaggatatggaatattatcttgtaaaatggaaaggatggccagattctacaaatacttgggaacctttgcaaaatctgaagtgcccgttactgcttcagcaattctctaatgacaagcataattatttatctcaggtaaagaaaggcaaagcaataactccaaaagacaataacaaaactttgaaacctgccattgctgagtacattgtgaagaaggctaaacaaaggatagctctgcagagatggcaagatgaactcaacagaagaaagaatcataaaggaatgatatttgttgaaaatactgttgatttagagggcccaccttcagacttctattacattaacgaatacaaaccagctcctggaatcagcttagtcaatgaagctacctttggttgttcatgcacagattgcttctttcaaaaatgttgtcctgctgaagctggagttcttttggcttataataaaaaccaacaaattaaaatcccacctggtactcccatctatgaatgcaactcaaggtgtcagtgtggtcctgattgtcccaataggattgtacaaaaaggcacacagtattcgctttgcatctttcgaactagcaatggacgtggctggggtgtaaagacccttgtgaagattaaaagaatgagttttgtcatggaatatgttggagaggtaatcacaagtgaagaagctgaaagacgaggacagttctatgacaacaagggaatcacgtatctctttgatctggactatgagtctgatgaattcacagtggatgcggctcgatacggcaatgtgtctcattttgtgaatcacagctgtgacccaaatcttcaggtgttcaatgttttcattgataacctcgatactcgtcttccccgaatagcattgttttccacaagaaccataaatgctggagaagagctgacttttgattatcaaatgaaaggttctggagatatatcttcagattctattgaccacagcccagccaaaaagagggtcagaacagtatgtaaatgtggagctgtgacttgcagaggttacctcaactga

SEQ ID NO: 30431 - DNA, 1292 bp, Homo sapiens
  source 1..1292: mol_type = unassigned DNA
gccagtttgaatgaaagctctacaagatggcggcggtcggggccgaggcgcgaggagcttggtgtgtgccttgcctagtttcacttgatactcttcaggaattatgtagaaaagaaaagctcacatgtaaatcgattggaatcaccaaaaggaatctaaacaattatgaggtggaatacttgtgtgactacaaggtagtaaaggatatggaatattatcttgtaaaatggaaaggatggccagattctacaaatacttgggaacctttgcaaaatctgaagtgcccgttactgcttcagcaattctctaatgacaagcataattatttatctcaggtaatcacaagtgaagaagctgaaagacgaggacagttctatgacaacaagggaatcacgtatctctttgatctggactatgagtctgatgaattcacagtggatgcggctcgatacggcaatgtgtctcattttgtgaatcacagctgtgacccaaatcttcaggtgttcaatgttttcattgataacctcgatactcgtcttccccgaatagcattgttttccacaagaaccataaatgctggagaagagctgacttttgattatcaaatgaaaggttctggagatatatcttcagattctattgaccacagcccagccaaaaagagggtcagaacagtatgtaaatgtggagctgtgacttgcagaggttacctcaactgaactttttcaggaaatagagctgatgattataatatttttttcctaatgttaacatttttaaaaatacatatttgggactcttattatcaaggttctacctatgttaatttacaattcatgtttcaagacatttgccaaatgtattaccgatgcctctgaaaagggggtcactgggtctcatagactgatatgaagtcgacatatttatagtgcttagagaccaaactaatggaaggcagactatttacagcttagtatatgtgtacttaagtctatgtgaacagagaaatgcctcccgtagtgtttgaaagcgttaagctgataatgtaattaacaactgctgagagatcaaagattcaacttgccatacacctcaaattcggagaaacagttaatttgggcaaatctacagttctgtttttgctactctattgtcattcctgtttaatactcactgtacttgtatttgagacaaataggtgatactgaattttatactgttttctacttttccattaaaacattggcacctcaatgataaagaaatttaaggtataaaattaaatgtaaaaa

SEQ ID NO: 30432 - DNA, 719 bp, Homo sapiens
  source 1..719: mol_type = unassigned DNA
atcccgtcagaccgcgccagtttgaatgaaagctctacaagatggcggcggtcggggccgaggcgcgaggaggtgaggctggagcgcggccccctcgccttccctgttcccagcttggtgtgtgccttgcctagtttcacttgatactcttcaggaattatgtagaaaagaaaagctcacatgtaaatcgattggaatcaccaaaaggaatctaaacaattatgaggtggaatacttgtgtgactacaaggtagtaaaggatatggaatattatcttgtaaaatggaaaggatggccagattctacaaatacttgggaacctttgcaaaatctgaagtgcccgttactgcttcagcaattctctaatgacaagcataattatttatctcaggtaatcacaagtgaagaagctgaaagacgaggacagttctatgacaacaagggaatcacgtatctctttgatctggactatgagtctgatgaattcacagtggatgcggctcgatacggcaatgtgtctcattttgtgaatcacagctgtgacccaaatcttcaggtgttcaatgttttcattgataacctcgatactcgtcttccccgaatagcattgttttccacaagaaccataaatgctggagaagagctgacttttgattatcaaatgaaaggttctggagatatatcttcagattctattgaccacagcccagccaaaaaga

SEQ ID NO: 30433 - DNA, 3087 bp, Homo sapiens
  source 1..3087: mol_type = unassigned DNA
cggggccgaggcgcgaggaggtgaggctggagcgcggccccctcgccttccctgttcccaggcaagctcccaaggcccgggcggcggggccgtcccgcgggccagccagatggcgacgtggcggttccccgcccgccgcgaccccaactccgggacgcacgctgcggacgcctatcctcccccaggccgctgacccgcctccctgcccggccggctcccgccgcggaggatatggaatattatcttgtaaaatggaaaggatggccagattctacaaatacttgggaacctttgcaaaatctgaagtgcccgttactgcttcagcaattctctaatgacaagcataattatttatctcaggtaaagaaaggcaaagcaataactccaaaagacaataacaaaactttgaaacctgccattgctgagtacattgtgaagaaggctaaacaaaggatagctctgcagagatggcaagatgaactcaacagaagaaagaatcataaaggaatgatatttgttgaaaatactgttgatttagagggcccaccttcagacttctattacattaacgaatacaaaccagctcctggaatcagcttagtcaatgaagctacctttggttgttcatgcacagattgcttctttcaaaaatgttgtcctgctgaagctggagttcttttggcttataataaaaaccaacaaattaaaatcccacctggtactcccatctatgaatgcaactcaaggtgtcagtgtggtcctgattgtcccaataggattgtacaaaaaggcacacagtattcgctttgcatctttcgaactagcaatggacgtggctggggtgtaaagacccttgtgaagattaaaagaatgagttttgtcatggaatatgttggagaggtaatcacaagtgaagaagctgaaagacgaggacagttctatgacaacaagggaatcacgtatctctttgatctggactatgagtctgatgaattcacagtggatgcggctcgatacggcaatgtgtctcattttgtgaatcacagctgtgacccaaatcttcaggtgttcaatgttttcattgataacctcgatactcgtcttccccgaatagcattgttttccacaagaaccataaatgctggagaagagctgacttttgattatcaaatgaaaggttctggagatatatcttcagattctattgaccacagcccagccaaaaagagggtcagaacagtatgtaaatgtggagctgtgacttgcagaggttacctcaactgaactttttcaggaaatagagctgatgattataatatttttttcctaatgttaacatttttaaaaatacatatttgggactcttattatcaaggttctacctatgttaatttacaattcatgtttcaagacatttgccaaatgtattaccgatgcctctgaaaagggggtcactgggtctcatagactgatatgaagtcgacatatttatagtgcttagagaccaaactaatggaaggcagactatttacagcttagtatatgtgtacttaagtctatgtgaacagagaaatgcctcccgtagtgtttgaaagcgttaagctgataatgtaattaacaactgctgagagatcaaagattcaacttgccatacacctcaaattcggagaaacagttaatttgggcaaatctacagttctgtttttgctactctattgtcattcctgtttaatactcactgtacttgtatttgagacaaataggtgatactgaattttatactgttttctacttttccattaaaacattggcacctcaatgataaagaaatttaaggtataaaattaaatgtaaaaattaatttcagcttcatttcgtatttcgaagcaatctagactgttgtgatgagtgtatgtctgaacctgtaattcttaaaagacttcttaatcttctagaagaaaaatctccgaagagctctctctagaagtccaaaatggctagccattatgcttctttgaaaggacatgataatgggaccaggatggttttttggagtaccaagcaaggggaatggagcactttaagggcgcctgttagtaacatgaattggaaatctgtgtcgagtacctctgatctaaacggtaaaacaagctgcctggagagcagctgtacctaacaatactgtaatgtacattaacattacagcctctcaatttcaggcaggtgtaacagttcctttccaccagatttaatatttttatacttcctgcaggttcttcttaaaaagtaatctatatttttgaactgatacttgttttatacataaattttttttagatgtgataaagctaaacttggccaaagtgtgtgcctgaattattagacctttttattagtcaacctacgaagactaaaatagaatatattagttttcaagggagtgggaggcttccaacatagtattgaatctcaggaaaaactattctttcatgtctgattctgagatttctaattgtgttgtgaaaatgataaatgcagcaaatctagctttcagtattcctaatttttacctaagctcattgctccaggctttgattacctaaaataagcttggataaaattgaaccaacttcaagaatgcagcacttcttaatctttagctctttcttgggagaagctagactttattcattatattgctatgacaacttcactctttcataatatataggataaattgtttacatgattggaccctcagattctgttaaccaaaattgcagaatggggggccaggcctgtgtggtggctcacacctgtgatcccagcactttgggaggctgaggtaggaggatcacgtgaggtcgggagttcaagaccagcctggccatcatggtgaaaccctgtctctactgaaaatacaaaaattagccgggcgtggtggcacacgcctgtagtcccagctactcaggaggctgaggcaggagaatcacttgaattcaggaggcggaggttgcagtgagccaagatcataccactgcactgcagcctgagtgacacagtaagactgtctccaaaaaaaaaaaa

SEQ ID NO: 30434 - DNA, 5837 bp, Homo sapiens
  source 1..5837: mol_type = unassigned DNA
gggcgcggggggcgcgacggcggcggcggcggccggttgggggcggggggctcggacgctgcggggactcatttttcccgtcagcggagggagcgagcggtgctgcggcccgcgccgccatcttggattttactctccatttttctctggaattatttttggtgattaattttctgggggggactgggacgcggggcccggcggcgcggccccgcatcgcagcggccgggcagcggggcctgggacgcgccccgaggaggagcggggcggcgcaggcggagagaacattgaaagtattctctaagctatttgaagagagtgactaaatgcacctgggtcaggctgtctgtgggtatgaagtggttgggagaatccaagatcatggtggtgaatggcaggagaaatggaggcaagttgtctaatgaccatcagcagaatcaatcaaaattacagcacacggggaaggacaccctgaaggctggcaaaaatgcagtcgagaggaggtcgaacagatgtaatggtaactcgggatttgaaggacagagtcgctatgtaccatcctctggaatgtccgccaaggaactctgtgaaaatgatgacctagcaaccagtttggttcttgatccctatttaggttttcaaacacacaaaatgaatactagcgcctttccttcgaggagctcaaggcatttttcaaaatctgacagtttttctcacaacaaccctgtgagatttaggcctattaaaggaaggcaggaagaactaaaggaagtaattgaacgttttaagaaagatgaacacttggagaaagccttcaaatgtttgacttcaggcgaatgggcacggcactattttctcaacaagaataaaatgcaggagaaattattcaaagaacatgtatttatttatttgcgaatgtttgcaactgacagtggatttgaaatattgccatgtaatagatactcatcagaacaaaatggagccaaaatagttgcaacaaaagagtggaaacgaaatgacaaaatagaattactggtgggttgtattgccgaactttcagaaattgaggagaacatgctacttagacatggagaaaacgacttcagtgtcatgtactccacaaggaaaaactgtgctcaactctggctgggtcctgctgcgtttataaaccatgattgcagacctaattgtaagtttgtgtcaactggtcgagatacagcatgtgtgaaggctctaagagacattgaacctggagaagaaatttcttgttattatggagatgggttctttggagaaaataatgagttctgcgagtgttacacttgcgaaagacggggcactggtgcttttaaatccagagtgggactgcctgcgcctgctcctgttatcaatagcaaatatggactcagagaaacagataaacgtttaaataggcttaaaaagttaggtgacagcagcaaaaattcagacagtcaatctgtcagctctaacactgatgcagataccactcaggaaaaaaacaatgcaacttctaaccgaaaatcttcagttggcgtaaaaaagaatagcaagagcagaacgttaacgaggcaatctatgtcaagaattccagcttcttccaactctacctcatctaagctaactcatataaataattccagggtaccaaagaaactgaagaagcctgcaaagcctttactttcaaagataaaattgagaaatcattgcaagcggctggagcaaaagaatgcttcaagaaaactcgaaatgggaaacttagtactgaaagagcctaaagtagttctgtataaaaatttgcccattaaaaaagataaggagccagagggaccagcccaagccgcagttgccagcgggtgcttgactagacacgcggcgagagaacacagacagaatcctgtgagaggtgctcattcgcagggggagagctcgccctgcacctacataactcggcggtcagtgaggacaagaacaaatctgaaggaggcctctgacatcaagcttgaaccaaatacgttgaatggctataaaagcagtgtgacggaaccttgccccgacagtggtgaacagctgcagccagctcctgtgctgcaggaggaagaactggctcatgagactgcacaaaaaggggaggcaaagtgtcataagagtgacacaggcatgtccaaaaagaagtcacgacaaggaaaacttgtgaaacagtttgcaaaaatagaggaatctactccagtgcacgattctcctggaaaagacgacgcggtaccagatttgatgggtccccattctgaccagggtgagcacagtggcactgtgggcgtgcctgtgagctacacagactgtgctccttcacccgtcggttgttcagttgtgacatcagatagcttcaaaacaaaagacagctttagaactgcaaaaagtaaaaagaagaggcgaatcacaaggtatgatgcacagttaatcctagaaaataactctgggattcccaaattgactcttcgtaggcgtcatgatagcagcagcaaaacaaatgaccaagagaatgatggaatgaactcttccaaaataagcatcaagttaagcaaagaccatgacaacgataacaatctctatgtagcaaagcttaataatggatttaactcaggatcaggcagtagttctacaaaattaaaaatccagctaaaacgagatgaggaaaatagggggtcttatacagaggggcttcatgaaaatggggtgtgctgcagtgatcctctttctctcttggagtctcgaatggaggtggatgactatagtcagtatgaggaagaaagtacagatgattcctcctcttctgagggcgatgaagaggaggatgactatgatgatgactttgaagacgattttattcctcttcctccagctaagcgcttgaggttaatagttggaaaagactctatagatattgacatttcttcaaggagaagagaagatcagtctttaaggcttaatgcctaagctcttggtcttaacttgacctgggataactactttaaagaaataaaaaattccagtcaattattcctcaactgaaagtttagtggcagcacttctattgtcccttcacttatcagcatactattgtagaaagtgtacagcatactgactcaattcttaagtctgatttgtgcaaatttttatcgtactttttaaatagccttcttacgtgcaattctgagttagaggtaaagccctgttgtaaaataaaggctcaagcaaaattgtacagtgatagcaactttccacacaggacgttgaaaacagtaatgtggctacacagtttttttaactgtaagagcatcagctggctctttaatatatgactaaacaataatttaaaacaaatcatagtagcagcatattaagggtttctagtatgctaatatcaccagcaatgatctttggctttttgatttatttgctagatgtttcccccttggagttttgtcagtttcacactgtttgctggcccaggtgtactgtttgtggcctttgttaatatcgcaaaccattggttgggagtcagattggtttcttaaaaaaaaaaaaaaaatgacatacgtgacagctcacttttcagttcattatatgtacgagggtagcagtgtgtgggatgaggttcgatacagcgtatttattgcttgtcatgtaaattaaaaaccttgtatttaactcttttcaatccttttagataaaattgttctttgcaagaatgattggtgcttattttttcaaaaatttgctgtgaacaacgtgatgacaacaagcaacatttatctaatgaactacagctatcttaatttggttcttcaagttttctgttgcacttgtaaaatgctacaaggaatattaaaaaaatctattcactttaacttataatagtttatgaaataaaaacatgagtcacagcttttgttctgtggtaacctataaaaaaagtttgtctttgagattcaatgtaaagaactgaaaacaatgtatatgttgtaaatatttgtgtgttgtgagaaatttttgtcataagaaattaaaagaacttaccaggaaggtttttaagtttagaaatattcatgccaataaaataggaaattataaatatatagttttaagcactgcatcagtgggagttcttggcttatgttagtttatgttagtttattatgaaaacatcaaagatttttttgactatattatcagttaaacaaaaaggagtcagatttaatttgttttttgaagcactttgagaaattaattttaattaacttaatgagcaaatttttattactactttatgttcaataccaggttcttttcatttctctggattattttgcaaatcattggacagagaatttgggaatataaatctgtaacaggtgtttgacaccagtaggtctctttatttctgggaaatgtgtacctgtactttctgatatacagtgttcctaagtaaaaatcaattcaggggatttgtatagtgtctataggaaagtagcccatgtcttgaaatatgaaaaggaatctgaaggtcatgaaaagtccagtggagaaaatctcaatgcttactgttactactaattgattcctactagtttccaggtttggggggatattgtttcaatgacgctccttaagactgttgattgcccataggttccaaatagaaattaagactcatgaacatttttagaaagtagattgttttctcctggttctctaaggaactacttctgcagtcttacatagtctcatccttgtttgttgtggtgcagtcgaactcctcaggcgtttggaaagcatgtggtagaccttcttccacacccacccatacccccgttcactgcgtctggaggtcttcaacagtgaagtagggcagcccacacagcctctcaggagcacctgtccgaggcacccggagcactttgcagagcacgtccagccctcatggggtccctgcatagaaatgtgaacccctgccactgaggaagatgaaggtagaccctgtgtctggaggtgctggagggcagcgggtcacctcttgtattcccaccttagtttggggtgttttgaagaggttcagagactaaatcttaaaccttatttgaataccaacgatagctattttgggaatttcgatcttaaaaagtgacaaaacacatttcccattttcatttttcagctgaattttagtaacttatttttgatgttttaattttatcatggcctcctctttggaggccaaccttcccatgggtctcaaagcagtgacatttggtagtaaatcactgcctctcaggagtcggtatgcacaagcactcagcagccactgttgatgccttctagggaaacctaatttccgttggtaaaggtaggggcctcggaactgttccggatctgctgtagaacttcaccgtgtggaatggtgacagccacacaccgttgaccagtttagaagaggttgcattcaataaaactcttagcttgagcttatgcaatgattggttaagattttggcattgtaagaattaggagatgatcatagaaatatatgtaaagtattcaattttcaatcattttcaaattactgttataaattgtttttgctgagttgtaatacttttgagatacaatgtattccttgtactgaaagaatgaaaaaggactttttcagcatttgaggtaagttctttaacgtttcattaaaaacattttttacaaatattttgtacatgcacttgcagtattgaggttaatcattttaataaattcggaaattaaaacaa

SEQ ID NO: 30435 - DNA, 2666 bp, Homo sapiens
  source 1..2666: mol_type = unassigned DNA
ttactctccatttttctctggaattatttttggtgattaattttctgggggggactgggacgcggggcccggcggcgcggccccgcatcgcagcggccgggcagcggggcctgggacgcgccccgaggaggagcggggcggcgcaggcggagagaacattgaaagtattctctaagctatttgaagagagtgactaaatgcacctgggtcaggctgtctgtgggtatgaagtggttgggagaatccaagatcatggtggtgaatggcaggagaaatggaggcaagttgtctaatgaccatcagcagaatcaatcaaaattacagcacacggggaaggacaccctgaaggctggcaaaaatgcagtcgagaggaggtcgaacagatgtaatggtaactcgggatttgaaggacagagtcgctatgtaccatcctctggaatgtccgccaaggaactctgtgaaaatgatgacctagcaaccagtttggttcttgatccctatttaggttttcaaacacacaaaatgaatactagcgcctttccttcgaggagctcaaggcatttttcaaaatctgacagtttttctcacaacaaccctgtgagatttaggcctattaaaggaaggcaggaagaactaaaggaagtaattgaacgttttaagaaagatgaacacttggagaaagccttcaaatgtttgacttcaggcgaatgggcacggcactattttctcaacaagaataaaatgcaggagaaattattcaaagaacatgtatttatttatttgcgaatgtttgcaactgacagtggatttgaaatattgccatgtaatagatactcatcagaacaaaatggagccaaaatagttgcaacaaaagagtggaaacgaaatgacaaaatagaattactggtgggttgtattgccgaactttcagaaattgaggagaacatgctacttagacatggagaaaacgacttcagtgtcatgtactccacaaggaaaaactgtgctcaactctggctgggtcctgctgcgtttataaaccatgattgcagacctaattgtaagtttgtgtcaactggtcgagatacagcatgtgtgaaggctctaagagacattgaacctggagaagaaatttcttgttattatggagatgggttctttggagaaaataatgagttctgcgagtgttacacttgcgaaagacggggcactggtgcttttaaatccagagtgggactgcctgcgcctgctcctgttatcaatagcaaatatggactcagagaaacagataaacgtttaaataggcttaaaaagttaggtgacagcagcaaaaattcagacagtcaatctgtcagctctaacactgatgcagataccactcaggaaaaaaacaatgcaagtaagtaagggagatttgataagcatatcttttaaaagtattttcacacaatttgctttataaagtgtgcttcagtagttttaaacttttaaatactcagagagactgggacttgtgagctttggctgcacttcaaggctctagacgtgatttgagtagaggcacagtctgtatcccatctctaacttcagtaccgtcctctagactatttttcttgaataccttggtaactggatatgagttcttcatcatatgttccaaggtcatcatatgttttaaacattttcaaggtgttagagactgtgatgatgtcgctaagtcctgcaagaagacaaaaggactgagtagaattaaattagactctatacattccagtgcctagccagtttgttagaaaagatgatggacttggggaattcatagcttctggccttaaggcttccaccttttcattgcttgctgacctttttcaaaacgaactgactcagttcagcagaccaccagtaccagactcagaattgtgatagaggagcattttgaacagtgccgtattgtgacatgctgtattggctactccagaaagtaggagtaaagatggaaaggagaaagaagcaacctctgagattccagtggtgtgtgggggcaagatctgatggaaactgaaaaagagaacgaagactaaacaaagagaaaggaaagagaagaaaccctaaatgggcaaaggaaagcacatcctgtttgcggagctttgaaatattggaaccatttctaattgctcctgtttttctgggtaacaccagttttctgtagttgccactaaagcagtagactcttgagtctcacttgtctctgagagagacagaagttagaaagttttgacttggcgattccgaaagtatgcctttgttggcacttaaatgtccagtgagacttcttggcaccttagagccctctgagatactgattattttaggttcttctccctactttcagatgttttcagcccaacactgggtgctctcttccactacagagaatcctgaagaaaagggaaggtgtttcccatgatggtgaatgtcactgccatgaattcctgaatctacctgctgctgggagtcagagtccaagcataacccgtgtagcataaaagcagcgctgtagccctattccagtctttttcgttaatgtccagagtgaacaacaagagttagtcaatcattaactgttgactgttgattctcataataaatgcagcataacgaccatt

SEQ ID NO: 30436 - DNA, 2869 bp, Homo sapiens
  source 1..2869: mol_type = unassigned DNA
ggcacagaactcgctccccgcgcgtgcccgcgtcccgcacagagccccgtggaagcgccgcggcggctgggcctggcgggaggcgcgcgcacactgtggcagctgcgccgcacggtgtccctccgccgtcgaggccgcggccttcttttcgtatccttccaccgtgcccgggcggggtccaggcggctcaccgggggcggcgacgcggcggcggtgcgggcggcagggcagcggggcgatgaggtgaggacgcccgggaaccggaggcggcaccgcgcggcgcacggacctgggacgcggagtcctgaagccggcggacggttttcgtacgggcggccgtgcgcgaggcgaggagagaacattgaaagtattctctaagctatttgaagagagtgactaaatgcacctgggtcaggctgtctgtgggtatgaagtggttgggagaatccaagatcatggtggtgaatggcaggagaaatggaggcaagttgtctaatgaccatcagcagaatcaatcaaaattacagcacacggggaaggacaccctgaaggctggcaaaaatgcagtcgagaggaggtcgaacagatgtaatggtaactcgggatttgaaggacagagtcgctatgtaccatcctctggaatgtccgccaaggaactctgtgaaaatgatgacctagcaaccagtttggttcttgatccctatttaggttttcaaacacacaaaatgaatactagcgcctttccttcgaggagctcaaggcatttttcaaaatctgacagtttttctcacaacaaccctgtgagatttaggcctattaaaggaaggcaggaagaactaaaggaagtaattgaacgttttaagaaagatgaacacttggagaaagccttcaaatgtttgacttcaggcgaatgggcacggcactattttctcaacaagaataaaatgcaggagaaattattcaaagaacatgtatttatttatttgcgaatgtttgcaactgacagtggatttgaaatattgccatgtaatagatactcatcagaacaaaatggagccaaaatagttgcaacaaaagagtggaaacgaaatgacaaaatagaattactggtgggttgtattgccgaactttcagaaattgaggagaacatgctacttagacatggagaaaacgacttcagtgtcatgtactccacaaggaaaaactgtgctcaactctggctgggtcctgctgcgtttataaaccatgattgcagacctaattgtaagtttgtgtcaactggtcgagatacagcatgtgtgaaggctctaagagacattgaacctggagaagaaatttcttgttattatggagatgggttctttggagaaaataatgagttctgcgagtgttacacttgcgaaagacggggcactggtgcttttaaatccagagtgggactgcctgcgcctgctcctgttatcaatagcaaatatggactcagagaaacagataaacgtttaaataggcttaaaaagttaggtgacagcagcaaaaattcagacagtcaatctgtcagctctaacactgatgcagataccactcaggaaaaaaacaatgcaagtaagtaagggagatttgataagcatatcttttaaaagtattttcacacaatttgctttataaagtgtgcttcagtagttttaaacttttaaatactcagagagactgggacttgtgagctttggctgcacttcaaggctctagacgtgatttgagtagaggcacagtctgtatcccatctctaacttcagtaccgtcctctagactatttttcttgaataccttggtaactggatatgagttcttcatcatatgttccaaggtcatcatatgttttaaacattttcaaggtgttagagactgtgatgatgtcgctaagtcctgcaagaagacaaaaggactgagtagaattaaattagactctatacattccagtgcctagccagtttgttagaaaagatgatggacttggggaattcatagcttctggccttaaggcttccaccttttcattgcttgctgacctttttcaaaacgaactgactcagttcagcagaccaccagtaccagactcagaattgtgatagaggagcattttgaacagtgccgtattgtgacatgctgtattggctactccagaaagtaggagtaaagatggaaaggagaaagaagcaacctctgagattccagtggtgtgtgggggcaagatctgatggaaactgaaaaagagaacgaagactaaacaaagagaaaggaaagagaagaaaccctaaatgggcaaaggaaagcacatcctgtttgcggagctttgaaatattggaaccatttctaattgctcctgtttttctgggtaacaccagttttctgtagttgccactaaagcagtagactcttgagtctcacttgtctctgagagagacagaagttagaaagttttgacttggcgattccgaaagtatgcctttgttggcacttaaatgtccagtgagacttcttggcaccttagagccctctgagatactgattattttaggttcttctccctactttcagatgttttcagcccaacactgggtgctctcttccactacagagaatcctgaagaaaagggaaggtgtttcccatgatggtgaatgtcactgccatgaattcctgaatctacctgctgctgggagtcagagtccaagcataacccgtgtagcataaaagcagcgctgtagccctattccagtctttttcgttaatgtccagagtgaacaacaagagttagtcaatcattaactgttgactgttgattctcataataaatgcagcataacgaccatt

SEQ ID NO: 30437 - DNA, 585 bp, Homo sapiens
  source 1..585: mol_type = unassigned DNA
tttttgtttttgttttggcccgagcgcatttcggagccctcccgagctcgtcctgcagcccaccctcctccccgacggcgcccctggccgtggcccggcgaccccgcggccgctgcgtcccctttgtgctttatccgctctccctgcgtcccctggagagaacattgaaagtattctctaagctatttgaagagagtgactaaatgcacctgggtcaggctgtctgtgggtatgaagtggttgggagaatccaagatcatggtggtgaatggcaggagaaatggaggcaagttgtctaatgaccatcagcagaatcaatcaaaattacagcacacggggaaggacaccctgaaggctggcaaaaatgcagtcgagaggaggtcgaacagatgtaatggtaactcgggatttgaaggacagagtcgctatgtaccatcctctggaatgtccgccaaggaactctgtgaaaatgatgacctagcaaccagtttggttcttgatccctatttaggttttcaaacacacaaaatgaatactagcgcctttccttcgaggagctcaaggcatttttcaaaatctgacagt

SEQ ID NO: 30438 - DNA, 2308 bp, Homo sapiens
  source 1..2308: mol_type = unassigned DNA
gagcagatgggaggtgcggcgacagtgtttgacgagagccgaaggaggctgtgggaggtgttggcggcggcggcgcgggcgcctgaggaggaggaggagaagcggatgagatcgtggggctcaccagcgtcccccatggcttctgagtagcgtgggagtggagtcagcaccaagccaggctccccgcgcctgccttgccctcacctgctcctgctctctgccagaggcagcatggtccgcagggcaccatggggcccgacagagtgacagcacgagaactgtgcgagaacgacgacctggccaccagcctcgtcctggacccctacctcggtttccgcacccataagatgaacgtcagccctgtgccccccctgcggcgacagcagcacctgcgctcagcgctggaaactttcctgaggcagcgggacctggaggctgcgtaccgggccctgacgctgggaggctggacggcccgctacttccagagccggggcccgcggcaggaggctgccctcaagacccacgtctatcgctacctccgtgccttcctgccggaaagtggctttaccatcctgccctgcacgcgctactccatggagaccaacggggccaagatcgtgtccactcgtgcttggaaaaagaatgagaagctggagctgctggtgggctgcattgcagagctgcgggaggcagatgaggggctgctgagggccggtgagaatgacttcagcatcatgtactcaacccgcaagcggagtgctcagctgtggctgggcccagccgccttcatcaaccatgactgcaaacccaactgcaagtttgtgcctgcagatgggaacgcagcctgcgtgaaggtgctccgggacattgagcctggggacgaggtgacatgcttctacggcgagggcttcttcggcgagaagaatgagcactgtgaatgccacacctgtgagaggaaaggtgaaggagctttccgaaccaggcctagggagcccgcgttgccaccacggcccctggacaagtaccagctgcgtgagaccaagcggcggctgcagcaaggcctggacagtggcagccgacagggcctgctgggccctcgggcctgcgtgcacccatccccgctgcgccgggacccattctgcgccgcctgccagcccctgcgcctgccagcctgcagcgcccgcccagacacctcacccctctggctccagtggctgcctcagccccagccccgagtgcggccccggaagcgccgacgcccccggccccggagggccccagtgctctccacccaccacgctgcccgcgtctccctgcaccgatggggaggctgtggcccccactgccgcctgcgaggagaggccctggtggccctgggccagcccccccacgcccgctgggcccctcagcaggactggcactgggcccggcgctatgggctgccttacgtggtgcgtgtggaccttcgtcgcctggccccagccccaccagctaccccagcccctgctgggaccccaggccccatcctgatcccgaagcaggccctcgccttcgcccccttctccccacccaagcgcctacggctggtggtcagccacggctccatcgacctggatgtcggcggtgaagagctgtgacaggccggacggggaggcccagcagggagagagggtctctctcctagctgctacccaggacctccagaaggagcccttggacctctgggagggagctgacccttgactccagcatagctctgaccctggaatggggttggtttggacacccccagggatctgagccctgaccctttgtgactgctgacccctgagccacccccactcccacagggagccccggccatttgctgccctccccacccctgccccagcctcaggactgcaggagccatccgcccccctcagccccttcctccccagggagcaaagccataaggggcaggggccaccccacggcatctccccagaagtacaggcctcaggaggaggtggaactgatgtagggggtggcactccccagagactgccctcacgaggggactgggttcgctctcagctctgcagctgtctgcggtggggggaaggttggggggtgtctggaggcatgttcccctcaccaccccccgtgggtctcagggaggccgggtgtgacctcatctttctcatggtgctatcctggtgctattggggtggggagctccctcccctcccccacaccagaaaggggtatgttgggggcttggaagcacttgaactttttattttattaaaaccttgttataagcagc

SEQ ID NO: 30439 - DNA, 888 bp, Homo sapiens
  source 1..888: mol_type = unassigned DNA
gagagccgaaggaggctgtgggaggtgttggcggcggcggcgcgggcgcctgaggaggaggaggagaagcggatgagatcgtggggctcaccagcgtcccccatggcttctgagtagcgtgggagtggagtcagcaccaagccaggctccccgcgcctgccttgccctcacctgctcctgctctctgccagaggcagcatggtccgcagggcaccatggggcccgacagagtgacagcacgagaactgtgcgagaacgacgacctggccaccagcctcgtcctggacccctacctcggtttccgcacccataagatgaacgtcagcccccggccttgcagggaacaacgcaggcagctgtggtggcaggagcagggaggccagagagccccaggggccaggactcaggatgctgtccagacatgcccaggagaggccgctggttgtcctgtagcccggaagcagaaggaatcaggagggttggctccagggcggcattgagggtgcaccctctggagcacagacctcgatggggcaccccgggaggcatgacaaagggatccagatttttggctccagagtcagaactgagttggggtcctggcgatgccacccctggcctttggtttttcatctcagatggggttggtgaggatctctggaactctgcgggctggtcaagtgtgccggagggttttggacagcgaatgcgtggccctggtctgacaccacacacagacgctgggggggatggaaacaaaaggcggcattcggagaggctctgcagggccagtgtgctccagccaccttgagcacacgagagggcggccagctctccagcgatctagaaccatctggcttcacagaagccatgctgggcatcgacgga

SEQ ID NO: 30440 - DNA, 957 bp, Homo sapiens
  source 1..957: mol_type = unassigned DNA
gggagagaggataaatagcagcgtggcttccctggctcctctctgcatccttcccgaccttcccagcaatatgcatcttgcacgtctggtcggctcctgctccctccttctgctactgggggccctgtctggatgggcggccagcgatgaccccattgagaaggtcattgaagggatcaaccgagggctgagcaatgcagagagagaggtgggcaaggccctggatggcatcaacagtggaatcacgcatgccggaagggaagtggagaaggttttcaacggacttagcaacatggggagccacaccggcaaggagttggacaaaggcgtccaggggctcaaccacggcatggacaaggttgcccatgagatcaaccatggtattggacaagcaggaaaggaagcagagaagcttggccatggggtcaacaacgctgctggacaggccgggaaggaagcagacaaagcggtccaagggttccacactggggtccaccaggctgggaaggaagcagagaaacttggccaaggggtcaaccatgctgctgaccaggctggaaaggaagtggagaagcttggccaaggtgcccaccatgctgctggccaggccgggaaggagctgcagaatgctcataatggggtcaaccaagccagcaaggaggccaaccagctgctgaatggcaaccatcaaagcggatcttccagccatcaaggaggggccacaaccacgccgttagcctctggggcctcggtcaacacgcctttcatcaaccttcccgccctgtggaggagcgtcgccaacatcatgccctaaactggcatccggccttgctgggagaataatgtcgccgttgtcacatcagctgacatgacctggaggggttgggggtgggggacaggtttctgaaatccctgaagggggttgtactgggatttgtgaataaacttgatacacta

SEQ ID NO: 30441 - DNA, 1945 bp, Homo sapiens
  source 1..1945: mol_type = unassigned DNA
tctgcatccttcccgaccttcccagcaatatgcatcttgcacgtctggtcggctcctgctccctccttctgctactgggggccctgtctggatgggcggccagcgatgaccccattgagaaggtcattgaagggatcaaccgagggctgagcaatgcagagagagaggtgggcaaggccctggatggcatcaacagtggaatcacgcatgccggaagggaagtggagaaggttttcaacggacttagcaacatggggagccacaccggcaaggagttggacaaaggcgtccaggggctcaaccacggcatggacaaggttgcccatgagatcaaccatggtattggacaagcaggaaaggaagcagagaagcttggccatggggtcaacaacgctgctggacaggttgggaaggaggcagacaaactgatccatcatggggtccatcacggggccaaccaggcgggaagtgaggcagggaagtttggccagggagtcgacaatgctgcagggcaggctggaaatgaggctgggaggtttggccagggagtccaccatgctgcagggcaggccggaaatgaggctgggaggtttggccagggagtccaccatgctgcagggcaggccggaaatgaggctgggagatttggccagggggcccaccatggtctcagtgagggctggaaggagacagagaagtttggccaggggatccaccatgctgccggtcaggttgggaaggaggcagagaagtttggccagggggcccaccatgctgcggggcaggccggaaatgaggcagggagatttggccagggggtccaccatggtctcagtgagggctggaaggagacagagaagtttggccagggggtccaccatactgctggtcaggttgggaaggaggcagagaagtttggccagggggcccaccatgctgcggggcaggccggaaatgaggcagggagatttggccagggggcccaccatgctgcggggcaggccggaaatgaggctgggaggtttggccagggggtccaccatggtctcagtgagggctggaaggagacagagaagtttggccagggggtccaccatgctgccagtcagtttgggaaggaaacagagaagctcggccatggggtccaccatggggttaatgaggcctggaaggaagcagagaagtttggccagggtgtccaccatgctgcctcgcaggtggggaaggaggaagacagagtggtccaaggcctccatcatggcgttagtcaggctggaagggaggcggggcagtttggccacgacattcaccacacagcagggcaggctgggaaagagggagacatagcagttcatggtgtccaacctggggtccacgaggccgggaaggaggcagggcagtttggccagggagttcaccatacccttgaacaggccgggaaggaagcagacaaagcggtccaagggttccacactggggtccaccaggctgggaaggaagcagagaaacttggccaaggggtcaaccatgctgctgaccaggctggaaaggaagtggagaagcttggccaaggtgcccaccatgctgctggccaggccgggaaggagctgcagaatgctcataatggggtcaaccaagccagcaaggaggccaaccagctgctgaatggcaaccatcaaagcggatcttccagccatcaaggaggggccacaaccacgccgttagcctctggggcctcggtcaacacgcctttcatcaaccttcccgccctgtggaggagcgtcgccaacatcatgccctaaactggcatccggccttgctgggagaataatgtcgccgttgtcacatcagctgacatgacctggaggggttgggggtgggggacaggtttctgaaatccctgaagggggttgtactgggatttgtgaataaacttgatacacta

SEQ ID NO: 30442 - DNA, 593 bp, Homo sapiens
  source 1..593: mol_type = unassigned DNA
ggatgggcggccagcgatgaccccattgagaaggtcattgaagggatcaaccgagggctgagcaatgcagagagagaggtgggcaaggccctggatggcatcaacagtggaatcacgcatgccggaagggaagtggagaaggttttcaacggacttagcaacatggggagccacaccggcaaggagttggacaaaggcgtccaggggctcaaccacggcatggacaaggttgcccatgagatcaaccatggtattggacaagcaggaaaggaagcagagaagcttggccatggggtcaacaacgctgctggacagggcaaccatcaaagcggatcttccagccatcaaggaggggccacaaccacgccgttagcctctggggcctcggtcaacacgcctttcatcaaccttcccgccctgtggaggagcgtcgccaacatcatgccctaaactggcatccggccttgctgggagaataatgtcgccgttgtcacatcagctgacatgacctggaggggttgggggtgggggacaggtttctgaaatccctgaagggggttgtactgggatttgtgaataaacttgatacacta

SEQ ID NO: 30443 - DNA, 865 bp, Homo sapiens
  source 1..865: mol_type = unassigned DNA
gacttggaggcagagacccaagcagctggaggctctgtgtgtggcctggagaccccacaacctccagccggaggcctgaagcatgaggccatgccaggtgccaggagcagcgactggacccagagccatgtggctgtgccctctggccctcaacctcatcttgatggcagcctctggtgctgtgtgcgaagtgaaggacgtttgtgttggaagccctggtatccccggcactcctggatcccacggcctgccaggcagggacgggagagatggtctcaaaggagaccctggccctccaggccccatgggtccacctggagaaatgccatgtcctcctggaaatgatgggctgcctggagcccctggtatccctggagagtgtggagagaagggggagcctggcgagaggggccctccagggcttccagctcatctagatgaggagctccaagccacactccacgactttagacatcaaatcctgcagacaaggggagccctcagtctgcagggctccataatgacagtaggagagaaggtcttctccagcaatgggcagtccatcacttttgatgccattcaggaggcatgtgccagagcaggcggccgcattgctgtcccaaggaatccagaggaaaatgaggccattgcaagcttcgtgaagaagtacaacacatatgcctatgtaggcctgactgagggtcccagccctggagacttccgctactcagacgggacccctgtaaactacaccaactggtaccgaggggagcccgcaggtcggggaaaagagcagtgtgtggagatgtacacagatgggcagtggaatgacaggaactgcctgtactcccgactgaccatctag

SEQ ID NO: 30444 - DNA, 1015 bp, Homo sapiens
  source 1..1015: mol_type = unassigned DNA
ttggaggcagagacccaagcagctggaggctctgtgtgtgggccccatgggtccacctggagaaatgccatgtcctcctggaaatgatgggctgcctggagcccctggtatccctggagagtgtggagagaagggggagcctggcgagaggggccctccagggcttccagctcatctagatgaggagctccaagccacactccacgactttagacatcaaatcctgcagacaaggggagccctcagtctgcagggctccataatgacagtaggagagaaggtcttctccagcaatgggcagtccatcacttttgatgccattcaggaggcatgtgccagagcaggcggccgcattgctgtcccaaggaatccagaggaaaatgaggccattgcaagcttcgtgaagaagtacaacacatatgcctatgtaggcctgactgagggtcccagccctggagacttccgctactcagacgggacccctgtaaactacaccaactggtaccgaggggagcccgcaggtcggggaaaagagcagtgtgtggagatgtacacagatgggcagtggaatgacaggaactgcctgtactcccgactgaccatctgtgagttctgagaggcatttaggccatgggacagggaggacgctctctggccttcggcctccatcctgaggctccacttggtctgtgagatgctagaactccctttcaacagaattcacttgtggctattgggactggaggcacccttagccacttcattcctctgatgggccctgactcttccccataatcactgaccagccttgacactccccttgcaaactctcccagcactgcaccccaggcagccactcttagccttggccttcgacatgagatggagccctccttattccccatctggtccagttccttcacttacagatggcagcagtgaggtcttggggtagaaggaccctccaaagtcacacaaagtgcctgcctcctggtcccctcagctctctctctgc

SEQ ID NO: 30445 - DNA, 2160 bp, Homo sapiens
  source 1..2160: mol_type = unassigned DNA
gagacccaagcagctggaggctctgtgtgtgggtcgctgatttcttggagcctgaaaagaaagagcagcgactggacccagagccatgtggctgtgccctctggccctcaacctcatcttgatggcagcctctggtgctgtgtgcgaagtgaaggacgtttgtgttggaagccctggtatccccggcactcctggatcccacggcctgccaggcagggacgggagagatggtctcaaaggagaccctggccctccaggccccatgggtccacctggagaaatgccatgtcctcctggaaatgatgggctgcctggagcccctggtatccctggagagtgtggagagaagggggagcctggcgagaggggccctccagggcttccagctcatctagatgaggagctccaagccacactccacgactttagacatcaaatcctgcagacaaggggagccctcagtctgcagggctccataatgacagtaggagagaaggtcttctccagcaatgggcagtccatcacttttgatgccattcaggaggcatgtgccagagcaggcggccgcattgctgtcccaaggaatccagaggaaaatgaggccattgcaagcttcgtgaagaagtacaacacatatgcctatgtaggcctgactgagggtcccagccctggagacttccgctactcagacgggacccctgtaaactacaccaactggtaccgaggggagcccgcaggtcggggaaaagagcagtgtgtggagatgtacacagatgggcagtggaatgacaggaactgcctgtactcccgactgaccatctgtgagttctgagaggcatttaggccatgggacagggaggacgctctctggccttcggcctccatcctgaggctccacttggtctgtgagatgctagaactccctttcaacagaattcacttgtggctattgggactggaggcacccttagccacttcattcctctgatgggccctgactcttccccataatcactgaccagccttgacactccccttgcaaactctcccagcactgcaccccaggcagccactcttagccttggccttcgacatgagatggagccctccttattccccatctggtccagttccttcacttacagatggcagcagtgaggtcttggggtagaaggaccctccaaagtcacacaaagtgcctgcctcctggtcccctcagctctctctctgcaacccagtgccatcaggatgagcaatcctggccaagcataatgacagagagaggcagacttcggggaagccctgactgtgcagagctaaggacacagtggagattctctggcactctgaggtctctgtggcaggcctggtcaggctctccatgaggttagaaggccaggtagtgttccagcagggtggtggccaagccaaccccatgattgatgtgtacgattcactcctttgagtctttgaatggcaactcagccccctgacctgaagacagccagcctaggcctctagggtgacctagagccgccttcagatgtgacccgagtaactttcaactgatgaacaaatctgcaccctacttcagatttcagtgggcattcacaccaccccccacaccactggctctgctttctcctttcattaatccattcacccagatatttcattaaaattatcacgtgccaggtcttaggatatgtcgtggggtgggcaaggtaatcagtgacagttgaagatttttttttcccagagcttatgtcttcatctgtgaaatgggaataagatacttgttgctgtcacagttattaccatccccccagctaccaaaattactaccagaactgttactatacacagaggctattgactgagcacctatcatttgccaagaaccttgacaagcacttctaatacagcatattatgtactattcaatctttacacaatgtcacgggaccagtattgtttcctcattttttataaggacactgaagcttggaggagttaaatgttttgagtattattccagagagcaagtggcagaggctggatccaaacccatcttcctggacctgaagcttatgcttccagccaccccactcctgagctgaataaagatgatttaagcttaataaatcgtgaatgtgttca

SEQ ID NO: 30446 - DNA, 2212 bp, Homo sapiens
  source 1..2212: mol_type = unassigned DNA
gacttggaggcagagacccaagcagctggaggctctgtgtgtgggtcgctgatttcttggagcctgaaaagaaagtaacacagcagggatgaggacagatggtgtgagtcagtgagagcagcgactggacccagagccatgtggctgtgccctctggccctcaacctcatcttgatggcagcctctggtgctgtgtgcgaagtgaaggacgtttgtgttggaagccctggtatccccggcactcctggatcccacggcctgccaggcagggacgggagagatggtctcaaaggagaccctggccctccaggccccatgggtccacctggagaaatgccatgtcctcctggaaatgatgggctgcctggagcccctggtatccctggagagtgtggagagaagggggagcctggcgagaggggccctccagggcttccagctcatctagatgaggagctccaagccacactccacgactttagacatcaaatcctgcagacaaggggagccctcagtctgcagggctccataatgacagtaggagagaaggtcttctccagcaatgggcagtccatcacttttgatgccattcaggaggcatgtgccagagcaggcggccgcattgctgtcccaaggaatccagaggaaaatgaggccattgcaagcttcgtgaagaagtacaacacatatgcctatgtaggcctgactgagggtcccagccctggagacttccgctactcagacgggacccctgtaaactacaccaactggtaccgaggggagcccgcaggtcggggaaaagagcagtgtgtggagatgtacacagatgggcagtggaatgacaggaactgcctgtactcccgactgaccatctgtgagttctgagaggcatttaggccatgggacagggaggacgctctctggccttcggcctccatcctgaggctccacttggtctgtgagatgctagaactccctttcaacagaattcacttgtggctattgggactggaggcacccttagccacttcattcctctgatgggccctgactcttccccataatcactgaccagccttgacactccccttgcaaactctcccagcactgcaccccaggcagccactcttagccttggccttcgacatgagatggagccctccttattccccatctggtccagttccttcacttacagatggcagcagtgaggtcttggggtagaaggaccctccaaagtcacacaaagtgcctgcctcctggtcccctcagctctctctctgcaacccagtgccatcaggatgagcaatcctggccaagcataatgacagagagaggcagacttcggggaagccctgactgtgcagagctaaggacacagtggagattctctggcactctgaggtctctgtggcaggcctggtcaggctctccatgaggttagaaggccaggtagtgttccagcagggtggtggccaagccaaccccatgattgatgtgtacgattcactcctttgagtctttgaatggcaactcagccccctgacctgaagacagccagcctaggcctctagggtgacctagagccgccttcagatgtgacccgagtaactttcaactgatgaacaaatctgcaccctacttcagatttcagtgggcattcacaccaccccccacaccactggctctgctttctcctttcattaatccattcacccagatatttcattaaaattatcacgtgccaggtcttaggatatgtcgtggggtgggcaaggtaatcagtgacagttgaagatttttttttcccagagcttatgtcttcatctgtgaaatgggaataagatacttgttgctgtcacagttattaccatccccccagctaccaaaattactaccagaactgttactatacacagaggctattgactgagcacctatcatttgccaagaaccttgacaagcacttctaatacagcatattatgtactattcaatctttacacaatgtcacgggaccagtattgtttcctcattttttataaggacactgaagcttggaggagttaaatgttttgagtattattccagagagcaagtggcagaggctggatccaaacccatcttcctggacctgaagcttatgcttccagccaccccactcctgagctgaataaagatgatttaagcttaataaatcgtgaatgtgttc

SEQ ID NO: 30447 - DNA, 953 bp, Homo sapiens
  source 1..953: mol_type = unassigned DNA
gaggcagagacccaagcagctggaggctctgtgtgtggcctggagaccccacaacctccagccggaggcctgaagcatgaggccatgccaggtgccaggagcagcgactggacccagagccatgtggctgtgccctctggccctcaacctcatcttgatggcagcctctggtgctgtgtgcgaagtgaaggacgtttgtgttggaagccctggtatccccggcactcctggatcccacggcctgccaggcagggacgggagagatggtctcaaaggagaccctggccctccaggccccatgggtccacctggagaaatgccatgtcctcctggaaatgatgggctgcctggagcccctggtatccctggagagtgtggagagaagggggagcctggcgagaggggccctccagggcttccagctcatctagatgaggagctccaagccacactccacgactttagacatcaaatcctgcagacaaggggagccctcagtctgcagggctccataatgacagtaggagagaaggtcttctccagcaatgggcagtccatcacttttgatgccattcaggaggcatgtgccagagcaggcggccgcattgctgtcccaaggaatccagaggaaaatgaggccattgcaagcttcgtgaagaagtacaacacatatgcctatgtaggcctgactgagggtcccagccctggagacttccgctactcagacgggacccctgtaaactacaccaactggtaccgaggggagcccgcaggtcggggaaaagagcagtgtgtggagatgtacacagatgggcagtggaatgacaggaactgcctgtactcccgactgaccatctgtgagttctgagaggcatttaggccatgggacagggaggacgctctctggccttcggcctccatcctgaggctccacttggtctgtgagatgctag

SEQ ID NO: 30448 - DNA, 2141 bp, Homo sapiens
  source 1..2141: mol_type = unassigned DNA
gacttggaggcagagacccaagcagctggaggctctgtgtgtgggagcagcgactggacccagagccatgtggctgtgccctctggccctcaacctcatcttgatggcagcctctggtgctgtgtgcgaagtgaaggacgtttgtgttggaagccctggtatccccggcactcctggatcccacggcctgccaggcagggacgggagagatggtctcaaaggagaccctggccctccaggccccatgggtccacctggagaaatgccatgtcctcctggaaatgatgggctgcctggagcccctggtatccctggagagtgtggagagaagggggagcctggcgagaggggccctccagggcttccagctcatctagatgaggagctccaagccacactccacgactttagacatcaaatcctgcagacaaggggagccctcagtctgcagggctccataatgacagtaggagagaaggtcttctccagcaatgggcagtccatcacttttgatgccattcaggaggcatgtgccagagcaggcggccgcattgctgtcccaaggaatccagaggaaaatgaggccattgcaagcttcgtgaagaagtacaacacatatgcctatgtaggcctgactgagggtcccagccctggagacttccgctactcagacgggacccctgtaaactacaccaactggtaccgaggggagcccgcaggtcggggaaaagagcagtgtgtggagatgtacacagatgggcagtggaatgacaggaactgcctgtactcccgactgaccatctgtgagttctgagaggcatttaggccatgggacagggaggacgctctctggccttcggcctccatcctgaggctccacttggtctgtgagatgctagaactccctttcaacagaattcacttgtggctattgggactggaggcacccttagccacttcattcctctgatgggccctgactcttccccataatcactgaccagccttgacactccccttgcaaactctcccagcactgcaccccaggcagccactcttagccttggccttcgacatgagatggagccctccttattccccatctggtccagttccttcacttacagatggcagcagtgaggtcttggggtagaaggaccctccaaagtcacacaaagtgcctgcctcctggtcccctcagctctctctctgcaacccagtgccatcaggatgagcaatcctggccaagcataatgacagagagaggcagacttcggggaagccctgactgtgcagagctaaggacacagtggagattctctggcactctgaggtctctgtggcaggcctggtcaggctctccatgaggttagaaggccaggtagtgttccagcagggtggtggccaagccaaccccatgattgatgtgtacgattcactcctttgagtctttgaatggcaactcagccccctgacctgaagacagccagcctaggcctctagggtgacctagagccgccttcagatgtgacccgagtaactttcaactgatgaacaaatctgcaccctacttcagatttcagtgggcattcacaccaccccccacaccactggctctgctttctcctttcattaatccattcacccagatatttcattaaaattatcacgtgccaggtcttaggatatgtcgtggggtgggcaaggtaatcagtgacagttgaagatttttttttcccagagcttatgtcttcatctgtgaaatgggaataagatacttgttgctgtcacagttattaccatccccccagctaccaaaattactaccagaactgttactatacacagaggctattgactgagcacctatcatttgccaagaaccttgacaagcacttctaatacagcatattatgtactattcaatctttacacaatgtcacgggaccagtattgtttcctcattttttataaggacactgaagcttggaggagttaaatgttttgagtattattccagagagcaagtggcagaggctggatccaaacccatcttcctggacctgaagcttatgcttccagccaccccactcctgagctgaataaagatgatttaagcttaataaatcgtgaatgtgttc

SEQ ID NO: 30449 - DNA, 527 bp, Homo sapiens
  source 1..527: mol_type = unassigned DNA
gacccaagcagctggaggctctgtgtgtgggagcagcgactggacccagagccatgtggctgtgccctctggccctcaacctcatcttgatggcagcctctggtgctgtgtgcgaagtgaaggacgtttgtgttggaagccctggtatccccggcactcctggatcccacggcctgccaggcagggacgggagagatggtctcaaaggagaccctggccctccaggccccatgggtccacctggagaaatgccatgtcctcctggaaatgatgggctgcctggagcccctggtatccctggagagtgtggagagaagggggagcctggcgagaggggccctccagggcttccagctcatctagatgaggagctccaagccacactccacgactttagacatcaaatcctgcagacaaggggagccctcagtctgcagggctccataatgacagtaggagagaaggtcttctccagcaatgggcagtccatcacttttgatgccattcaggaggcatgtgccagagca

SEQ ID NO: 30450 - DNA, 596 bp, Homo sapiens
  source 1..596: mol_type = unassigned DNA
cccaagcagctggaggctctgtgtgtgggtcgctgatttcttggagcctgaaaagaaagtaacacagcagggatgaggacagatggtgtgagtcagtgagagcagcgactggacccagagccatgtggctgtgccctctggccctcaacctcatcttgatggcagcctctggtgctgtgtgcgaagtgaaggacgtttgtgttggaagccctggtatccccggcactcctggatcccacggcctgccaggcagggacgggagagatggtctcaaaggagaccctggccctccaggccccatgggtccacctggagaaatgccatgtcctcctggaaatgatgggctgcctggagcccctggtatccctggagagtgtggagagaagggggagcctggcgagaggggccctccagggcttccagctcatctagatgaggagctccaagccacactccacgactttagacatcaaatcctgcagacaaggggagccctcagtctgcagggctccataatgacagtaggagagaaggtcttctccagcaatgggcagtccatcacttttgatgccattcaggaggcatgtgccagagca

SEQ ID NO: 30451 - DNA, 2189 bp, Homo sapiens
  source 1..2189: mol_type = unassigned DNA
gagacccaagcagctggaggctctgtgtgtgggtcgctgatttcttggagcctgaaaagaaggagcagcgactggacccagagccatgtggctgtgccctctggccctcaccctcatcttgatggcagcctctggtgctgcgtgcgaagtgaaggacgtttgtgttggaagccctggtatccccggcactcctggatcccacggcctgccaggcagggacgggagagatggtgtcaaaggagaccctggccctccaggccccatgggtccgcctggagaaacaccatgtcctcctgggaataatgggctgcctggagcccctggtgtccctggagagcgtggagagaagggggaggctggcgagagaggccctccagggcttccagctcatctagatgaggagctccaagccacactccacgacttcagacatcaaatcctgcagacaaggggagccctcagtctgcagggctccataatgacagtaggagagaaggtcttctccagcaatgggcagtccatcacttttgatgccattcaggaggcatgtgccagagcaggcggccgcattgctgtcccaaggaatccagaggaaaatgaggccattgcaagcttcgtgaagaagtacaacacatatgcctatgtaggcctgactgagggtcccagccctggagacttccgctactcagatgggacccctgtaaactacaccaactggtaccgaggggagcctgcaggtcggggaaaagagcagtgtgtggagatgtacacagatgggcagtggaatgacaggaactgcctgtactcccgactgaccatctgtgagttctgagaggcatttaggccatgggacagggaggatcctgtctggccttcagtttccatccccaggatccacttggtctgtgagatgctagaactccctttcaacagaattcacttgtggctattagagctggaggcacccttagccacttcattcccctgatgggccctgactcttccccataatcactgaccagccttgacactccccttgcaaaccatcccagcactgcaccccaggcagccactcctagccttggcctttggcatgagatggaggcctccttattccccatctggtccagttccttcacttacagatggcagcagtgaggccttggggtagaaggatcctccaaagtcacacagagtgcctgcctcctggtcccctcagctctgcctctgcagcccactgcctgcccagtgccatcaggatgagcagtaccggccaagcataatgacagagagaggcagatttcagggaagccctgactgtgtggagctaaggacacagtggagattctctggcactctgaggtctctgtggcaggcctggtcaggctctccaggtggtcagagggcccagtggtgccccagcacggtggtgcccaagccaaccctgtgactgacatgtacgattcactcctttgagtctttggatgccaactcagccccctgacctggaggcagccggccaaggcctctagggaagagccccccactgcagacatgacccgagtaactttctgctgatgaacaaatctgcaccccacttcagacctcggtgggcattcacaccaccccccatgccaccggctccactttccccttttattaatacattcacccagataatcattaaaattaacatgtgccaggtcttaggatgtgtcttggggtgggcacagtacccggtgactcttggggatatttatttattttccctgagcctatatcttcatctgtgaaatggggataaaaatacttgttgctgtcacaattattaccatctctccagctagcaaaattactaccagagccgttactacacacaaaggctattgaccgagcacataccatgtgccacacaccttgacaaaatcttttaatacagtttattatgtactattcaatctttacacaatgtcacgggaccagtattgtttacccaattttttataaggacactgaagcttagaggagtgaaatgttttgagtgttatttcagagagcaaatggcaaagactggatccaaacccatcttcctggacctgaagttcatgctcccagccaccccacccctgagctgaataaagatgatttaagcataataaatcgttagtgtgttcacatgagtttccata

SEQ ID NO: 30452 - DNA, 1425 bp, Homo sapiens
  source 1..1425: mol_type = unassigned DNA
cagagacccaagcagctggaggctctgtgtgtgggagcagcgactggacccagagccatgtggctgtgccctctggccctcaccctcatcttgatggcagcctctggtgctgcgtgcgaagtgaaggacgtttgtgttggaagccctggtatccccggcactcctggatcccacggcctgccaggcagggacgggagagatggtgtcaaaggagaccctggccctccaggccccatgggtccgcctggagaaacaccatgtcctcctgggaataatgggctgcctggagcccctggtgtccctggagagcgtggagagaagggggaggctggcgagagaggccctccagggcttccagctcatctagatgaggagctccaagccacactccacgacttcagacatcaaatcctgcagacaaggggagccctcagtctgcagggctccataatgacagtaggagagaaggtcttctccagcaatgggcagtccatcacttttgatgccattcaggaggcatgtgccagagcaggcggccgcattgctgtcccaaggaatccagaggaaaatgaggccattgcaagcttcgtgaagaagtacaacacatatgcctatgtaggcctgactgagggtcccagccctggagacttccgctactcagatgggacccctgtaaactacaccaactggtaccgaggggagcctgcaggtcggggaaaagagcagtgtgtggagatgtacacagatgggcagtggaatgacaggaactgcctgtactcccgactgaccatctgtgagttctgagaggcatttaggccatgggacagggaggatcctgtctggccttcagtttccatccccaggatccacttggtctgtgagatgctagaactccctttcaacagaattcacttgtggctattagagctggaggcacccttagccacttcattcccctgatgggccctgactcttccccataatcactgaccagccttgacactccccttgcaaaccatcccagcactgcaccccaggcagccactcctagccttggcctttggcatgagatggaggcctccttattccccatctggtccagttccttcacttacagatggcagcagtgaggccttggggtagaaggatcctccaaagtcacacagagtgcctgcctcctggtcccctcagctctgcctctgcagcccactgcctgcccagtgccatcaggatgagcagtaccggccaagcataatgacagagagaggcagatttcagggaagccctgactgtgtggagctaaggacacagtggagattctctggcactctgaggtctctgtggcaggcctggtcaggctctccaggtggtcagagggcccagtggtgccccagcacggtggtgcccaagccaaccctgtgactg

SEQ ID NO: 30453 - DNA, 726 bp, Homo sapiens
  source 1..726: mol_type = unassigned DNA
cagagacccaagcagctggaggctctgtgtgtggatccatccctaccagggactcagcagggcctaagcagggggagtgggagaacagaccccaagaggaaggaagacctcatcactgactgtgagagggtcatcaccccccgatgatcaccttgaagggtccaggctgtgggccctattcatctcttttcattctcaggtcgctgatttcttggagcctgaaaagaaggagcagcgactggacccagagccatgtggctgtgccctctggccctcaccctcatcttgatggcagcctctggtgctgcgtgcgaagtgaaggacgtttgtgttggaagccctggtatccccggcactcctggatcccacggcctgccaggcagggacgggagagatggtgtcaaaggagaccctggccctccaggccccatgggtccgcctggagaaacaccatgtcctcctgggaataatgggctgcctggagcccctggtgtccctggagagcgtggagagaagggggaggctggcgagagaggccctccagggcttccagctcatctagatgaggagctccaagccacactccacgacttcagacatcaaatcctgcagacaaggggagccctcagtctgcagggctccataatgacagtaggagagaaggtcttctccagcaatgggcagtccatcacttttgatgccattcaggaggcatgtgccagagca

SEQ ID NO: 30454 - DNA, 2002 bp, Homo sapiens
  source 1..2002: mol_type = unassigned DNA
atgaggccatgccaggtgccaggagcagcgactggacccagagccatgtggctgtgccctctggccctcaccctcatcttgatggcagcctctggtgctgcgtgcgaagtgaaggacgtttgtgttggaagccctggtatccccggcaagcgtggagagaagggggaggctggcgagagaggccctccagggcttccagctcatctagatgaggagctccaagccacactccacgacttcagacatcaaatcctgcagacaaggggagccctcagtctgcagggctccataatgacagtaggagagaaggtcttctccagcaatgggcagtccatcacttttgatgccattcaggaggcatgtgccagagcaggcggccgcattgctgtcccaaggaatccagaggaaaatgaggccattgcaagcttcgtgaagaagtacaacacatatgcctatgtaggcctgactgagggtcccagccctggagacttccgctactcagatgggacccctgtaaactacaccaactggtaccgaggggagcctgcaggtcggggaaaagagcagtgtgtggagatgtacacagatgggcagtggaatgacaggaactgcctgtactcccgactgaccatctgtgagttctgagaggcatttaggccatgggacagggaggatcctgtctggccttcagtttccatccccaggatccacttggtctgtgagatgctagaactccctttcaacagaattcacttgtggctattagagctggaggcacccttagccacttcattcccctgatgggccctgactcttccccataatcactgaccagccttgacactccccttgcaaaccatcccagcactgcaccccaggcagccactcctagccttggcctttggcatgagatggaggcctccttattccccatctggtccagttccttcacttacagatggcagcagtgaggccttggggtagaaggatcctccaaagtcacacagagtgcctgcctcctggtcccctcagctctgcctctgcagcccactgcctgcccagtgccatcaggatgagcagtaccggccaagcataatgacagagagaggcagatttcagggaagccctgactgtgtggagctaaggacacagtggagattctctggcactctgaggtctctgtggcaggcctggtcaggctctccaggtggtcagagggcccagtggtgccccagcacggtggtgcccaagccaaccctgtgactgacatgtacgattcactcctttgagtctttggatgccaactcagccccctgacctggaggcagccggccaaggcctctagggaagagccccccactgcagacatgacccgagtaactttctgctgatgaacaaatctgcaccccacttcagacctcggtgggcattcacaccaccccccatgccaccggctccactttccccttttattaatacattcacccagataatcattaaaattaacatgtgccaggtcttaggatgtgtcttggggtgggcacagtacccggtgactcttggggatatttatttattttccctgagcctatatcttcatctgtgaaatggggataaaaatacttgttgctgtcacaattattaccatctctccagctagcaaaattactaccagagccgttactacacacaaaggctattgaccgagcacataccatgtgccacacaccttgacaaaatcttttaatacagtttattatgtactattcaatctttacacaatgtcacgggaccagtattgtttacccaattttttataaggacactgaagcttagaggagtgaaatgttttgagtgttatttcagagagcaaatggcaaagactggatccaaacccatcttcctggacctgaagttcatgctcccagccaccccacccctgagctgaataaagatgatttaagcataataaatcgttagtgtgttcacatgagtttccata

SEQ ID NO: 30455 - DNA, 3664 bp, Homo sapiens
  source 1..3664: mol_type = unassigned DNA
tgtaaatgctcttctgactaatgcaaaccatgtgtccatagaaccagaagatttttccaggggaaaagagcccccacgccccgcccagctataaggggccatgcaccaagcagggtacccaggctgcagaggtgccatggctgagtcacacctgctgcagtggctgctgctgctgctgcccacgctctgtggcccaggcactgctgcctggaccacctcatccttggcctgtgcccagggccctgagttctggtgccaaagcctggagcaagcattgcagtgcagagccctagggcattgcctacaggaagtctggggacatgtgggagccgatgacctatgccaagagtgtgaggacatcgtccacatccttaacaagatggccaaggaggccattttccaggacacgatgaggaagttcctggagcaggagtgcaacgtcctccccttgaagctgctcatgccccagtgcaaccaagtgcttgacgactacttccccctggtcatcgactacttccagaaccagactgactcaaacggcatctgtatgcacctgggcctgtgcaaatcccggcagccagagccagagcaggagccagggatgtcagaccccctgcccaaacctctgcgggaccctctgccagaccctctgctggacaagctcgtcctccctgtgctgcccggggccctccaggcgaggcctgggcctcacacacaggatctctccgagcagcaattccccattcctctcccctattgctggctctgcagggctctgatcaagcggatccaagccatgattcccaagggtgcgctagctgtggcagtggcccaggtgtgccgcgtggtacctctggtggcgggcggcatctgccagtgcctggctgagcgctactccgtcatcctgctcgacacgctgctgggccgcatgctgccccagctggtctgccgcctcgtcctccggtgctccatggatgacagcgctggcccaaggtcgccgacaggagaatggctgccgcgagactctgagtgccacctctgcatgtccgtgaccacccaggccgggaacagcagcgagcaggccataccacaggcaatgctccaggcctgtgttggctcctggctggacagggaaaagtgcaagcaatttgtggagcagcacacgccccagctgctgaccctggtgcccaggggctgggatgcccacaccacctgccaggccctcggggtgtgtgggaccatgtccagccctctccagtgtatccacagccccgacctttgatgagaactcagctgtccagctgcaaaggaaaagccaagtgagacgggctctgggaccatggtgaccaggctcttcccctgctccctggccctcgccagctgccaggctgaaaagaagcctcagctcccacaccgccctcctcaccgcccttcctcggcagtcacttccactggtggaccacgggcccccagccctgtgtcggccttgtctgtctcagctcaaccacagtctgacaccagagcccacttccatcctctctggtgtgaggcacagcgagggcagcatctggaggagctctgcagcctccacacctaccacgacctcccagggctgggctcaggaaaaaccagccactgctttacaggacagggggttgaagctgagccccgcctcacacccacccccatgcactcaaagattggattttacagctacttgcaattcaaaattcagaagaataaaaaatgggaacatacagaactctaaaagatagacatcagaaattgttaagttaagctttttcaaaaaatcagcaattccccagcgtagtcaagggtggacactgcacgctctggcatgatgggatggcgaccgggcaagctttcttcctcgagatgctctgctgcttgagagctattgctttgttaagatataaaaaggggtttctttttgtctttctgtaaggtggacttccagcttttgattgaaagtcctagggtgattctatttctgctgtgatttatctgctgaaagctcagctggggttgtgcaagctagggacccattcctgtgtaatacaatgtctgcaccaatgctaataaagtcctattctcttttatgagaaagaaaaagacaccgtcctttaaagtgctgcagtatggccagacgtggtggctcacacctgcaatcccagcaccttaggaggccgaggcaggaggatccttgaggtcaggagttcgagaccagcctcgccaacatggtgaaaccccatttctactaaaaatacaaaaaattagccaagtgtggtggcatatgcctgtaatcccaactactcagaaggccgaggcaggagaattacttgaacgcaggagaatcactgcagcccaggaggcagaggttgcagtgagccgagattgcaccactgcactccagcctgggtgacagagcaagactccatctcagtaaataaataaataaataaaaagcgctgcagtagctgtggcctcaccctgaagtcagcgggcccaggcctacctcactctctcccttggcagagaagcagacgtccatagctcctctccctcacaagcgctcccagcctgccctccagctgctgctctcccctcccagtctctactcactgggatgaggttaggtcatgaggacaccaaaaacctaaaaataaacaaaaagccaaacaagccttagcttttcttaaagactgaaatgcctggaagtgtccctttatttataaaataacttttgtcatatttcttatacatgtttcttgtaagaaattcagaaactacagacaaagagagtggaaattacccactgtcaggcctctgagcccaagctaagccatcatatcccctgtgccctgcacgtatacacccagatggcctgaagcaactgaagatccacaaaagaagtgaaaatagccagttcctgccttaactgatgacattccaccattgtgatttgttcctgccccaccctaactgatcaattgaccttgtgacaatacaccttccccacccttgagaaggtgctttgtaatattctccccacccaccccacgcccgcacccccgcacccttaagaaggtattttgtaatattctctccgccattgagaatgtgctttgtaagatccaccccctgcccacaaaaaattgctcctaactccaccgcctatcccaaacctacaagaactaatgataatcccaccaccctttgctgactctttttggactcagcccacctgcacccaggtgattaaaaagctttattgttcacacaaagcctgtttggtagtctcttcacagggaagcatgtgacacccacaatcccacctagcccaggagagagctacggcagggtgtgtgttttgacactgagcttggggctttttccatcttctccccacagcctctggctccacacctccaccgttcaagcgccagaaagagctgtctatgcagcctgctcttgggcctggggatgagacacacaattcattggctcctggattttaagtagacatttgtaaatctatagctaactactgtccttaaagccattgtttccattacaaaatccaactctctgagagaaaagggtgttttaaatttaaaaaaataaaaacaaaaaagtttgattg

SEQ ID NO: 30456 - DNA, 1281 bp, Homo sapiens
  source 1..1281: mol_type = unassigned DNA
tttgcttggagctcctggggcctaacaaaaagaaacctgccatgctgctcttcctcctctctgcactggtcctgctcacacagcccctgggctacctggaagcagaaatgaagacctactcccacagaacaatgcccagtgcttgcaccctggtcatgtgtagctcagtggagagtggcctgcctggtcgcgatggacgggatgggagagagggccctcggggcgagaagggggacccaggtttgccaggagctgcagggcaagcagggatgcctggacaagctggcccagttgggcccaaaggggacaatggctctgttggagaacctggaccaaagggagacactgggccaagtggacctccaggacctcccggtgtgcctggtccagctggaagagaaggtcccctggggaagcaggggaacataggacctcagggcaagccaggcccaaaaggagaagctgggcccaaaggagaagtaggtgccccaggcatgcagggctcggcaggggcaagaggcctcgcaggccctaagggagagcgaggtgtccctggtgagcgtggagtccctggaaacacaggggcagcagggtctgctggagccatgggtccccagggaagtccaggtgccaggggacccccgggattgaagggggacaaaggcattcctggagacaaaggagcaaagggagaaagtgggcttccagatgttgcttctctgaggcagcaggttgaggccttacagggacaagtacagcacctccaggctgctttctctcagtataagaaagttgagctcttcccaaatggccaaagtgtcggggagaagattttcaagacagcaggctttgtaaaaccatttacggaggcacagctgctgtgcacacaggctggtggacagttggcctctccacgctctgccgctgagaatgccgccttgcaacagctggtcgtagctaagaacgaggctgctttcctgagcatgactgattccaagacagagggcaagttcacctaccccacaggagagtccctggtctattccaactgggccccaggggagcccaacgatgatggcgggtcagaggactgtgtggagatcttcaccaatggcaagtggaatgacagggcttgtggagaaaagcgtcttgtggtctgcgagttctgagccaactggggtgggtggggcagtgcttggcccaggagtttggccagaagtcaaggcttagaccctcatgctgccaatatcctaataaaaaggtgaccatctgtgccgggaa

SEQ ID NO: 30457 - DNA, 659 bp, Homo sapiens
  source 1..659: mol_type = unassigned DNA
agacatgtttctcagcacctccaaacatgggcggcaagaggccatgctgctcttcctcctctctgcactggtcctgctcacacagcccctgggctacctggaagcagaaatgaagacctactcccacagaacaatgcccagtgcttgcaccctggtcatgtgtagctcagtggagagtggcctgcctggtcgcgatggacgggatgggagagagggccctcggggcgagaagggggacccaggtttgccaggagctgcagggcaagcagggatgcctggacaagctggcccagttgggcccaaaggggacaatggctctgttggagaacctggaccaaagggagacactgggccaagtggacctccaggacctcccggtgtgcctggtccagctggaagagaaggtcccctggggaagcaggggaacataggacctcagggcaagccaggcccaaaaggagaagctgggcccaaaggagaagtaggtgccccaggcatgcagggctcggcaggggcaagaggcctcgcaggccctaagggagagcgaggtgtccctggtgagcgtggagtccctggaaacacaggggcagcagggtctgctggagccatgggtccccagggaagtccaggtgccaggggacccccgggattgaaggggg

SEQ ID NO: 30458 - DNA, 1093 bp, Homo sapiens
  source 1..1093: mol_type = unassigned DNA
gcgtcccggaagcgcccgcggggccgggtgcgatggcggcggtggctgcgttgcagctggggctgcgggcggcggggctgggacgggccccggccagcgccgcctggaggagcgtcctcagggtctccccgcgcccaggggtggcctggaggccaagcagatgtggcagttctgcagcagaagcatctgccacaaaagcggaagatgactcctttcttcagtgggtcctgctcctcatccctgtgactgcctttggcttggggacatggcaggtccagcgtcggaagtggaagctgaacctgattgcagagttggagtccagagttctggctgagcctgtccctctgccagccgacccaatggaactgaaaaatctggagtataggccagtgaaggtcagggggtgctttgaccattccaaggagctgtatatgatgccccggaccatggtggaccctgtccgggaggcccgggagggcggcctcatctcctcctcaactcagagtggggcctatgtggtcactcccttccactgcaccgacctgggagtcaccatcctggtaaatagagggttcgttcccaggaagaaagtgaatcctgaaacccggcagaaaggccagattgagggagaagtggacctcattgggatggtgaggctgacagaaaccaggcagccttttgtccctgagaacaatccagaaaggaaccactggcattatcgagacctggaagctatggccagaatcacaggcgcagagcccatcttcattgatgccaacttccagagcacagtccctggaggacccattggagggcaaaccagagttactctgaggaacgagcatctgcagtacatcgtgacctggtatggactctctgcagctacatcctacctgtggtttaagaaattcctacgtgggacacctggtgtgtgacagatcagctgctgaagccctgtccctggataatgcagtatttcaagactgcctttatgctggatcatgtgctactggtataaagttctggccttctaccttaaatgagctcatgactggttcatcataaaatcctggcttggtttcagtccaaagaa

SEQ ID NO: 30459 - DNA, 813 bp, Homo sapiens
  source 1..813: mol_type = unassigned DNA
gccccggccagcgccgcctggaggagcgtcctcagggtctccccgcgcccaggggtggcctggaggccaagcagatgtggcagttctgcagcagaagcatctgccacaaaagcggaagatgactcctttcttcagtgggtcctgctcctcatccctgtgactgcctttggcttggggacatggcaggtccagcgtcggaagtggaagctgaacctgattgcagagttggagtccagagttctggctgagcctgtccctctgccagccgacccaatggaactgaaaaatctggagtataggccagtgaaggtcagggggtgctttgaccattccaaggagctgtatatgatgccccggaccatggtggaccctgtccgggaggcccgggagggcggcctcatctcctcctcaactcagagtggggcctatgtggtcactcccttccactgcaccgacctggggaagaaagtgaatcctgaaacccggcagaaaggccagattgagggagaagtggacctcattgggatggtgaggctgacagaaaccaggcagccttttgtccctgagaacaatccagaaaggaaccactggcattatcgagacctggaagctatggccagaatcacaggcgcagagcccatcttcattgatgccaacttccagagcacagtccctggaggacccattggagggcaaaccagagttactctgaggaacgagcatctgcagtacatcgtgacctggtatggactctctgcagctacatcctacctgtggtttaagaaattcctacgtgggacacctggtgtgtga

SEQ ID NO: 30460 - DNA, 842 bp, Homo sapiens
  source 1..842: mol_type = unassigned DNA
gcgagcggcttccgccgggctgctccgcgggcgcgtcggccatgagcgagttgccgggcgacgtgcgggcgtttctgcgggagcacccgagcctgcggctccagacggacgcccgcaaggtgaggtgcatcctgacaggtcacgagctgccctgccgcctgccggagctccaggtctacacccgcggcaaaaagtaccagcggctggtccgcgcctccccggccttcgactatgcagagttcgagccgcacatcgtgcccagcaccaagaacccgcaccagttgttctgcaaactcaccctgcggcacatcaacaagtgcccagaacacgtgctgaggcacacccagggccggcggtaccagcgagctctgtgtaaatatgaagaatgtcagaagcaaggggtggagtacgtgcctgcctgcctggtgcaccggaggaggaggagggaggaccagatggacggtgacgggcctcgcccgcgggaagccttctgggagcccacatccagtgatgaggggggagctgcaagtgatgacagcatgacagacctgtacccacctgagctattcaccagaaaggaccttggaagcacggaggatggggatggcactgatgactttttgacagacaaagaggatgagaaggcaaagcccccaagagagaaggccactgatgagagcaggagagagacgaccgtgtaccgagggctggtccagaagcgcgggaagaagcagttgggctcgttgaaaaagaagttcaagagtcatcaccgcaaacccaagagcttcagctcctgtaaacagccaggttaataaaagcacatgccgtgaagtttcgagaaa

SEQ ID NO: 30461 - DNA, 2984 bp, Homo sapiens
  source 1..2984: mol_type = unassigned DNA
ggagccgcagccgacgcggagcgaggccggccgccgggcacttcctgtggaggccgcagcgggtgcgggcgccgacgggcgagagccagcgagcgagcgagcgagccgagccgagcctcccgccgtcgccatgggccagaacgacctgatgggcacggccgaggacttcgccgaccagttcctccgtgtcacaaagcagtacctgccccacgtggcgcgcctctgtctgatcagcaccttcctggaggacggcatccgtatgtggttccagtggagcgagcagcgcgactacatcgacaccacctggaactgcggctacctgctggcctcgtccttcgtcttcctcaacttgctgggacagctgactggctgcgtcctggtgttgagcaggaacttcgtgcagtacgcctgcttcgggctctttggaatcatagctctgcagacgattgcctacagcattttatgggacttgaagtttttgatgaggaacctggccctgggaggaggcctgttgctgctcctagcagaatcccgttctgaagggaagagcatgtttgcgggcgtccccaccatgcgtgagagctcccccaaacagtacatgcagctcggaggcagggtcttgctggttctgatgttcatgaccctccttcactttgacgccagcttcttttctattgtccagaacatcgtgggcacagctctgatgattttagtggccattggttttaaaaccaagctggctgctttgactcttgttgtgtggctctttgccatcaacgtatatttcaacgccttctggaccattccagtctacaagcccatgcatgacttcctgaaatacgacttcttccagaccatgtcggtgattgggggcttgctcctggtggtggccctgggccctgggggtgtctccatggatgagaagaagaaggagtggtaacagtcacagatccctacctgcctggctaagacccgtggccgtcaaggactggttcggggtggattcaacaaaactgccagcttttatgtatcctcttcccttcccctcccttggtaaaggcacagatgttttgagaactttatttgcagagacacctgagaatcgatggctcagtctgctctggagccacagtctggcgtctgacccttcagtgcaggccagcctggcagctggaagcctcccccacgccgaggctttggagtgaacagcccgcttggctgtggcatctcagtcctatttttgagtttttttgtgggggtacaggagggggccttcaagctgtactgtgagcagacgcattggtattatcattcaaagcagtctccctcttatttgtaagtttacatttttagcggaaactactaaattattttgggtggttcagccaaacctcaaaacagttaatctccctggtttaaaatcacaccagtggctttgatgttgtttctgccccgcattgtattttataggaatagtgaaaacatttagggacacccaaagaatgatgcagtattaaaggggtggtagaagctgctgtttatgataaaagtcatcggtcagaaaatcagcttggattggtgccaagtgttttattgggtaacaccctgggagttttagtagcttgaggcaaggtggaggggcaagaagtccttggggaagctgctggtctgggtgctgctggcctccaagctggcagtgggaagggctagtgagaccacacaggggtagccccagcagcagcaccctgcaagccagcctggccagctgctcagaccagcttgcagagccgcagccgctgtgggcagggggtgtggcaggagctcccagcactggagacccacggactcaacccagttacctcacatggggccttttctgagcaaggtctcgaaagcgcaggccgccctggctgagcagcaccgccctttcccagctgcactcgccctgtggacagccccgacacaccactttcctgaggctgtcgctcactcagattgtccgtttgctatgccgaatgcagccaaaattcctttttacaatttgtgatgccttaccgatttgatcttaatcctgtatttaaagttttctaacactgccttatactgtgtttctctttttgggggagcttaactgcttgttgctccctgtcgtctgcaccatagtaaatgccacaagggtagtcgaacacctctctggcccctagacctatctggggacaggctggctcagcctgtctccagggctgctgcggcccagccccgagcctgcctccctcttggcctctcatccattggctctgcagggcaggggtgaggcaggtttctgctcataagtgcttttggaagtcacctacctttttaacacagccgaactagtcccaacgcgtttgcaaatattcccctggtagcctacttccttacccccgaatattggtaagatcgagcaatggcttcaggacatgggttctcttctcctgtgatcattcaagtgctcactgcatgaagactggcttgtctcagtgtttcaacctcaccagggctgtctcttggtccacacctcgctccctgttagtgccgtatgacagcccccatcaaatgaccttggccaagtcacggtttctctgtggtcaaggttggttggctgattggtggaaagtagggtggaccaaaggaggccacgtgagcagtcagcaccagttctgcaccagcagcgcctccgtcctagtgggtgttcctgtttctcctggccctgggtgggctagggcctgattcgggaagatgcctttgcagggaggggaggataagtgggatctaccaattgattctggcaaaacaatttctaagatttttttgctttatgtgggaaacagatctaaatctcattttatgctgtattttatatcttagttgtgtttgaaaacgttttgatttttggaaacacatcaaaataaataatggcgtttgttgtatgcagtgtgatccta

SEQ ID NO: 30462 - DNA, 715 bp, Homo sapiens
  source 1..715: mol_type = unassigned DNA
cagcgggtgcgggcgccgacgggcgagagccagcgagcgagcgagcgagccgagccgagcctcccgccgtcgccatgggccagaacgacctgatgggcacggccgaggacttcgccgaccagttcctccgtgtcacaaagcagtacctgccccacgtggcgcgcctctgtctgatcagcaccttcctggaggacggcatccgtatgtggttccagtggagcgagcagcgcgactacatcgacaccacctggaactgcggctacctgctggcctcgtccttcgtcttcctcaacttgctgggacagctgactggctgcgtcctggtgttgagcaggaacttcgtgcagtacgcctgcttcgggctctttggaatcatagctctgcagacgattgcctacagcattttatgggacttgaagtttttgatgaggaacctggccctgggaggaggcctgttgctgctcctagcagaatcccgttctgaagggaagagcatgtttgcgggcgtccccaccatgcgtgagagctcccccaaacagtacatgcagctcggaggcagggtcttgctggttctgatgttcatgaccctccttcactttgacgccagcttcttttctcagccgtctcagcagtagctacatcagcctgatggatagagacttcatgacgtgcagcagctggaacttttgtttataaagcatctcttttcctcaca

SEQ ID NO: 30463 - DNA, 2624 bp, Homo sapiens
  source 1..2624: mol_type = unassigned DNA
ggagccgcagccgacgcggagcgaggccggccgccgggcacttcctgtggaggccgcagcgggtgcgggcgccgacgggcgagagccagcgagcgagcgagcgagccgagccgagcctcccgccgtcgccatgggccagaacgacctgatgggcacggccgaggacttcgccgaccagttcctccgtgtcacaaagcagtacctgccccacgtggcgcgcctctgtctgatcagcaccttcctggaggacggcatccgtatgtggttccagtggagcgagcagcgcgactacatcgacaccacctggaactgcggctacctgctggcctcgtccttcgtcttcctcaacttgctgggacagctgactggctgcgtcctggtgttgagcaggaacttcgtgcagtacgcctgcttcgggctctttggaatcatagctctgcagacgattgcctacagcattttatgggacttgaagtttttgatgaggaacctggccctgggaggaggcctgttgctgctcctagcagaatcccgttctgaagggaagagcatgtttgcgggcgtccccaccatgcgtgagagctcccccaaacatacctgcctggctaagacccgtggccgtcaaggactggttcggggtggattcaacaaaactgccagcttttatgtatcctcttcccttcccctcccttggtaaaggcacagatgttttgagaactttatttgcagagacacctgagaatcgatggctcagtctgctctggagccacagtctggcgtctgacccttcagtgcaggccagcctggcagctggaagcctcccccacgccgaggctttggagtgaacagcccgcttggctgtggcatctcagtcctatttttgagtttttttgtgggggtacaggagggggccttcaagctgtactgtgagcagacgcattggtattatcattcaaagcagtctccctcttatttgtaagtttacatttttagcggaaactactaaattattttgggtggttcagccaaacctcaaaacagttaatctccctggtttaaaatcacaccagtggctttgatgttgtttctgccccgcattgtattttataggaatagtgaaaacatttagggacacccaaagaatgatgcagtattaaaggggtggtagaagctgctgtttatgataaaagtcatcggtcagaaaatcagcttggattggtgccaagtgttttattgggtaacaccctgggagttttagtagcttgaggcaaggtggaggggcaagaagtccttggggaagctgctggtctgggtgctgctggcctccaagctggcagtgggaagggctagtgagaccacacaggggtagccccagcagcagcaccctgcaagccagcctggccagctgctcagaccagcttgcagagccgcagccgctgtgggcagggggtgtggcaggagctcccagcactggagacccacggactcaacccagttacctcacatggggccttttctgagcaaggtctcgaaagcgcaggccgccctggctgagcagcaccgccctttcccagctgcactcgccctgtggacagccccgacacaccactttcctgaggctgtcgctcactcagattgtccgtttgctatgccgaatgcagccaaaattcctttttacaatttgtgatgccttaccgatttgatcttaatcctgtatttaaagttttctaacactgccttatactgtgtttctctttttgggggagcttaactgcttgttgctccctgtcgtctgcaccatagtaaatgccacaagggtagtcgaacacctctctggcccctagacctatctggggacaggctggctcagcctgtctccagggctgctgcggcccagccccgagcctgcctccctcttggcctctcatccattggctctgcagggcaggggtgaggcaggtttctgctcataagtgcttttggaagtcacctacctttttaacacagccgaactagtcccaacgcgtttgcaaatattcccctggtagcctacttccttacccccgaatattggtaagatcgagcaatggcttcaggacatgggttctcttctcctgtgatcattcaagtgctcactgcatgaagactggcttgtctcagtgtttcaacctcaccagggctgtctcttggtccacacctcgctccctgttagtgccgtatgacagcccccatcaaatgaccttggccaagtcacggtttctctgtggtcaaggttggttggctgattggtggaaagtagggtggaccaaaggaggccacgtgagcagtcagcaccagttctgcaccagcagcgcctccgtcctagtgggtgttcctgtttctcctggccctgggtgggctagggcctgattcgggaagatgcctttgcagggaggggaggataagtgggatctaccaattgattctggcaaaacaatttctaagatttttttgctttatgtgggaaacagatctaaatctcattttatgctgtattttatatcttagttgtgtttgaaaacgttttgatttttggaaacacatcaaaataaataatggcgtttgttgtatgcagtgtgatccta

SEQ ID NO: 30464 - DNA, 1465 bp, Homo sapiens
  source 1..1465: mol_type = unassigned DNA
ggcgtttggagctgctggggggtccccgcacgtttttcctctcactggggctcccggaggcgggctgggagctcggggacgaacgggggccgggggtcctcccagaggaaagggggcgcgctggcgtgcgccccagctacaggaagccacagcaccttttccttttctctttcccagatgtgctggactcttggggtccctttgaccctgtctgcgtctccctccccgtttggactctgccctgggctggattgagtggggacctgtacacagcctgggaggaggggaagcctatctccctgatagtctccttccagaagtgtccaggtggcattctgagcaacagaaaacaagagcaaaactgaagtgacaagatttgaccagaaagtgtgggctgctgaaagcaagacctaatgtgaagagaaagtggagttttctgtgtggcgtgggagctgcaggtggctgtgacagtgatcactggatgcccaggaagtcatctcaggcccctcagatgctgtcactgcttatgaaccatatcctgcttgatggcgcggttctcggagagacttaatgagaagcttggccacagagttcctccgtgtcacaaagcagtacctgccccacgtggcgcgcctctgtctgatcagcaccttcctggaggacggcatccgtatgtggttccagtggagcgagcagcgcgactacatcgacaccacctggaactgcggctacctgctggcctcgtccttcgtcttcctcaacttgctgggacagctgactggctgcgtcctggtgttgagcaggaacttcgtgcagtacgcctgcttcgggctctttggaatcatagctctgcagacgattgcctacagcattttatgggacttgaagtttttgatgaggaacctggccctgggaggaggcctgttgctgctcctagcagaatcccgttctgaagggaagagcatgtttgcgggcgtccccaccatgcgtgagagctcccccaaacagtacatgcagctcggaggcagggtcttgctggttctgatgttcatgaccctccttcactttgacgccagcttcttttctattgtccagaacatcgtgggcacagctctgatgattttagtggccattggttttaaaaccaagctggctgctttgactcttgttgtgtggctctttgccatcaacgtatatttcaacgccttctggaccattccagtctacaagcccatgcatgacttcctgaaatacgacttcttccagaccatgtcggtgattgggggcttgctcctggtggtggccctgggccctgggggtgtctccatggatgagaagaagaaggagtggtaacagtcacagatccctacctgcctggctaagacccgtggccgtcaaggactggttcggggtggattcaacaaaactgccagcttttatgtatcctcttcccttcccctccctt

SEQ ID NO: 30465 - DNA, 1018 bp, Homo sapiens
  source 1..1018: mol_type = unassigned DNA
cttcctgtggaggccgcagcgggtgcgggcgccgacgggcgagagccagcgagcgagcgagcgagccgagccgagcctcccgccgtcgccatgggccagaacgacctgatgggcacggccgaggacttcgccgaccagttcctccgtgtcacaaagcagtacctgccccacgtggcgcgcctctgtctgatcagcaccttcctggaggacggcatccgtatgtggttccagtggagcgagcagcgcgactacatcgacaccacctggaactgcggctacctgctggcctcgtccttcgtcttcctcaacttgctgggacagctgactggctgcgtcctggtgttgagcaggaacttcgtgcagtacgcctgcttcgggctctttggaatcatagctctgcagacgattgcctacagcattttatgggacttgaagtttttgatgagattgtccagaacatcgtgggcacagctctgatgattttagtggccattggttttaaaaccaagctggctgctttgactcttgttgtgtggctctttgccatcaacgtatatttcaacgccttctggaccattccagtctacaagcccatgcatgacttcctgaaatacgacttcttccagaccatgtcggtgattgggggcttgctcctggtggtggccctgggccctgggggtgtctccatggatgagaagaagaaggagtggtaacagtcacagatccctacctgcctggctaagacccgtggccgtcaaggactggttcggggtggattcaacaaaactgccagcttttatgtatcctcttcccttcccctcccttggtaaaggcacagatgttttgagaactttatttgcagagacacctgagaatcgatggctcagtctgctctggagccacagtctggcgtctgacccttcagtgcaggccagcctggcagctggaagcctcccccacgccgaggctttggagtgaacagcccgcttggctgtggcatctcagtcctatttttgag

SEQ ID NO: 30466 - DNA, 2505 bp, Homo sapiens
  source 1..2505: mol_type = unassigned DNA
gggtgattgaggcactgaggccaggccccgggggtgccctgctgcaccgactccgggcggagattggctgtcctcggcccgcaatgctgtgcgccccgccccgcgcgccgcttccggcggagtcaggcttggctaatcgagcgcgcgggctggcggctcggcgttcgtttggccgcgcctgcccgtgtggtggtttccggcggaggtggtgagagtcgcacgcgcagcggggaaggtgtgagtcgtgaacggcccgggtctccgccatggcctctctactcgccaaggacgcctacctgcagagcctggccaagaagatctgctcccattcggccccggaacagcaggcgcgcacgcgggctggcaaaactcaaggctcagaaactgcagggcccccaaaaaagaaaaggaagaaaacacaaaagaaattccggaagcgagaagagaaggctgctgagcacaaggccaagtccttgggggagaaatctccagcagcctctggggccaggaggcctgaggcagccaaagaggaagcagcttgggcttccagctcagcagggaaccctgcagatggcctggccactgagcctgagtctgtctttgctctggatgttctgcgacagcgactgcatgagaagatccaggaggcccggggccagggcagtgccaaggagctgtcccctgccgccttggagaaaaggcggcggagaaagcaggaacgggaccggaagaagaggaagcgaaaggagctgcgggcgaaagagaaggccaggaaggctgaggaggccacggaggcccaggaggtggtggaggcaaccccagagggggcctgcacggagccgcgggagccgcccgggctgatcttcaataaggtggaggtgagcgaagacgagccggccagcaaggcgcagcgcagaaaagagaagaggcagagggtgaaggggaacctcacgccgctgaccgggaggaactaccggcagctgctggagcgcctgcaggcacggcagagccggctggacgagctgcgcggccaggatgaggggaaggcgcaggagctggaggcgaagatgaagtggaccaacctcctctacaaggcggagggcgtgaagatccgtgacgacgaacgcctgctgcaggaggccctgaagcgcaaggagaagcgcagggcgcagcggcagcgccggtgggagaagcgcacggccggcgtggtggagaagatgcagcagcgccaggaccggcggcggcagaacctgcgcaggaagaaggcggcccgcgccgagcgccgcctgctcagagcccgcaagaagggccgcatcctgccgcaggacctggagcgcgcaggcctggtctgagtctttcccacctggggccgccgtcttccgtcctaggagactccaggacaccctctgagtccttgacgctggctctgtcccaggatctccacagacctcggcctctccatgtgagggggacacagtggtgctctgctgagttgtgagggcccagatcacagatcccatgtgagaaagagagagtttcagcgtcatccttgaacgcaggatccgggaccttcagacccagggaaagggtgagggagactggggcctggtctgctttcccgggcctgaaagcttccccgaggtttgcagggtcagggaggaggaacggtgggggtgggcagtcactgcctgttccccactgcctgtgttcgcaggagccacgggacagaagacggtggcctctgctgccgggccacgttagtccgcagctcacccgaacagaggacaaccctgaggtgtggcatatgggcacctggcactgggagtcgggggagcacgtccaggcgtggtgcatcctggggcagaacgccatggctcctccccgctctcttggcttctgcctgttggggtctcattcctttctgttccccagtgccccggggcggcattttactgctcagaatttggagggagggagcagtaccttcccggagtccacgcatgtgagttgggtcaagtgcattggacctagggaaagagaaagaaagaataaaagctggagagagagtgaagtgaatgcaagataaaaagtgggatggaagaattaaatccagagttccaggcaatcaaaatgagtgcaggttgaaagaaaacaggtgaattttagtggcatatggatgataaagctgtaaataaaattcttttgatgaaactctccggttacgagacaaagactgtaactgaacaggagctggtgtgactgttaccagacagaggcaactgatgaaaaagccctgtgaaagataggatgtgaggtgagcatgagcttgagctgagagacagacacaacagtatctgaaaagaatacatactctttccatgcatatatggaacatggatggaaactgaccacctactttgtccagaaaagaagtcttaagatatttcaaggaatcagtgtcgttatctgaccgtatcccaatgtcattaaaaaaaatttgagcta

SEQ ID NO: 30467 - DNA, 1531 bp, Homo sapiens
  source 1..1531: mol_type = unassigned DNA
ccacaaatgtgggagggcgataaccactcgtagaaagcgtgagaagttactacaagcggtcctcccggccaccgtactgttccgctcccagaagccccgggcggcggaagtcgtcactcttaagaagggacggggccccacgctgcgcacccgcgggtttgctatggcgatgagcagcggcggcagtggtggcggcgtcccggagcaggaggattccgtgctgttccggcgcggcacaggccagagcgatgattctgacatttgggatgatacagcactgataaaagcatatgataaagctgtggcttcatttaagcatgctctaaagaatggtgacatttgtgaaacttcgggtaaaccaaaaaccacacctaaaagaaaacctgctaagaagaataaaagccaaaagaagaatactgcagcttccttacaacagtggaaagttggggacaaatgttctgccatttggtcagaagacggttgcatttacccagctaccattgcttcaattgattttaagagagaaacctgtgttgtggtttacactggatatggaaatagagaggagcaaaatctgtccgatctactttccccaatctgtgaagtagctaataatatagaacaaaatgctcaagagaatgaaaatgaaagccaagtttcaacagatgaaagtgagaactccaggtctcctggaaataaatcagataacatcaagcccaaatctgctccatggaactcttttctccctccaccaccccccatgccagggccaagactgggaccaggaaagataattcccccaccacctcccatatgtccagattctcttgatgatgctgatgctttgggaagtatgttaatttcatggtacatgagtggctatcatactggctattatatgggtttcagacaaaatcaaaaagaaggaaggtgctcacattccttaaattaaggagaaatgctggcatagagcagcactaaatgacaccactaaagaaacgatcagacagatctggaatgtgaagcgttatagaagataactggcctcatttcttcaaaatatcaagtgttgggaaagaaaaaaggaagtggaatgggtaactcttcttgattaaaagttatgtaataaccaaatgcaatgtgaaatattttactggactctattttgaaaaaccatctgtaaaagactggggtgggggtgggaggccagcacggtggtgaggcagttgagaaaatttgaatgtggattagattttgaatgatattggataattattggtaattttatgagctgtgagaagggtgttgtagtttataaaagactgtcttaatttgcatacttaagcatttaggaatgaagtgttagagtgtcttaaaatgtttcaaatggtttaacaaaatgtatgtgaggcgtatgtggcaaaatgttacagaatctaactggtggacatggctgttcattgtactgtttttttctatcttctatatgtttaaaagtatataataaaaatatttaatttttttttaaatt

SEQ ID NO: 30468 - DNA, 1536 bp, Homo sapiens
  source 1..1536: mol_type = unassigned DNA
agaagccccgggcggcggaagtcgtcactcttaagaagggacggggccccacgctgcgcacccgcgggtttgctatggcgatgagcagcggcggcagtggtggcggcgtcccggagcaggaggattccgtgctgttccggcgcggcacaggccagagcgatgattctgacatttgggatgatacagcactgataaaagcatatgataaagctgtggcttcatttaagcatgctctaaagaatggtgacatttgtgaaacttcgggtaaaccaaaaaccacacctaaaagaaaacctgctaagaagaataaaagccaaaagaagaatactgcagcttccttacaacagtggaaagttggggacaaatgttctgccatttggtcagaagacggttgcatttacccagctaccattgcttcaattgattttaagagagaaacctgtgttgtggtttacactggatatggaaatagagaggagcaaaatctgtccgatctactttccccaatctgtgaagtagctaataatatagaacaaaatgctcaagagaatgaaaatgaaagccaagtttcaacagatgaaagtgagaactccaggtctcctggaaataaatcagataacatcaagcccaaatctgctccatggaactcttttctccctccaccaccccccatgccagggccaagactgggaccaggaaagccaggtctaaaattcaatggcccaccaccgccaccgccaccaccaccaccccacttactatcatgctggctgcctccatttccttctggaccaccaataattcccccaccacctcccatatgtccagattctcttgatgatgctgatgctttgggaagtatgttaatttcatggtacatgagtggctatcatactggctattatatgggtttcagacaaaatcaaaaagaaggaaggtgctcacattccttaaattaaggagaaatgctggcatagagcagcactaaatgacaccactaaagaaacgatcagacagatctggaatgtgaagcgttatagaagataactggcctcatttcttcaaaatatcaagtgttgggaaagaaaaaaggaagtggaatgggtaactcttcttgattaaaagttatgtaataaccaaatgcaatgtgaaatattttactggactctattttgaaaaaccatctgtaaaagactggggtgggggtgggaggccagcacggtggtgaggcagttgagaaaatttgaatgtggattagattttgaatgatattggataattattggtaattttatgagctgtgagaagggtgttgtagtttataaaagactgtcttaatttgcatacttaagcatttaggaatgaagtgttagagtgtcttaaaatgtttcaaatggtttaacaaaatgtatgtgaggcgtatgtggcaaaatgttacagaatctaactggtggacatggctgttcattgtactgtttttttctatcttctatatgtttaaaagtatataataaaaatatttaatttttttttaaa

SEQ ID NO: 30469 - DNA, 1219 bp, Homo sapiens
  source 1..1219: mol_type = unassigned DNA
agaagccccgggcggcggaagtcgtcactcttaagaagggacggggccccacgctgcgcacccgcgggtttgctatggcgatgagcagcggcggcagtggtggcggcgtcccggagcaggaggattccgtgctgttccggcgcggcacaggccagagcgatgattctgacatttgggatgatacagcactgataaaagcatatgataaagctgtggcttcatttaagcatgctctaaagaatggtgacatttgtgaaacttcgggtaaaccaaaaaccacacctaaaagaaaacctgctaagaagaataaaagccaaaagaagaatactgcagcttccttacaacagtggaaagttggggacaaatgttctgccatttggtcagaagacggttgcatttacccagctaccattgcttcaattgattttaagagagaaacctgtgttgtggtttacactggatatggaaatagagaggagcaaaatctgtccgatctactttccccaatctgtgaagtagctaataatatagaacaaaatgctcaagagaatgaaaatgaaagccaagtttcaacagatgaaagtgagaactccaggtctcctggaaataaatcagataacatcaagcccaaatctgctccatggaactcttttctccctccaccaccccccatgccagggccaagactgggaccaggaaagataattcccccaccacctcccatatgtccagattctcttgatgatgctgatgctttgggaagtatgttaatttcatggtacatgagtggctatcatactggctattatatgggtttcagacaaaatcaaaaagaaggaaggtgctcacattccttaaattaaggagtaagtctgccagcattatgaaagtgaatcttacttttgtaaaactttatggtttgtggaaaacaaatgtttttgaacatttaaaaagttcagatgttaaaaagttgaaaggttaatgtaaaacaatcaatattaaagaattttgatgccaaaactattagataaaaggttaatctacatccctactagaattctcatacttaactggttggttatgtggaagaaacatactttcacaataaagagctttaggatatgatgccattttatatcactagtaggcagaccagcagacttttttttattgtgatatgggataacctaggcatactgcactgtacactctgacatat

SEQ ID NO: 30470 - DNA, 1445 bp, Homo sapiens
  source 1..1445: mol_type = unassigned DNA
gggtttgctatggcgatgagcagcggcggcagtggtggcggcgtcccggagcaggaggattccgtgctgttccggcgcggcacaggccagagcgatgattctgacatttgggatgatacagcactgataaaagcatatgataaagctgtggcttcatttaagcatgctctaaagaatggtgacatttgtgaaacttcgggtaaaccaaaaaccacacctaaaagaaaacctgctaagaagaataaaagccaaaagaagaatactgcagcttccttacaacagtggaaagttggggacaaatgttctgccatttggtcagaagacggttgcatttacccagctaccattgcttcaattgattttaagagagaaacctgtgttgtggtttacactggatatggaaatagagaggagcaaaatctgtccgatctactttccccaatctgtgaagtagctaataatatagaacaaaatgctcaagagaatgaaaatgaaagccaagtttcaacagatgaaagtgagaactccaggtctcctggaaataaatcagataacatcaagcccaaatctgctccatggaactcttttctccctccaccaccccccatgccagggccaagactgggaccaggaaagccaggtctaaaattcaatggcccaccaccgccaccgccaccaccaccaccccacttactatcatgctggctgcctccatttccttctggaccaccaataattcccccaccacctcccatatgtccagattctcttgatgatgctgatgctttgggaagtatgttaatttcatggtacatgagtggctatcatactggctattatatggaaatgctggcatagagcagcactaaatgacaccactaaagaaacgatcagacagatctggaatgtgaagcgttatagaagataactggcctcatttcttcaaaatatcaagtgttgggaaagaaaaaaggaagtggaatgggtaactcttcttgattaaaagttatgtaataaccaaatgcaatgtgaaatattttactggactctattttgaaaaaccatctgtaaaagactggggtgggggtgggaggccagcacggtggtgaggcagttgagaaaatttgaatgtggattagattttgaatgatattggataattattggtaattttatgagctgtgagaagggtgttgtagtttataaaagactgtcttaatttgcatacttaagcatttaggaatgaagtgttagagtgtcttaaaatgtttcaaatggtttaacaaaatgtatgtgaggcgtatgtggcaaaatgttacagaatctaactggtggacatggctgttcattgtactgtttttttctatcttctatatgtttaaaagtatataataaaaatatttaatttttttttaaattagctgtatctgtgattgtatttcttt

SEQ ID NO: 30471 - DNA, 1550 bp, Homo sapiens
  source 1..1550: mol_type = unassigned DNA
gccccacgctgcgcacccgcgggtttgctatggcgatgagcagcggcggcagtggtggcggcgtcccggagcaggaggattccgtgctgttccggcgcggcacaggccagagcgatgattctgacatttgggatgatacagcactgataaaagcatatgataaagctgtggcttcatttaagcatgctctaaagaatggtgacatttgtgaaacttcgggtaaaccaaaaaccacacctaaaagaaaacctgctaagaagaataaaagccaaaagaagaatactgcagcttccttacaacagtggaaagttggggacaaatgttctgccatttggtcagaagacggttgcatttacccagctaccattgcttcaattgattttaagagagaaacctgtgttgtggtttacactggatatggaaatagagaggagcaaaatctgtccgatctactttccccaatctgtgaagtagctaataatatagaacaaaatgctcaagagaatgaaaatgaaagccaagtttcaacagatgaaagtgagaactccaggtctcctggaaataaatcagataacatcaagcccaaatctgctccatggaactcttttctccctccaccaccccccatgccagggccaagactgggaccaggaaagccaggtctaaaattcaatggcccaccaccgccaccgccaccaccaccaccccacttactatcatgctggctgcctccatttccttctggaccaccaataattcccccaccacctcccatatgtccagattctcttgatgatgctgatgctttgggaagtatgttaatttcatggtacatgagtggctatcatactggctattatatgacagggtttcactgtgttagccaggatggtctcaatctcctgaccccgtgatccacccgcctcggccttccaagagaaatgaaatttttttaatgcacaaagatctggggaaatgctggcatagagcagcactaaatgacaccactaaagaaacgatcagacagatctggaatgtgaagcgttatagaagataactggcctcatttcttcaaaatatcaagtgttgggaaagaaaaaaggaagtggaatgggtaactcttcttgattaaaagttatgtaataaccaaatgcaatgtgaaatattttactggactctattttgaaaaaccatctgtaaaagactggggtgggggtgggaggccagcacggtggtgaggcagttgagaaaatttgaatgtggattagattttgaatgatattggataattattggtaattttatgagctgtgagaagggtgttgtagtttataaaagactgtcttaatttgcatacttaagcatttaggaatgaagtgttagagtgtcttaaaatgtttcaaatggtttaacaaaatgtatgtgaggcgtatgtggcaaaatgttacagaatctaactggtggacatggctgttcattgtactgtttttttctatcttctatatgtttaaaagtatataataaaaatatttaatttttttttaaattag

SEQ ID NO: 30472 - DNA, 1308 bp, Homo sapiens
  source 1..1308: mol_type = unassigned DNA
actcttaagaagggacggggccccacgctgcgcacccgcgggtttgctatggcgatgagcagcggcggcagtggtggcggcgtcccggagcaggaggattccgtgctgttccggcgcggcacaggccagagcgatgattctgacatttgggatgatacagcactgataaaagcatatgataaagctgtggcttcatttaagcatgctctaaagaatggtgacatttgtgaaacttcgggtaaaccaaaaaccacacctaaaagaaaacctgctaagaagaataaaagccaaaagaagaatactgcagcttccttacaacagaatgaaaatgaaagccaagtttcaacagatgaaagtgagaactccaggtctcctggaaataaatcagataacatcaagcccaaatctgctccatggaactcttttctccctccaccaccccccatgccagggccaagactgggaccaggaaagccaggtctaaaattcaatggcccaccaccgccaccgccaccaccaccaccccacttactatcatgctggctgcctccatttccttctggaccaccaataattcccccaccacctcccatatgtccagattctcttgatgatgctgatgctttgggaagtatgttaatttcatggtacatgagtggctatcatactggctattatatgggtttcagacaaaatcaaaaagaaggaaggtgctcacattccttaaattaaggagtaagtctgccagcattatgaaagtgaatcttacttttgtaaaactttatggtttgtggaaaacaaatgtttttgaacatttaaaaagttcagatgttaaaaagttgaaaggttaatgtaaaacaatcaatattaaagaattttgatgccaaaactattagataaaaggttaatctacatccctactagaattctcatacttaactggttggttatgtggaagaaacatactttcacaataaagagctttaggatatgatgccattttatatcactagtaggcagaccagcagacttttttttattgtgatatgggataacctaggcatactgcactgtacactctgacatatgaagtgctctagtcaagtttaactggtgtccacagaggacatggtttaactggaattcgtcaagcctctggttctaatttctcatttgcaggaaatgctggcatagagcagcactaaatgacaccactaaagaaacgatcagacagatctggaatgtgaagcgttatagaagataactggcctcatttcttcaaaatatcaagtgttgggaaagaaaaaa

SEQ ID NO: 30473 - DNA, 1573 bp, Homo sapiens
  source 1..1573: mol_type = unassigned DNA
ccacaaatgtgggagggcgataaccactcgtagaaagcgtgagaagttactacaagcggtcctcccggccaccgtactgttccgctcccagaagccccgggcggcggaagtcgtcactcttaagaagggacggggccccacgctgcgcacccgcgggtttgctatggcgatgagcagcggcggcagtggtggcggcgtcccggagcaggaggattccgtgctgttccggcgcggcacaggccagagcgatgattctgacatttgggatgatacagcactgataaaagcatatgataaagctgtggcttcatttaagcatgctctaaagaatggtgacatttgtgaaacttcgggtaaaccaaaaaccacacctaaaagaaaacctgctaagaagaataaaagccaaaagaagaatactgcagcttccttacaacagtggaaagttggggacaaatgttctgccatttggtcagaagacggttgcatttacccagctaccattgcttcaattgattttaagagagaaacctgtgttgtggtttacactggatatggaaatagagaggagcaaaatctgtccgatctactttccccaatctgtgaagtagctaataatatagaacaaaatgctcaagagaatgaaaatgaaagccaagtttcaacagatgaaagtgagaactccaggtctcctggaaataaatcagataacatcaagcccaaatctgctccatggaactcttttctccctccaccaccccccatgccagggccaagactgggaccaggaaagccaggtctaaaattcaatggcccaccaccgccaccgccaccaccaccaccccacttactatcatgctggctgcctccatttccttctggaccaccaataattcccccaccacctcccatatgtccagattctcttgatgatgctgatgctttgggaagtatgttaatttcatggtacatgagtggctatcatactggctattatatggaaatgctggcatagagcagcactaaatgacaccactaaagaaacgatcagacagatctggaatgtgaagcgttatagaagataactggcctcatttcttcaaaatatcaagtgttgggaaagaaaaaaggaagtggaatgggtaactcttcttgattaaaagttatgtaataaccaaatgcaatgtgaaatattttactggactctattttgaaaaaccatctgtaaaagactgaggtgggggtgggaggccagcacggtggtgaggcagttgagaaaatttgaatgtggattagattttgaatgatattggataattattggtaattttatgagctgtgagaagggtgttgtagtttataaaagactgtcttaatttgcatacttaagcatttaggaatgaagtgttagagtgtcttaaaatgtttcaaatggtttaacaaaatgtatgtgaggcgtatgtggcaaaatgttacagaatctaactggtggacatggctgttcattgtactgtttttttctatcttctatatgtttaaaagtatataataaaaatatttaatttttttttaaatt

SEQ ID NO: 30474 - DNA, 1388 bp, Homo sapiens
  source 1..1388: mol_type = unassigned DNA
gctgcgcacccgcgggtttgctatggcgatgagcagcggcggcagtggtggcggcgtcccggagcaggaggattccgtgctgttccggcgcggcacaggccagagcgatgattctgacatttgggatgatacagcactgataaaagcatatgataaagctgtggcttcatttaagcatgctctaaagaatggtgacatttgtgaaacttcgggtaaaccaaaaaccacacctaaaagaaaacctgctaagaagaataaaagccaaaagaagaatactgcagcttccttacaacagtggaaagttggggacaaatgttctgccatttggtcagaagacggttgcatttacccagctaccattgcttcaattgattttaagagagaaacctgtgttgtggtttacactggatatggaaatagagaggagcaaaatctgtccgatctactttccccaatctgtgaagtagctaataatatagaacaaaatgctcaagagaatgaaaatgaaagccaagtttcaacagatgaaagtgagaactccaggtctcctggaaataaatcagataacatcaagcccaaatctgctccatggaactcttttctccctccaccaccccccatgccagggccaagactgggaccaggaaagataattcccccaccacctcccatatgtccagattctcttgatgatgctgatgctttgggaagtatgttaatttcatggtacatgagtggctatcatactggctattatatgggttttagacaaaatcaaaaagaaggaaggtgctcacattccttaaattaaggagaaatgctggcatagagcagcactaaatgacaccactaaagaaacgatcagacagatctggaatgtgaagcgttatagaagataactggcctcatttcttcaaaatatcaagtgttgggaaagaaaaaaggaagtggaatgggtaactcttcttgattaaaagttatgtaataaccaaatgcaatgtgaaatattttactggactctattttgaaaaaccatctgtaaaagactgaggtgggggtgggaggccagcacggtggtgaggcagttgagaaaatttgaatgtggattagattttgaatgatattggataattattggtaattttatgagctgtgagaagggtgttgtagtttataaaagactgtcttaatttgcatacttaagcatttaggaatgaagtgttagagtgtcttaaaatgtttcaaatggtttaacaaaatgtatgtgaggcgtatgtggcaaaatgttacagaatctaactggtggacatggctgttcattgtactgtttttttctatcttctatatgtttaaaagtatataataaaaatatttaatttttttttaaa

SEQ ID NO: 30475 - DNA, 1536 bp, Homo sapiens
  source 1..1536: mol_type = unassigned DNA
agaagccccgggcggcggaagtcgtcactcttaagaagggacggggccccacgctgcgcacccgcgggtttgctatggcgatgagcagcggcggcagtggtggcggcgtcccggagcaggaggattccgtgctgttccggcgcggcacaggccagagcgatgattctgacatttgggatgatacagcactgataaaagcatatgataaagctgtggcttcatttaagcatgctctaaagaatggtgacatttgtgaaacttcgggtaaaccaaaaaccacacctaaaagaaaacctgctaagaagaataaaagccaaaagaagaatactgcagcttccttacaacagtggaaagttggggacaaatgttctgccatttggtcagaagacggttgcatttacccagctaccattgcttcaattgattttaagagagaaacctgtgttgtggtttacactggatatggaaatagagaggagcaaaatctgtccgatctactttccccaatctgtgaagtagctaataatatagaacaaaatgctcaagagaatgaaaatgaaagccaagtttcaacagatgaaagtgagaactccaggtctcctggaaataaatcagataacatcaagcccaaatctgctccatggaactcttttctccctccaccaccccccatgccagggccaagactgggaccaggaaagccaggtctaaaattcaatggcccaccaccgccaccgccaccaccaccaccccacttactatcatgctggctgcctccatttccttctggaccaccaataattcccccaccacctcccatatgtccagattctcttgatgatgctgatgctttgggaagtatgttaatttcatggtacatgagtggctatcatactggctattatatgggttttagacaaaatcaaaaagaaggaaggtgctcacattccttaaattaaggagaaatgctggcatagagcagcactaaatgacaccactaaagaaacgatcagacagatctggaatgtgaagcgttatagaagataactggcctcatttcttcaaaatatcaagtgttgggaaagaaaaaaggaagtggaatgggtaactcttcttgattaaaagttatgtaataaccaaatgcaatgtgaaatattttactggactctattttgaaaaaccatctgtaaaagactgaggtgggggtgggaggccagcacggtggtgaggcagttgagaaaatttgaatgtggattagattttgaatgatattggataattattggtaattttatgagctgtgagaagggtgttgtagtttataaaagactgtcttaatttgcatacttaagcatttaggaatgaagtgttagagtgtcttaaaatgtttcaaatggtttaacaaaatgtatgtgaggcgtatgtggcaaaatgttacagaatctaactggtggacatggctgttcattgtactgtttttttctatcttctatatgtttaaaagtatataataaaaatatttaatttttttttaaa

SEQ ID NO: 30476 - DNA, 1550 bp, Homo sapiens
  source 1..1550: mol_type = unassigned DNA
gccccacgctgcgcacccgcgggtttgctatggcgatgagcagcggcggcagtggtggcggcgtcccggagcaggaggattccgtgctgttccggcgcggcacaggccagagcgatgattctgacatttgggatgatacagcactgataaaagcatatgataaagctgtggcttcatttaagcatgctctaaagaatggtgacatttgtgaaacttcgggtaaaccaaaaaccacacctaaaagaaaacctgctaagaagaataaaagccaaaagaagaatactgcagcttccttacaacagtggaaagttggggacaaatgttctgccatttggtcagaagacggttgcatttacccagctaccattgcttcaattgattttaagagagaaacctgtgttgtggtttacactggatatggaaatagagaggagcaaaatctgtccgatctactttccccaatctgtgaagtagctaataatatagaacaaaatgctcaagagaatgaaaatgaaagccaagtttcaacagatgaaagtgagaactccaggtctcctggaaataaatcagataacatcaagcccaaatctgctccatggaactcttttctccctccaccaccccccatgccagggccaagactgggaccaggaaagccaggtctaaaattcaatggcccaccaccgccaccgccaccaccaccaccccacttactatcatgctggctgcctccatttccttctggaccaccaataattcccccaccacctcccatatgtccagattctcttgatgatgctgatgctttgggaagtatgttaatttcatggtacatgagtggctatcatactggctattatatgacagggtttcactgtgttagccaggatggtctcaatctcctgaccccgtgatccacccgcctcggccttccaagagaaatgaaatttttttaatgcacaaagatctggggaaatgctggcatagagcagcactaaatgacaccactaaagaaacgatcagacagatctggaatgtgaagcgttatagaagataactggcctcatttcttcaaaatatcaagtgttgggaaagaaaaaaggaagtggaatgggtaactcttcttgattaaaagttatgtaataaccaaatgcaatgtgaaatattttactggactctattttgaaaaaccatctgtaaaagactgaggtgggggtgggaggccagcacggtggtgaggcagttgagaaaatttgaatgtggattagattttgaatgatattggataattattggtaattttatgagctgtgagaagggtgttgtagtttataaaagactgtcttaatttgcatacttaagcatttaggaatgaagtgttagagtgtcttaaaatgtttcaaatggtttaacaaaatgtatgtgaggcgtatgtggcaaaatgttacagaatctaactggtggacatggctgttcattgtactgtttttttctatcttctatatgtttaaaagtatataataaaaatatttaatttttttttaaattag

SEQ ID NO: 30477 - DNA, 867 bp, Homo sapiens
  source 1..867: mol_type = unassigned DNA
actcttaagaagggacggggccccacgctgcgcacccgcgggtttgctatggcgatgagcagcggcggcagtggtggcggcgtcccggagcaggaggattccgtgctgttccggcgcggcacaggccagagcgatgattctgacatttgggatgatacagcactgataaaagcatatgataaagctgtggcttcatttaagcatgctctaaagaatggtgacatttgtgaaacttcgggtaaaccaaaaaccacacctaaaagaaaacctgctaagaagaataaaagccaaaagaagaatactgcagcttccttacaacagaatgaaaatgaaagccaagtttcaacagatgaaagtgagaactccaggtctcctggaaataaatcagataacatcaagcccaaatctgctccatggaactcttttctccctccaccaccccccatgccagggccaagactgggaccaggaaagccaggtctaaaattcaatggcccaccaccgccaccgccaccaccaccaccccacttactatcatgctggctgcctccatttccttctggaccaccaataattcccccaccacctcccatatgtccagattctcttgatgatgctgatgctttgggaagtatgttaatttcatggtacatgagtggctatcatactggctattatatgggttttagacaaaatcaaaaagaaggaaggtgctcacattccttaaattaaggagtaagtctgccagcattatgaaagtgaatcttacttttgtaaaactttatggtttgtggaaaacaaatgtttttgaacatttaaaaagttcagatgttagaaagttgaaaggttaatgtaaaacaatcaata

SEQ ID NO: 30478 - DNA, 6192 bp, Homo sapiens
  source 1..6192: mol_type = unassigned DNA
cttacagggcccttccattattgaatgcacggcttctggcatctgggacagagcgccacctgcctgtcacctcgtcttctgtggagaaccacctgccatcaaagatgctgtcattacggggaataacttcactttcaggaacaccgtcacttacacttgcaaagaaggctatactcttgctggtcttgacaccattgaatgcctggccgacggcaagtggagtagaagtgaccagcagtgcctggctgtctcctgtgatgagccacccattgtggaccacgcctctccagagactgcccatcggctctttggagacattgcattctactactgctctgatggttacagcctagcagacaattcccagcttctctgcaatgcccagggcaagtgggtacccccagaaggtcaagacatgccccgttgtatagctcatttctgtgaaaaacctccatcggtttcctatagcatcttggaatctgtgagcaaagcaaaatttgcagctggctcagttgtgagctttaaatgcatggaaggctttgtactgaacacctcagcaaagattgaatgtatgagaggtgggcagtggaacccttcccccatgtccatccagtgcatccctgtgcggtgtggagagccaccaagcatcatgaatggctatgcaagtggatcaaactacagttttggagccatggtggcttacagctgcaacaaggggttctacatcaaaggggaaaagaagagcacctgcgaagccacagggcagtggagtagtcctataccgacgtgccacccggtatcttgtggtgaaccacctaaggttgagaatggctttctggagcatacaactggcaggatctttgagagtgaagtgaggtatcagtgtaacccgggctataagtcagtcggaagtcctgtatttgtctgccaagccaatcgccactggcacagtgaatcccctctgatgtgtgttcctctcgactgtggaaaacctcccccgatccagaatggcttcatgaaaggagaaaactttgaagtagggtccaaggttcagtttttctgtaatgagggttatgagcttgttggtgacagttcttggacatgtcagaaatctggcaaatggaataagaagtcaaatccaaagtgcatgcctgccaagtgcccagagccgcccctcttggaaaaccagctagtattaaaggagttgaccaccgaggtaggagttgtgacattttcctgtaaagaagggcatgtcctgcaaggcccctctgtcctgaaatgcttgccatcccagcaatggaatgactctttccctgtttgtaagattgttctttgtaccccacctcccctaatttcctttggtgtccccattccttcttctgctcttcattttggaagtactgtcaagtattcttgtgtaggtgggtttttcctaagaggaaattctaccaccctctgccaacctgatggcacctggagctctccactgccagaatgtgttccagtagaatgtccccaacctgaggaaatccccaatggaatcattgatgtgcaaggccttgcctatctcagcacagctctctatacctgcaagccaggctttgaattggtgggaaatactaccaccctttgtggagaaaatggtcactggcttggaggaaaaccaacatgtaaagccattgagtgcctgaaacccaaggagattttgaatggcaaattctcttacacggacctacactatggacagaccgttacctactcttgcaaccgaggctttcggctcgaaggtcccagtgccttgacctgtttagagacaggtgattgggatgtagatgccccatcttgcaatgccatccactgtgattccccacaacccattgaaaatggttttgtagaaggtgcagattacagctatggtgccataatcatctacagttgcttccctgggtttcaggtggctggtcatgccatgcagacctgtgaagagtcaggatggtcaagttccatcccaacatgtatgccaatagactgtggcctccctcctcatatagattttggagactgtactaaactcaaagatgaccagggatattttgagcaagaagacgacatgatggaagttccatatgtgactcctcaccctccttatcatttgggagcagtggctaaaacctgggaaaatacaaaggagtctcctgctacacattcatcaaactttctgtatggtaccatggtttcatacacctgtaatccaggatatgaacttctggggaaccctgtgctgatctgccaggaagatggaacttggaatggcagtgcaccatcctgcatttcaattgaatgtgacttgcctactgctcctgaaaatggctttttgcgttttacagagactagcatgggaagtgctgtgcagtatagctgtaaacctggacacattctagcaggctctgacttaaggctttgtctagagaatagaaagtggagtggtgcctccccacgctgtgaagccatttcatgcaaaaagccaaatccagtcatgaatggatccatcaaaggaagcaactacacatacctgagcacgttgtactatgagtgtgaccccggatatgtgctgaatggcactgagaggagaacatgccaggatgacaaaaactgggatgaggatgagcccatttgcattcctgtggactgcagttcacccccagtctcagccaatggccaggtgagaggagacgagtacacattccaaaaagagattgaatacacttgcaatgaagggttcttgcttgagggagccaggagtcgggtttgtcttgccaatggaagttggagtggagccactcccgactgtgtgcctgtcagatgtgccaccccgccacaactggccaatggggtgacggaaggcctggactatggcttcatgaaggaagtaacattccactgtcacgagggctacatcttgcacggtgctccaaaactcacctgtcagtcagatggcaactgggatgcagagattcctctctgtaaaccagtcaactgtggacctcctgaagatcttgcccatggtttccctaatggtttttcctttattcatgggggccatatacagtatcagtgctttcctggttataagctccatggaaattcatcaagaaggtgcctctccaatggctcctggagtggcagctcaccttcctgcctgccttgcagatgttccacaccagtaattgaatatggaactgtcaatgggacagattttgactgtggaaaggcagcccggattcagtgcttcaaaggcttcaagctcctaggactttctgaaatcacctgtgaagccgatggccagtggagctctgggttcccccactgtgaacacacttcttgtggttctcttccaatgataccaaatgcgttcatcagtgagaccagctcttggaaggaaaatgtgataacttacagctgcaggtctggatatgtcatacaaggcagttcagatctgatttgtacagagaaaggggtatggagccagccttatccagtctgtgagcccttgtcctgtgggtccccaccgtctgtcgccaatgcagtggcaactggagaggcacacacctatgaaagtgaagtgaaactcagatgtctggaaggttatacgatggatacagatacagatacattcacctgtcagaaagatggtcgctggttccctgagagaatctcctgcagtcctaaaaaatgtcctctcccggaaaacataacacatatacttgtacatggggacgatttcagtgtgaataggcaagtttctgtgtcatgtgcagaagggtatacctttgagggagttaacatatcagtatgtcagcttgatggaacctgggagccaccattctccgatgaatcttgcagtccagtttcttgtgggaaacctgaaagtccagaacatggatttgtggttggcagtaaatacacctttgaaagcacaattatttatcagtgtgagcctggctatgaactagaggggaacagggaacgtgtctgccaggagaacagacagtggagtggaggggtggcaatatgcaaagagaccaggtgtgaaactccacttgaatttctcaatgggaaagctgacattgaaaacaggacgactggacccaacgtggtatattcctgcaacagaggctacagtcttgaagggccatctgaggcacactgcacagaaaatggaacctggagccacccagtccctctctgcaaaccaaatccatgccctgttccttttgtgattcccgagaatgctctgctgtctgaaaaggagttttatgttgatcagaatgtgtccatcaaatgtagggaaggttttctgctgcagggccacggcatcattacctgcaaccccgacgagacgtggacacagacaagcgccaaatgtgaaaaaatctcatgtggtccaccagctcacgtagaaaatgcaattgctcgaggcgtacattatcaatatggagacatgatcacctactcatgttacagtggatacatgttggagggtttcctgaggagtgtttgtttagaaaatggaacatggacatcacctcctatttgcagagctgtctgtcgatttccatgtcagaatgggggcatctgccaacgcccaaatgcttgttcctgtccagagggctggatggggcgcctctgtgaagaaccaatctgcattcttccctgtctgaacggaggtcgctgtgtggccccttaccagtgtgactgcccgcctggctggacggggtctcgctgtcatacagctgtttgccagtctccctgcttaaatggtggaaaatgtgtaagaccaaaccgatgtcactgtctttcttcttggacgggacataactgttccaggaaaaggaggactgggttttaaccactgcacgaccatctggctctcccaaaagcaggatcatctctcctcggtagtgcctgggcatcctggaacttatgcaaagaaagtccaacatggtgctgggtcttgtttagtaaacttgttacttggggttactttttttattttgtgatatattttgttattccttgtgacatactttcttacatgtttccatttttaaatatgcctgtattttctatataaaaattatattaaatagatgctgctctaccctcacaaaatgtacatattctgctgtctattgggaaagttcctggtacacatttttattcagttacttaaaatgatttttccattaaagtatattttgctactaaataatattttgctggatagtaccattttatgaggtggccaagggattcatagagaggactcatgatctttcatctgtgccactggcaccacataggagaccccttacaataaaggagacccctttgttctggttccatcttctatacaatatgtgtaataataaaagctttttctttcatttaatcaatcagagagtaactgttggacctggtactctccaccacataattatgtcctggtacttagggtagcctggctaattcttttcacaacatttgaaaagccgtaggcattaacttcatggatgtggagaaacagcataatgaccttggttcacaatgaaagtgctagccttctttctcgtggctggaataagaaatgcaagaactggaagattaacaaagagctgatacccggactggtaatcccacaactcactattttgggaggaaggggaagacagggaaagagaaggaaaaaggcaaatgggaaacattccccagagctgtgctcctggtctcacctgcaaaaaagaattgcagccacctaagagaaagctgagctgcccctcagtcctcactgtcacctacctctatcacaacaattgtaccaagatgaagccttccccagacttcagaaaataaagtcaaaccctagattttgttttaaaataggaaactcagaatcaacttgcctccatcctctgggaaaactgctcccacacaggccttggagtgtgttgtagcactgtggaggaatgcagaaaggatgaaagagatcttgattctcctagtggttctcttcactaccgtaggcatccctcagccattgactcctccttctttctcttgacattcactttcttggccagtcttacatgcttatgagtctactttccaataaatttactcatagtccattaa

SEQ ID NO: 30479 - DNA, 5705 bp, Homo sapiens
  source 1..5705: mol_type = unassigned DNA
atgtggcctcgcctggccttttgttgctggggtctggcgctcgtttcgggctgggcgacctttcagcagatgtccccgtcgcgcaatttcagcttccgcctcttccccgagaccgcgcccggggcccccgggagtatccccgcgccgcccgctcctggcgacgaagcggcggggagcagagtggagcggctgggccaggcgttccggcgacgcgtgcggctgctgcgggagctcagcgagcgcctggagcttgtcttcctggtggatgattcgtccagcgtgggcgaagtcaacttccgcagcgagctcatgttcgtccgcaagctgctgtccgacttccccgtggtgcccacggccacgcgcgtggccatcgtgaccttctcgtccaagaactacgtggtgccgcgcgtcgattacatctccacccgccgcgcgcgccagcacaagtgcgcgctgctcctccaagagatccctgccatctcctaccgaggtggcggcacctacaccaagggcgccttccagcaagccgcgcaaattcttcttcatgctagagaaaactcaacaaaagttgtatttctcatcactgatggatattccaatgggggagaccctagaccaattgcagcgtcactgcgagattcaggagtggagatcttcacttttggcatatggcaagggaacattcgagagctgaatgacatggcttccaccccaaaggaggagcactgttacctgctacacagttttgaagaatttgaggctttagctcgccgggcattgcatgaagatctaccttctgggagttttattcaagatgatatggtccactgctcatatctttgtgatgaaggcaaggactgctgtgaccgaatgggaagctgcaaatgtgggacacacacaggccattttgagtgcatctgtgaaaaggggtattacgggaaaggtctgcagtatgaatgcacagcttgcccatcggggacatacaaacctgaaggctcaccaggaggaatcagcagttgcattccatgtcctgatgaaaatcacacctctccacctggaagcacatcccctgaagactgtgtctgcagagagggatacagggcatctggccagacctgtgaacttgtccactgccctgccctgaagcctcccgaaaatggttactttatccaaaacacttgcaacaaccacttcaatgcagcctgtggggtccgatgtcaccctggatttgatcttgtgggaagcagcatcatcttatgtctacccaatggtttgtggtccggttcagagagctactgcagagtaagaacatgtcctcatctccgccagccgaaacatggccacatcagctgttctacaagggaaatgttatataagacaacatgtttggttgcctgtgatgaagggtacagactagaaggcagtgataagcttacttgtcaaggaaacagccagtgggatgggccagaaccccggtgtgtggagcgccactgttccacctttcagatgcccaaagatgtcatcatatccccccacaactgtggcaagcagccagccaaatttgggacgatctgctatgtaagttgccgccaagggttcattttatctggagtcaaagaaatgctgagatgtaccacttctggaaaatggaatgtcggagttcaggcagctgtgtgtaaagacgtggaggctcctcaaatcaactgtcctaaggacatagaggctaagactctggaacagcaagattctgccaatgttacctggcagattccaacagctaaagacaactctggtgaaaaggtgtcagtccacgttcatccagctttcaccccaccttaccttttcccaattggagatgttgctatcgtatacacggcaactgacctatccggcaaccaggccagctgcattttccatatcaaggttattgatgcagaaccacctgtcatagactggtgcagatctccacctcccgtccaggtctcggagaaggtacatgccgcaagctgggatgagcctcagttctcagacaactcaggggctgaattggtcattaccagaagtcatacacaaggagaccttttccctcaaggggagactatagtacagtatacagccactgacccctcaggcaataacaggacatgtgatatccatattgtcataaaaggttctccctgtgaaattccattcacacctgtaaatggggattttatatgcactccagataatactggagtcaactgtacattaacttgcttggagggctatgatttcacagaagggtctactgacaagtattattgtgcttatgaagatggcgtctggaaaccaacatataccactgaatggccagactgtgccaaaaaacgttttgcaaaccacgggttcaagtcctttgagatgttctacaaagcagctcgttgtgatgacacagatctgatgaagaagttttctgaagcatttgagacgaccctgggaaaaatggtcccatcattttgtagtgatgcagaggacattgactgcagactggaggagaacctgaccaaaaaatattgcctagaatataattatgactatgaaaatggctttgcaattggaccaggtggctggggtgcagctaataggctggattactcttacgatgacttcctggacactgtgcaagaaacagccacaagcatcggcaatgccaagtcctcacggattaaaagaagtgccccattatctgactataaaattaagttaatttttaacatcacagctagtgtgccattacccgatgaaagaaatgatacccttgaatgggaaaatcagcaacgactccttcagacattggaaactatcacaaataaactgaaaaggactctcaacaaagaccccatgtattcctttcagcttgcatcagaaatacttatagccgacagcaattcattagaaacaaaaaaggcttcccccttctgcagaccaggctcagtgctgagagggcgtatgtgtgtcaattgccctttgggaacctattataatctggaacatttcacctgtgaaagctgccggatcggatcctatcaagatgaagaagggcaacttgagtgcaagctttgcccctctgggatgtacacggaatatatccattcaagaaacatctctgattgtaaagctcagtgtaaacaaggcacctactcatacagtggacttgagacttgtgaatcgtgtccactgggcacttatcagccaaaatttggttcccggagctgcctctcgtgtccagaaaacacctcaactgtgaaaagaggagccgtgaacatttctgcatgtggagttccttgtccagaaggaaaattctcgcgttctgggttaatgccctgtcacccatgtcctcgtgactattaccaacctaatgcagggaaggccttctgcctggcctgtcccttttatggaactaccccattcgctggttccagatccatcacagaatgttcaagttttagttcaactttctcagcggcagaggaaagtgtggtgccccctgcctctcttggacatattaaaaagaggcatgaaatcagcagcagagttttccatgaatgcttctttaacccttgccacaatagtggaacctgccagcaacttgggcgtggttatgtttgtctctgtccacttggatatacaggcttaaagtgtgaaacagacatcgatgagtgcagcccactgccttgcctcaacaatggagtttgtaaagacctagttggggaattcatttgtgagtgcccatcaggttacacaggtcagcggtgtgaagaaaatataaatgagtgtagctccagtccttgtttaaataaaggaatctgtgttgatggtgtggctggctatcgttgcacatgtgtgaaaggatttgtaggcctgcattgtgaaacagaagtcaatgaatgccagtcaaacccatgcttaaataatgcagtctgtgaagaccaggttgggggattcttgtgcaaatgcccacctggatttttgggtacccgatgtggaaagaacgtcgatgagtgtctcagtcagccatgcaaaaatggagctacctgtaaagacggtgccaatagcttcagatgcctgtgtgcagctggcttcacaggatcacactgtgaattgaacatcaatgaatgtcagtctaatccatgtagaaatcaggccacctgtgtggatgaattaaattcatacagttgtaaatgtcagccaggattttcaggcaaaaggtgtgaaacagaacagtctacaggctttaacctggattttgaagtttctggcatctatggatatgtcatgctagatggcatgctcccatctctccatgctctaacctgtaccttctggatgaaatcctctgacgacatgaactatggaacaccaatctcctatgcagttgataacggcagcgacaataccttgctcctgactgattataacggctgggttctttatgtgaatggcagggaaaagataacaaactgtccctcggtgaatgatggcagatggcatcatattgcaatcacttggacaagtgccaatggcatctggaaagtctatatcgatgggaaattatctgacggtggtgctggcctctctgttggtttgcccatacctggtatgttttaacaaaatgagtataattctgttggactctagaggtgatgctgcttaaatggacatcaggtttgctagcattgttgttcttggtttcaaacaaagattaacagctatctctcttatttcctactccctgattatcctaactgtgggttattagaagcttttttcctaagtaagctgtttgcctctctgtgtgagaaatgcctttgaagatctacattaagactaccaagaagcatgctgaattagcagctggttgctaaactgtcttctaaggagattaattactggtattttttgtttattttaaggattgttttgttttgtaatcagtatataagcaggaccactgctatccatcttttatggcccttttcaaatagatcttggcttgtcttctaaaaaatactttttaataaatatcccaggagttttagtttgaagaattgcaaactaaatttcattaggtgacccaggttctcagcattgtacatggcaataagcttgttctatctggatacatctatagaagtatatgcatatgacattattttttactttgctcatttgtttcaggtatactaaaagaaaattaaatagacaaaaatgaattaaagtattagaaactgactaatacattctagaagtaagttgtatgaaactaggatacgtatactaataaatatagcacaaaaatactaaacttcataaaaatgcggtgagatgacccttgcgaagcctcaaatacaatacttattttatttattagaaattattggccaggtacggtggctcacgcctgtaatcccagcactttggaaggctgaggagggtggatcacgaggtcaggagttggagaccgccctggacaatatggtgaagccctatctctactaaaaacgcacagaaaaattagccaggcatggtggtagatgcctgtaattccagctactcaggaggctgaggcaggagaatcgcttgaacccaggaggcgaagattgccgtgagccgagatcatgccactgcactccagcctgggcaatggagagaggctctgtctc

SEQ ID NO: 30480 - DNA, 3257 bp, Homo sapiens
  source 1..3257: mol_type = unassigned DNA
agggagagaaggagggaagcgggagatttttcttgactgccccctttccttcaaacattttataggcttcagggagagagaggaggaggagagagggaagaaaaaaagaggagagcgagaggggtagagagcgcgcgccgttccctccggagttcccgagctgctgaggagtctggattgtgtctgtccccagtgtcagatgaaagggcgctgaggctcttggccgctgccccgcgcccagctccgcgcacgcccctctgcgagtccggccgcccagcgcctcttcccgcccgagccgccgcctgcgctccggggcagccgctctgtctccagcgcgatgtggcctcgcctggccttttgttgctggggtctggcgctcgtttcgggctgggcgacctttcagcagatgtccccgtcgcgcaatttcagcttccgcctcttccccgagaccgcgcccggggcccccgggagtatccccgcgccgcccgctcctggcgacgaagcggcggggagcagagtggagcggctgggccaggcgttccggcgacgcgtgcggctgctgcgggagctcagcgagcgcctggagcttgtcttcctggtggatgattcgtccagcgtgggcgaagtcaacttccgcagcgagctcatgttcgtccgcaagctgctgtccgacttccccgtggtgcccacggccacgcgcgtggccatcgtgaccttctcgtccaagaactacgtggtgccgcgcgtcgattacatctccacccgccgcgcgcgccagcacaagtgcgcgctgctcctccaagagatccctgccatctcctaccgaggtggcggcacctacaccaagggcgccttccagcaagccgcgcaaattcttcttcatgctagagaaaactcaacaaaagttgtatttctcatcactgatggatattccaatgggggagaccctagaccaattgcagcgtcactgcgagattcaggagtggagatcttcacttttggcatatggcaagggaacattcgagagctgaatgacatggcttccaccccaaaggaggagcactgttacctgctacacagttttgaagaatttgaggctttagctcgccgggcattgcatgaagatctaccttctgggagttttattcaagatgatatggtccactgctcatatctttgtgatgaaggcaaggactgctgtgaccgaatgggaagctgcaaatgtgggacacacacaggccattttgagtgcatctgtgaaaaggggtattacgggaaaggtctgcagtatgaatgcacagcttgcccatcggggacatacaaacctgaaggctcaccaggaggaatcagcagttgcattccatgtcctgatgaaaatcacacctctccacctggaagcacatcccctgaagactgtgtctgcagagagggatacagggcatctggccagacctgtgaacttgtccactgccctgccctgaagcctcccgaaaatggttactttatccaaaacacttgcaacaaccacttcaatgcagcctgtggggtccgatgtcaccctggatttgatcttgtgggaagcagcatcatcttatgtctacccaatggtttgtggtccggttcagagagctactgcagagtaagaacatgtcctcatctccgccagccgaaacatggccacatcagctgttctacaagggaaatgttatataagacaacatgtttggttgcctgtgatgaagggtacagactagaaggcagtgataagcttacttgtcaaggaaacagccagtgggatgggccagaaccccggtgtgtggagcgccactgttccacctttcagatgcccaaagatgtcatcatatccccccacaactgtggcaagcagccagccaaatttgggacgatctgctatgtaagttgccgccaagggttcattttatctggagtcaaagaaatgctgagatgtaccacttctggaaaatggaatgtcggagttcaggcagctgtgtgtaaagacgtggaggctcctcaaatcaactgtcctaaggacatagaggctaagactctggaacagcaagattctgccaatgttacctggcagattccaacagctaaagacaactctggtgaaaaggtgtcagtccacgttcatccagctttcaccccaccttaccttttcccaattggagatgttgctatcgtatacacggcaactgacctatccggcaaccaggccagctgcattttccatatcaaggttattgatgcagaaccacctgtcatagactggtgcagatctccacctcccgtccaggtctcggagaaggtacatgccgcaagctgggatgagcctcagttctcagacaactcaggggctgaattggtcattaccagaagtcatacacaaggagaccttttccctcaaggggagactatagtacagtatacagccactgacccctcaggcaataacaggacatgtgatatccatattgtcataaaaggttctccctgtgaaattccattcacacctgtaaatggggattttatatgcactccagataatactggagtcaactgtacattaacttgcttggagggctatgatttcacagaagggtctactgacaagtattattgtgcttatgaagatggcgtctggaaaccaacatataccactgaatggccagactgtgccaaaaaacgttttgcaaaccacgggttcaagtcctttgagatgttctacaaagcagctcgttgtgatgacacagatctgatgaagaagttttctgaagcatttgagacgaccctgggaaaaatggtcccatcattttgtagtgatgcagaggacattgactgcagactggaggagaacctgaccaaaaaatattgcctagaatataattatgactatgaaaatggctttgcaattggtaattaaattctgtggcatcggtagttggcaagactaatctgcaaaataagaataattccagaaaagtgaggcaaactagaaacattaacttctattaatttattcatcaagtattttaggatggctaaataatttgataatgtgctgaaagatcattaaggttatatcaaattttagtaacaaataaattatttaaaattatttgccaggattcttaaaaatgacaaaaactaagaaaactaagtcacatatgctggtaaaattcaaatgttgatgtatcctaaaagagaatagtaataaagtcctaacagcaactttt

SEQ ID NO: 30481 - DNA, 4088 bp, Homo sapiens
  source 1..4088: mol_type = unassigned DNA
ttggaaaaccagctagtattaaaggagttgaccaccgaggtaggagttgtgacattttcctgtaaagaagggcatgtcctgcaaggcccctctgtcctgaaatgcttgccatcccagcaatggaatgactctttccctgtttgtaagattgttctttgtaccccacctcccctaatttcctttggtgtccccattccttcttctgctcttcattttggaagtactgtcaagtattcttgtgtaggtgggtttttcctaagaggaaattctaccaccctctgccaacctgatggcacctggagctctccactgccagaatgtgttccagtagaatgtccccaacctgaggaaatccccaatggaatcattgatgtgcaaggccttgcctatctcagcacagctctctatacctgcaagccaggctttgaattggtgggaaatactaccaccctttgtggagaaaatggtcactggcttggaggaaaaccaacatgtaaagccattgagtgcctgaaacccaaggagattttgaatggcaaattctcttacacggacctacactatggacagaccgttacctactcttgcaaccgaggctttcggctcgaaggtcccagtgccttgacctgtttagagacaggtgattgggatgtagatgccccatcttgcaatgccatccactgtgattccccacaacccattgaaaatggttttgtagaaggtgcagattacagctatggtgccataatcatctacagttgcttccctgggtttcaggtggctggtcatgccatgcagacctgtgaagagtcaggatggtcaagttccatcccaacatgtatgccaatagactgtggcctccctcctcatatagattttggagactgtactaaactcaaagatgaccagggatattttgagcaagaagacgacatgatggaagttccatatgtgactcctcaccctccttatcatttgggagcagtggctaaaacctgggaaaatacaaaggagtctcctgctacacattcatcaaactttctgtatggtaccatggtttcatacacctgtaatccaggatatgaacttctggggaaccctgtgctgatctgccaggaagatggaacttggaatggcagtgcaccatcctgcatttcaattgaatgtgacttgcctactgctcctgaaaatggctttttgcgttttacagagactagcatgggaagtgctgtgcagtatagctgtaaacctggacacattctagcaggctctgacttaaggctttgtctagagaatagaaagtggagtggtgcctccccacgctgtgaagccatttcatgcaaaaagccaaatccagtcatgaatggatccatcaaaggaagcaactacacatacctgagcacgttgtactatgagtgtgaccccggatatgtgctgaatggcactgagaggagaacatgccaggatgacaaaactgggatgaggatgagcccatttgcattcctgtggactgcagttcacccccagtctcagccaatggccaggtgagaggagacgagtacacattccaaaaagagattgaatacacttgcaatgaagggttcttgcttgagggagccaggagtcgggtttgtcttgccaatggaagttggagtggagccactcccgactgtgtgcctgtcagatgtgccaccccgccacaactggccaatggggtgacggaaggcctggactatggcttcatgaaggaagtaacattccactgtcacgagggctacatcttgcacggtgctccaaaactcacctgtcagtcagatggcaactgggatgcagagattcctctctgtaaaccagtcaactgtggacctcctgaagatcttgcccatggtttccctaatggtttttcctttattcatgggggccatatacagtatcagtgctttcctggttataagctccatggaaattcatcaagaaggtgcctctccaatggctcctggagtggcagctcaccttcctgcctgccttgcagatgttccacaccagtaattgaatatggaactgtcaatgggacagattttgactgtggaaaggcagcccggattcagtgcttcaaaggcttcaagctcctaggactttctgaaatcacctgtgaagccgatggccagtggagctctgggttcccccactgtgaacacacttcttgtggttctcttccaatgataccaaatgcgttcatcagtgagaccagctcttggaaggaaaatgtgataacttacagctgcaggtctggatatgtcatacaaggcagttcagatctgatttgtacagagaaaggggtatggagccagccttatccagtctgtgagcccttgtcctgtgggtccccaccgtctgtcgccaatgcagtggcaactggagaggcacacacctatgaaagtgaagtgaaactcagatgtctggaaggttatacgatggatacagatacagatacattcacctgtcagaaagatggtcgctggttccctgagagaatctcctgcagtcctaaaaaatgtcctctcccggaaaacataacacatatacttgtacatggggacgatttcagtgtgaataggcaagtttctgtgtcatgtgcagaagggtatacctttgagggagttaacatatcagtatgtcagcttgatggaacctgggagccaccattctccgatgaatcttgcagtccagtttcttgtgggaaacctgaaagtccagaacatggatttgtggttggcagtaaatacacctttgaaagcacaattatttatcagtgtgagcctggctatgaactagaggggaacagggaacgtgtctgccaggagaacagacagtggagtggaggggtggcaatatgcaaagagaccaggtgtgaaactccacttgaatttctcaatgggaaagctgacattgaaaacaggacgactggacccaacgtggtatattcctgcaacagaggctacagtcttgaagggccatctgaggcacactgcacagaaaatggaacctggagccacccagtccctctctgcaaaccaaatccatgccctgttccttttgtgattcccgagaatgctctgctgtctgaaaaggagttttatgttgatcagaatgtgtccatcaaatgtagggaaggttttctgctgcagggccacggcatcattacctgcaaccccgacgagacgtggacacagacaagcgccaaatgtgaaaaaatctcatgtggtccaccagctcacgtagaaaatgcaattgctcgaggcgtacattatcaatatggagacatgatcacctactcatgttacagtggatacatgttggagggtttcctgaggagtgtttgtttagaaaatggaacatggacatcacctcctatttgcagagctgtctgtcgatttccatgtcagaatgggggcatctgccaacgcccaaatgcttgttcctgtccagagggctggatggggcgcctctgtgaagaaccaatctgcattcttccctgtctgaacggaggtcgctgtgtggccccttaccagtgtgactgcccgcctggctggacggggtctcgctgtcatacagctgtttgccagtctccctgcttaaatggtggaaaatgtgtaagaccaaaccgatgtcactgtctttcttcttggacgggacataactgttccaggaaaaggaggactgggttttaaccactgcacgaccatctggctctcccaaaagcaggatcatctctcctcggtagtgcctgggcatcctggaacttatgcaaagaaagtccaacatggtgctgggtcttgtttagtaaacttgttacttggggttactttttttattttgtgatatattttgttattccttgtgacatactttcttacatgtttccatttttaaatatgcctgtattttctatataaaaattatattaaatagatgctgctctaccctcacaaaatgtacatattctgctgtctattgggaaagttcctggtacacatttttattcagttacttaaaatgatttttccattaaagtatattttgctact

SEQ ID NO: 30482 - DNA, 12194 bp, Homo sapiens
  source 1..12194: mol_type = unassigned DNA
ccctccggagttcccgagctgctgaggagtctggattgtgtctgtccccagtgtcagatgaaagggcgctgaggctcttggccgctgccccgcgcccagctccgcgcacgcccctctgcgagtccggccgcccagcgcctcttcccgcccgagccgccgcctgcgctccggggcagccgctctgtctccagcgcgatgtggcctcgcctggccttttgttgctggggtctggcgctcgtttcgggctgggcgacctttcagcagatgtccccgtcgcgcaatttcagcttccgcctcttccccgagaccgcgcccggggcccccgggagtatccccgcgccgcccgctcctggcgacgaagcggcggggagcagagtggagcggctgggccaggcgttccggcgacgcgtgcggctgctgcgggagctcagcgagcgcctggagcttgtcttcctggtggatgattcgtccagcgtgggcgaagtcaacttccgcagcgagctcatgttcgtccgcaagctgctgtccgacttccccgtggtgcccacggccacgcgcgtggccatcgtgaccttctcgtccaagaactacgtggtgccgcgcgtcgattacatctccacccgccgcgcgcgccagcacaagtgcgcgctgctcctccaagagatccctgccatctcctaccgaggtggcggcacctacaccaagggcgccttccagcaagccgcgcaaattcttcttcatgctagagaaaactcaacaaaagttgtatttctcatcactgatggatattccaatgggggagaccctagaccaattgcagcgtcactgcgagattcaggagtggagatcttcacttttggcatatggcaagggaacattcgagagctgaatgacatggcttccaccccaaaggaggagcactgttacctgctacacagttttgaagaatttgaggctttagctcgccgggcattgcatgaagatctaccttctgggagttttattcaagatgatatggtccactgctcatatctttgtgatgaaggcaaggactgctgtgaccgaatgggaagctgcaaatgtgggacacacacaggccattttgagtgcatctgtgaaaaggggtattacgggaaaggtctgcagtatgaatgcacagcttgcccatcggggacatacaaacctgaaggctcaccaggaggaatcagcagttgcattccatgtcctgatgaaaatcacacctctccacctggaagcacatcccctgaagactgtgtctgcagagagggatacagggcatctggccagacctgtgaacttgtccactgccctgccctgaagcctcccgaaaatggttactttatccaaaacacttgcaacaaccacttcaatgcagcctgtggggtccgatgtcaccctggatttgatcttgtgggaagcagcatcatcttatgtctacccaatggtttgtggtccggttcagagagctactgcagagtaagaacatgtcctcatctccgccagccgaaacatggccacatcagctgttctacaagggaaatgttatataagacaacatgtttggttgcctgtgatgaagggtacagactagaaggcagtgataagcttacttgtcaaggaaacagccagtgggatgggccagaaccccggtgtgtggagcgccactgttccacctttcagatgcccaaagatgtcatcatatccccccacaactgtggcaagcagccagccaaatttgggacgatctgctatgtaagttgccgccaagggttcattttatctggagtcaaagaaatgctgagatgtaccacttctggaaaatggaatgtcggagttcaggcagctgtgtgtaaagacgtggaggctcctcaaatcaactgtcctaaggacatagaggctaagactctggaacagcaagattctgccaatgttacctggcagattccaacagctaaagacaactctggtgaaaaggtgtcagtccacgttcatccagctttcaccccaccttaccttttcccaattggagatgttgctatcgtatacacggcaactgacctatccggcaaccaggccagctgcattttccatatcaaggttattgatgcagaaccacctgtcatagactggtgcagatctccacctcccgtccaggtctcggagaaggtacatgccgcaagctgggatgagcctcagttctcagacaactcaggggctgaattggtcattaccagaagtcatacacaaggagaccttttccctcaaggggagactatagtacagtatacagccactgacccctcaggcaataacaggacatgtgatatccatattgtcataaaaggttctccctgtgaaattccattcacacctgtaaatggggattttatatgcactccagataatactggagtcaactgtacattaacttgcttggagggctatgatttcacagaagggtctactgacaagtattattgtgcttatgaagatggcgtctggaaaccaacatataccactgaatggccagactgtgccaaaaaacgttttgcaaaccacgggttcaagtcctttgagatgttctacaaagcagctcgttgtgatgacacagatctgatgaagaagttttctgaagcatttgagacgaccctgggaaaaatggtcccatcattttgtagtgatgcagaggacattgactgcagactggaggagaacctgaccaaaaaatattgcctagaatataattatgactatgaaaatggctttgcaattggaccaggtggctggggtgcagctaataggctggattactcttacgatgacttcctggacactgtgcaagaaacagccacaagcatcggcaatgccaagtcctcacggattaaaagaagtgccccattatctgactataaaattaagttaatttttaacatcacagctagtgtgccattacccgatgaaagaaatgatacccttgaatgggaaaatcagcaacgactccttcagacattggaaactatcacaaataaactgaaaaggactctcaacaaagaccccatgtattcctttcagcttgcatcagaaatacttatagccgacagcaattcattagaaacaaaaaaggcttcccccttctgcagaccaggctcagtgctgagagggcgtatgtgtgtcaattgccctttgggaacctattataatctggaacatttcacctgtgaaagctgccggatcggatcctatcaagatgaagaagggcaacttgagtgcaagctttgcccctctgggatgtacacggaatatatccattcaagaaacatctctgattgtaaagctcagtgtaaacaaggcacctactcatacagtggacttgagacttgtgaatcgtgtccactgggcacttatcagccaaaatttggttcccggagctgcctctcgtgtccagaaaacacctcaactgtgaaaagaggagccgtgaacatttctgcatgtggagttccttgtccagaaggaaaattctcgcgttctgggttaatgccctgtcacccatgtcctcgtgactattaccaacctaatgcagggaaggccttctgcctggcctgtcccttttatggaactaccccattcgctggttccagatccatcacagaatgttcaagttttagttcaactttctcagcggcagaggaaagtgtggtgccccctgcctctcttggacatattaaaaagaggcatgaaatcagcagtcaggttttccatgaatgcttctttaacccttgccacaatagtggaacctgccagcaacttgggcgtggttatgtttgtctctgtccacttggatatacaggcttaaagtgtgaaacagacatcgatgagtgcagcccactgccttgcctcaacaatggagtttgtaaagacctagttggggaattcatttgtgagtgcccatcaggttacacaggtcagcggtgtgaagaaaatataaatgagtgtagctccagtccttgtttaaataaaggaatctgtgttgatggtgtggctggctatcgttgcacatgtgtgaaaggatttgtaggcctgcattgtgaaacagaagtcaatgaatgccagtcaaacccatgcttaaataatgcagtctgtgaagaccaggttgggggattcttgtgcaaatgcccacctggatttttgggtacccgatgtggaaagaacgtcgatgagtgtctcagtcagccatgcaaaaatggagctacctgtaaagacggtgccaatagcttcagatgcctgtgtgcagctggcttcacaggatcacactgtgaattgaacatcaatgaatgtcagtctaatccatgtagaaatcaggccacctgtgtggatgaattaaattcatacagttgtaaatgtcagccaggattttcaggcaaaaggtgtgaaacagaacagtctacaggctttaacctggattttgaagtttctggcatctatggatatgtcatgctagatggcatgctcccatctctccatgctctaacctgtaccttctggatgaaatcctctgacgacatgaactatggaacaccaatctcctatgcagttgataacggcagcgacaataccttgctcctgactgattataacggctgggttctttatgtgaatggcagggaaaagataacaaactgtccctcggtgaatgatggcagatggcatcatattgcaatcacttggacaagtgccaatggcatctggaaagtctatatcgatgggaaattatctgacggtggtgctggcctctctgttggtttgcccatacctggtggtggtgcgttagttctggggcaagagcaagacaaaaaaggagagggattcagcccagctgagtcttttgtgggctccataagccagctcaacctctgggactatgtcctgtctccacagcaggtgaagtcactggctacctcctgcccagaggaactcagtaaaggaaacgtgttagcatggcctgatttcttgtcaggaattgtggggaaagtgaagatcgattctaagagcatattttgttctgattgcccacgcttaggagggtcagtgcctcatctgagaactgcatctgaagatttaaagccaggttccaaagtcaatctgttctgtgatccaggcttccagctggtcgggaaccctgtgcagtactgtctgaatcaaggacagtggacacaaccacttcctcactgtgaacgcattagctgtggggtgccacctcctttggagaatggcttccattcagccgatgacttctatgctggcagcacagtaacctaccagtgcaacaatggctactatctattgggtgactcaaggatgttctgtacagataatgggagctggaacggcgtttcaccatcctgccttgatgtcgatgagtgtgcagttggatcagattgtagtgagcatgcttcttgcctgaacgtagatggatcctacatatgttcatgtgtcccaccgtacacaggagatgggaaaaactgtgcagaacctataaaatgtaaggctccaggaaatccggaaaatggccactcctcaggtgagatttatacagtaggtgccgaagtcacattttcgtgtcaggaaggataccagttgatgggagtaaccaaaatcacatgtttggagtctggagaatggaatcatctaataccatattgtaaagctgtttcatgtggtaaaccggctattccagaaaatggttgcattgaggagttagcatttacttttggcagcaaagtgacatataggtgtaataaaggatatactctggccggtgataaagaatcatcctgtcttgctaacagttcttggagtcattcccctcctgtgtgtgaaccagtgaagtgttctagtccggaaaatataaataatggaaaatatattttgagtgggcttacctacctttctactgcatcatattcatgcgatacaggatacagcttacagggcccttccattattgaatgcacggcttctggcatctgggacagagcgccacctgcctgtcacctcgtcttctgtggagaaccacctgccatcaaagatgctgtcattacggggaataacttcactttcaggaacaccgtcacttacacttgcaaagaaggctatactcttgctggtcttgacaccattgaatgcctggccgacggcaagtggagtagaagtgaccagcagtgcctggctgtctcctgtgatgagccacccattgtggaccacgcctctccagagactgcccatcggctctttggagacattgcattctactactgctctgatggttacagcctagcagacaattcccagcttctctgcaatgcccagggcaagtgggtacccccagaaggtcaagacatgccccgttgtatagctcatttctgtgaaaaacctccatcggtttcctatagcatcttggaatctgtgagcaaagcaaaatttgcagctggctcagttgtgagctttaaatgcatggaaggctttgtactgaacacctcagcaaagattgaatgtatgagaggtgggcagtggaacccttcccccatgtccatccagtgcatccctgtgcggtgtggagagccaccaagcatcatgaatggctatgcaagtggatcaaactacagttttggagccatggtggcttacagctgcaacaaggggttctacatcaaaggggaaaagaagagcacctgcgaagccacagggcagtggagtagtcctataccgacgtgccacccggtatcttgtggtgaaccacctaaggttgagaatggctttctggagcatacaactggcaggatctttgagagtgaagtgaggtatcagtgtaacccgggctataagtcagtcggaagtcctgtatttgtctgccaagccaatcgccactggcacagtgaatcccctctgatgtgtgttcctctcgactgtggaaaacctcccccgatccagaatggcttcatgaaaggagaaaactttgaagtagggtccaaggttcagtttttctgtaatgagggttatgagcttgttggtgacagttcttggacatgtcagaaatctggcaaatggaataagaagtcaaatccaaagtgcatgcctgccaagtgcccagagccgcccctcttggaaaaccagctagtattaaaggagttgaccaccgaggtaggagttgtgacattttcctgtaaagaagggcatgtcctgcaaggcccctctgtcctgaaatgcttgccatcccagcaatggaatgactctttccctgtttgtaagattgttctttgtaccccacctcccctaatttcctttggtgtccccattccttcttctgctcttcattttggaagtactgtcaagtattcttgtgtaggtgggtttttcctaagaggaaattctaccaccctctgccaacctgatggcacctggagctctccactgccagaatgtgttccagtagaatgtccccaacctgaggaaatccccaatggaatcattgatgtgcaaggccttgcctatctcagcacagctctctatacctgcaagccaggctttgaattggtgggaaatactaccaccctttgtggagaaaatggtcactggcttggaggaaaaccaacatgtaaagccattgagtgcctgaaacccaaggagattttgaatggcaaattctcttacacggacctacactatggacagaccgttacctactcttgcaaccgaggctttcggctcgaaggtcccagtgccttgacctgtttagagacaggtgattgggatgtagatgccccatcttgcaatgccatccactgtgattccccacaacccattgaaaatggttttgtagaaggtgcagattacagctatggtgccataatcatctacagttgcttccctgggtttcaggtggctggtcatgccatgcagacctgtgaagagtcaggatggtcaagttccatcccaacatgtatgccaatagactgtggcctccctcctcatatagattttggagactgtactaaactcaaagatgaccagggatattttgagcaagaagacgacatgatggaagttccatatgtgactcctcaccctccttatcatttgggagcagtggctaaaacctgggaaaatacaaaggagtctcctgctacacattcatcaaactttctgtatggtaccatggtttcatacacctgtaatccaggatatgaacttctggggaaccctgtgctgatctgccaggaagatggaacttggaatggcagtgcaccatcctgcatttcaattgaatgtgacttgcctactgctcctgaaaatggctttttgcgttttacagagactagcatgggaagtgctgtgcagtatagctgtaaacctggacacattctagcaggctctgacttaaggctttgtctagagaatagaaagtggagtggtgcctccccacgctgtgaagccatttcatgcaaaaagccaaatccagtcatgaatggatccatcaaaggaagcaactacacatacctgagcacgttgtactatgagtgtgaccccggatatgtgctgaatggcactgagaggagaacatgccaggatgacaaaaactgggatgaggatgagcccatttgcattcctgtggactgcagttcacccccagtctcagccaatggccaggtgagaggagacgagtacacattccaaaaagagattgaatacacttgcaatgaagggttcttgcttgagggagccaggagtcgggtttgtcttgccaatggaagttggagtggagccactcccgactgtgtgcctgtcagatgtgccaccccgccacaactggccaatggggtgacggaaggcctggactatggcttcatgaaggaagtaacattccactgtcacgagggctacatcttgcacggtgctccaaaactcacctgtcagtcagatggcaactgggatgcagagattcctctctgtaaaccagtcaactgtggacctcctgaagatcttgcccatggtttccctaatggtttttcctttattcatgggggccatatacagtatcagtgctttcctggttataagctccatggaaattcatcaagaaggtgcctctccaatggctcctggagtggcagctcaccttcctgcctgccttgcagatgttccacaccagtaattgaatatggaactgtcaatgggacagattttgactgtggaaaggcagcccggattcagtgcttcaaaggcttcaagctcctaggactttctgaaatcacctgtgaagccgatggccagtggagctctgggttcccccactgtgaacacacttcttgtggttctcttccaatgataccaaatgcgttcatcagtgagaccagctcttggaaggaaaatgtgataacttacagctgcaggtctggatatgtcatacaaggcagttcagatctgatttgtacagagaaaggggtatggagccagccttatccagtctgtgagcccttgtcctgtgggtccccaccgtctgtcgccaatgcagtggcaactggagaggcacacacctatgaaagtgaagtgaaactcagatgtctggaaggttatacgatggatacagatacagatacattcacctgtcagaaagatggtcgctggttccctgagagaatctcctgcagtcctaaaaaatgtcctctcccggaaaacataacacatatacttgtacatggggacgatttcagtgtgaataggcaagtttctgtgtcatgtgcagaagggtatacctttgagggagttaacatatcagtatgtcagcttgatggaacctgggagccaccattctccgatgaatcttgcagtccagtttcttgtgggaaacctgaaagtccagaacatggatttgtggttggcagtaaatacacctttgaaagcacaattatttatcagtgtgagcctggctatgaactagaggggaacagggaacgtgtctgccaggagaacagacagtggagtggaggggtggcaatatgcaaagagaccaggtgtgaaactccacttgaatttctcaatgggaaagctgacattgaaaacaggacgactggacccaacgtggtatattcctgcaacagaggctacagtcttgaagggccatctgaggcacactgcacagaaaatggaacctggagccacccagtccctctctgcaaaccaaatccatgccctgttccttttgtgattcccgagaatgctctgctgtctgaaaaggagttttatgttgatcagaatgtgtccatcaaatgtagggaaggttttctgctgcagggccacggcatcattacctgcaaccccgacgagacgtggacacagacaagcgccaaatgtgaaaaaatctcatgtggtccaccagctcacgtagaaaatgcaattgctcgaggcgtacattatcaatatggagacatgatcacctactcatgttacagtggatacatgttggagggtttcctgaggagtgtttgtttagaaaatggaacatggacatcacctcctatttgcagagctgtctgtcgatttccatgtcagaatgggggcatctgccaacgcccaaatgcttgttcctgtccagagggctggatggggcgcctctgtgaagaaccaatctgcattcttccctgtctgaacggaggtcgctgtgtggccccttaccagtgtgactgcccgcctggctggacggggtctcgctgtcatacagctgtttgccagtctccctgcttaaatggtggaaaatgtgtaagaccaaaccgatgtcactgtctttcttcttggacgggacataactgttccaggaaaaggaggactgggttttaaccactgcacgaccatctggctctcccaaaagcaggatcatctctcctcggtagtgcctgggcatcctggaacttatgcaaagaaagtccaacatggtgctgggtcttgtttagtaaacttgttacttggggttactttttttattttgtgatatattttgttattccttgtgacatactttcttacatgtttccatttttaaatatgcctgtattttctatataaaaattatattaaatagatgctgctctaccctcacaaaatgtacatattctgctgtctattgggaaagttcctggtacacatttttattcagttacttaaaatgatttttccattaaagtatattttgctactaaataatattttgctggatagtaccattttatgaggtggccaagggattcatagagaggactcatgatctttcatctgtgccactggcaccacataggagaccccttacaataaaggagacccctttgttctggttccatcttctatacaatatgtgtaataataaaagctttttctttcatttaatcaatcagagagtaactgttggacctggtactctccaccacataattatgtcctggtacttagggtagcctggctaattcttttcacaacatttgaaaagccgtaggcattaacttcatggatgtggagaaacagcataatgaccttggttcacaatgaaagtgctagccttctttctcgtggctggaataagaaatgcaagaactggaagattaacaaagagctgatacccggactggtaatcccacaactcactattttgggaggaaggggaagacagggaaagagaaggaaaaaggcaaatgggaaacattccccagagctgtgctcctggtctcacctgcaaaaaagaattgcagccacctaagagaaagctgagctgcccctcagtcctcactgtcacctacctctatcacaacaattgtaccaagatgaagccttccccagacttcagaaaataaagtcaaaccctagattttgttttaaaataggaaactcagaatcaacttgcctccatcctctgggaaaactgctcccacacaggccttggagtgtgttgtagcactgtggaggaatgcagaaaggatgaaagagatcttgattctcctagtggttctcttcactaccgtaggcatccctcagccattgactcctccttctttctcttgacattcactttcttggccagtcttacatgcttatgagtctactttccaataaatttactcatagtccattaa

SEQ ID NO: 30483 - DNA, 12341 bp, Homo sapiens
  source 1..12341: mol_type = unassigned DNA
agggagagaaggagggaagcgggagatttttcttgactgccccctttccttcaaacattttataggcttcagggagagagaggaggaggagagagggaagaaaaaaagaggagagcgagaggggtagagagcgcgcgccgttccctccggagttcccgagctgctgaggagtctggattgtgtctgtccccagtgtcagatgaaagggcgctgaggctcttggccgctgccccgcgcccagctccgcgcacgcccctctgcgagtccggccgcccagcgcctcttcccgcccgagccgccgcctgcgctccggggcagccgctctgtctccagcgcgatgtggcctcgcctggccttttgttgctggggtctggcgctcgtttcgggctgggcgacctttcagcagatgtccccgtcgcgcaatttcagcttccgcctcttccccgagaccgcgcccggggcccccgggagtatccccgcgccgcccgctcctggcgacgaagcggcggggagcagagtggagcggctgggccaggcgttccggcgacgcgtgcggctgctgcgggagctcagcgagcgcctggagcttgtcttcctggtggatgattcgtccagcgtgggcgaagtcaacttccgcagcgagctcatgttcgtccgcaagctgctgtccgacttccccgtggtgcccacggccacgcgcgtggccatcgtgaccttctcgtccaagaactacgtggtgccgcgcgtcgattacatctccacccgccgcgcgcgccagcacaagtgcgcgctgctcctccaagagatccctgccatctcctaccgaggtggcggcacctacaccaagggcgccttccagcaagccgcgcaaattcttcttcatgctagagaaaactcaacaaaagttgtatttctcatcactgatggatattccaatgggggagaccctagaccaattgcagcgtcactgcgagattcaggagtggagatcttcacttttggcatatggcaagggaacattcgagagctgaatgacatggcttccaccccaaaggaggagcactgttacctgctacacagttttgaagaatttgaggctttagctcgccgggcattgcatgaagatctaccttctgggagttttattcaagatgatatggtccactgctcatatctttgtgatgaaggcaaggactgctgtgaccgaatgggaagctgcaaatgtgggacacacacaggccattttgagtgcatctgtgaaaaggggtattacgggaaaggtctgcagtatgaatgcacagcttgcccatcggggacatacaaacctgaaggctcaccaggaggaatcagcagttgcattccatgtcctgatgaaaatcacacctctccacctggaagcacatcccctgaagactgtgtctgcagagagggatacagggcatctggccagacctgtgaacttgtccactgccctgccctgaagcctcccgaaaatggttactttatccaaaacacttgcaacaaccacttcaatgcagcctgtggggtccgatgtcaccctggatttgatcttgtgggaagcagcatcatcttatgtctacccaatggtttgtggtccggttcagagagctactgcagagtaagaacatgtcctcatctccgccagccgaaacatggccacatcagctgttctacaagggaaatgttatataagacaacatgtttggttgcctgtgatgaagggtacagactagaaggcagtgataagcttacttgtcaaggaaacagccagtgggatgggccagaaccccggtgtgtggagcgccactgttccacctttcagatgcccaaagatgtcatcatatccccccacaactgtggcaagcagccagccaaatttgggacgatctgctatgtaagttgccgccaagggttcattttatctggagtcaaagaaatgctgagatgtaccacttctggaaaatggaatgtcggagttcaggcagctgtgtgtaaagacgtggaggctcctcaaatcaactgtcctaaggacatagaggctaagactctggaacagcaagattctgccaatgttacctggcagattccaacagctaaagacaactctggtgaaaaggtgtcagtccacgttcatccagctttcaccccaccttaccttttcccaattggagatgttgctatcgtatacacggcaactgacctatccggcaaccaggccagctgcattttccatatcaaggttattgatgcagaaccacctgtcatagactggtgcagatctccacctcccgtccaggtctcggagaaggtacatgccgcaagctgggatgagcctcagttctcagacaactcaggggctgaattggtcattaccagaagtcatacacaaggagaccttttccctcaaggggagactatagtacagtatacagccactgacccctcaggcaataacaggacatgtgatatccatattgtcataaaaggttctccctgtgaaattccattcacacctgtaaatggggattttatatgcactccagataatactggagtcaactgtacattaacttgcttggagggctatgatttcacagaagggtctactgacaagtattattgtgcttatgaagatggcgtctggaaaccaacatataccactgaatggccagactgtgccaaaaaacgttttgcaaaccacgggttcaagtcctttgagatgttctacaaagcagctcgttgtgatgacacagatctgatgaagaagttttctgaagcatttgagacgaccctgggaaaaatggtcccatcattttgtagtgatgcagaggacattgactgcagactggaggagaacctgaccaaaaaatattgcctagaatataattatgactatgaaaatggctttgcaattggaccaggtggctggggtgcagctaataggctggattactcttacgatgacttcctggacactgtgcaagaaacagccacaagcatcggcaatgccaagtcctcacggattaaaagaagtgccccattatctgactataaaattaagttaatttttaacatcacagctagtgtgccattacccgatgaaagaaatgatacccttgaatgggaaaatcagcaacgactccttcagacattggaaactatcacaaataaactgaaaaggactctcaacaaagaccccatgtattcctttcagcttgcatcagaaatacttatagccgacagcaattcattagaaacaaaaaaggcttcccccttctgcagaccaggctcagtgctgagagggcgtatgtgtgtcaattgccctttgggaacctattataatctggaacatttcacctgtgaaagctgccggatcggatcctatcaagatgaagaagggcaacttgagtgcaagctttgcccctctgggatgtacacggaatatatccattcaagaaacatctctgattgtaaagctcagtgtaaacaaggcacctactcatacagtggacttgagacttgtgaatcgtgtccactgggcacttatcagccaaaatttggttcccggagctgcctctcgtgtccagaaaacacctcaactgtgaaaagaggagccgtgaacatttctgcatgtggagttccttgtccagaaggaaaattctcgcgttctgggttaatgccctgtcacccatgtcctcgtgactattaccaacctaatgcagggaaggccttctgcctggcctgtcccttttatggaactaccccattcgctggttccagatccatcacagaatgttcaagttttagttcaactttctcagcggcagaggaaagtgtggtgccccctgcctctcttggacatattaaaaagaggcatgaaatcagcagtcaggttttccatgaatgcttctttaacccttgccacaatagtggaacctgccagcaacttgggcgtggttatgtttgtctctgtccacttggatatacaggcttaaagtgtgaaacagacatcgatgagtgcagcccactgccttgcctcaacaatggagtttgtaaagacctagttggggaattcatttgtgagtgcccatcaggttacacaggtcagcggtgtgaagaaaatataaatgagtgtagctccagtccttgtttaaataaaggaatctgtgttgatggtgtggctggctatcgttgcacatgtgtgaaaggatttgtaggcctgcattgtgaaacagaagtcaatgaatgccagtcaaacccatgcttaaataatgcagtctgtgaagaccaggttgggggattcttgtgcaaatgcccacctggatttttgggtacccgatgtggaaagaacgtcgatgagtgtctcagtcagccatgcaaaaatggagctacctgtaaagacggtgccaatagcttcagatgcctgtgtgcagctggcttcacaggatcacactgtgaattgaacatcaatgaatgtcagtctaatccatgtagaaatcaggccacctgtgtggatgaattaaattcatacagttgtaaatgtcagccaggattttcaggcaaaaggtgtgaaacagaacagtctacaggctttaacctggattttgaagtttctggcatctatggatatgtcatgctagatggcatgctcccatctctccatgctctaacctgtaccttctggatgaaatcctctgacgacatgaactatggaacaccaatctcctatgcagttgataacggcagcgacaataccttgctcctgactgattataacggctgggttctttatgtgaatggcagggaaaagataacaaactgtccctcggtgaatgatggcagatggcatcatattgcaatcacttggacaagtgccaatggcatctggaaagtctatatcgatgggaaattatctgacggtggtgctggcctctctgttggtttgcccatacctggtggtggtgcgttagttctggggcaagagcaagacaaaaaaggagagggattcagcccagctgagtcttttgtgggctccataagccagctcaacctctgggactatgtcctgtctccacagcaggtgaagtcactggctacctcctgcccagaggaactcagtaaaggaaacgtgttagcatggcctgatttcttgtcaggaattgtggggaaagtgaagatcgattctaagagcatattttgttctgattgcccacgcttaggagggtcagtgcctcatctgagaactgcatctgaagatttaaagccaggttccaaagtcaatctgttctgtgatccaggcttccagctggtcgggaaccctgtgcagtactgtctgaatcaaggacagtggacacaaccacttcctcactgtgaacgcattagctgtggggtgccacctcctttggagaatggcttccattcagccgatgacttctatgctggcagcacagtaacctaccagtgcaacaatggctactatctattgggtgactcaaggatgttctgtacagataatgggagctggaacggcgtttcaccatcctgccttgatgtcgatgagtgtgcagttggatcagattgtagtgagcatgcttcttgcctgaacgtagatggatcctacatatgttcatgtgtcccaccgtacacaggagatgggaaaaactgtgcagaacctataaaatgtaaggctccaggaaatccggaaaatggccactcctcaggtgagatttatacagtaggtgccgaagtcacattttcgtgtcaggaaggataccagttgatgggagtaaccaaaatcacatgtttggagtctggagaatggaatcatctaataccatattgtaaagctgtttcatgtggtaaaccggctattccagaaaatggttgcattgaggagttagcatttacttttggcagcaaagtgacatataggtgtaataaaggatatactctggccggtgataaagaatcatcctgtcttgctaacagttcttggagtcattcccctcctgtgtgtgaaccagtgaagtgttctagtccggaaaatataaataatggaaaatatattttgagtgggcttacctacctttctactgcatcatattcatgcgatacaggatacagcttacagggcccttccattattgaatgcacggcttctggcatctgggacagagcgccacctgcctgtcacctcgtcttctgtggagaaccacctgccatcaaagatgctgtcattacggggaataacttcactttcaggaacaccgtcacttacacttgcaaagaaggctatactcttgctggtcttgacaccattgaatgcctggccgacggcaagtggagtagaagtgaccagcagtgcctggctgtctcctgtgatgagccacccattgtggaccacgcctctccagagactgcccatcggctctttggagacattgcattctactactgctctgatggttacagcctagcagacaattcccagcttctctgcaatgcccagggcaagtgggtacccccagaaggtcaagacatgccccgttgtatagctcatttctgtgaaaaacctccatcggtttcctatagcatcttggaatctgtgagcaaagcaaaatttgcagctggctcagttgtgagctttaaatgcatggaaggctttgtactgaacacctcagcaaagattgaatgtatgagaggtgggcagtggaacccttcccccatgtccatccagtgcatccctgtgcggtgtggagagccaccaagcatcatgaatggctatgcaagtggatcaaactacagttttggagccatggtggcttacagctgcaacaaggggttctacatcaaaggggaaaagaagagcacctgcgaagccacagggcagtggagtagtcctataccgacgtgccacccggtatcttgtggtgaaccacctaaggttgagaatggctttctggagcatacaactggcaggatctttgagagtgaagtgaggtatcagtgtaacccgggctataagtcagtcggaagtcctgtatttgtctgccaagccaatcgccactggcacagtgaatcccctctgatgtgtgttcctctcgactgtggaaaacctcccccgatccagaatggcttcatgaaaggagaaaactttgaagtagggtccaaggttcagtttttctgtaatgagggttatgagcttgttggtgacagttcttggacatgtcagaaatctggcaaatggaataagaagtcaaatccaaagtgcatgcctgccaagtgcccagagccgcccctcttggaaaaccagctagtattaaaggagttgaccaccgaggtaggagttgtgacattttcctgtaaagaagggcatgtcctgcaaggcccctctgtcctgaaatgcttgccatcccagcaatggaatgactctttccctgtttgtaagattgttctttgtaccccacctcccctaatttcctttggtgtccccattccttcttctgctcttcattttggaagtactgtcaagtattcttgtgtaggtgggtttttcctaagaggaaattctaccaccctctgccaacctgatggcacctggagctctccactgccagaatgtgttccagtagaatgtccccaacctgaggaaatccccaatggaatcattgatgtgcaaggccttgcctatctcagcacagctctctatacctgcaagccaggctttgaattggtgggaaatactaccaccctttgtggagaaaatggtcactggcttggaggaaaaccaacatgtaaagccattgagtgcctgaaacccaaggagattttgaatggcaaattctcttacacggacctacactatggacagaccgttacctactcttgcaaccgaggctttcggctcgaaggtcccagtgccttgacctgtttagagacaggtgattgggatgtagatgccccatcttgcaatgccatccactgtgattccccacaacccattgaaaatggttttgtagaaggtgcagattacagctatggtgccataatcatctacagttgcttccctgggtttcaggtggctggtcatgccatgcagacctgtgaagagtcaggatggtcaagttccatcccaacatgtatgccaatagactgtggcctccctcctcatatagattttggagactgtactaaactcaaagatgaccagggatattttgagcaagaagacgacatgatggaagttccatatgtgactcctcaccctccttatcatttgggagcagtggctaaaacctgggaaaatacaaaggagtctcctgctacacattcatcaaactttctgtatggtaccatggtttcatacacctgtaatccaggatatgaacttctggggaaccctgtgctgatctgccaggaagatggaacttggaatggcagtgcaccatcctgcatttcaattgaatgtgacttgcctactgctcctgaaaatggctttttgcgttttacagagactagcatgggaagtgctgtgcagtatagctgtaaacctggacacattctagcaggctctgacttaaggctttgtctagagaatagaaagtggagtggtgcctccccacgctgtgaagccatttcatgcaaaaagccaaatccagtcatgaatggatccatcaaaggaagcaactacacatacctgagcacgttgtactatgagtgtgaccccggatatgtgctgaatggcactgagaggagaacatgccaggatgacaaaaactgggatgaggatgagcccatttgcattcctgtggactgcagttcacccccagtctcagccaatggccaggtgagaggagacgagtacacattccaaaaagagattgaatacacttgcaatgaagggttcttgcttgagggagccaggagtcgggtttgtcttgccaatggaagttggagtggagccactcccgactgtgtgcctgtcagatgtgccaccccgccacaactggccaatggggtgacggaaggcctggactatggcttcatgaaggaagtaacattccactgtcacgagggctacatcttgcacggtgctccaaaactcacctgtcagtcagatggcaactgggatgcagagattcctctctgtaaaccagtcaactgtggacctcctgaagatcttgcccatggtttccctaatggtttttcctttattcatgggggccatatacagtatcagtgctttcctggttataagctccatggaaattcatcaagaaggtgcctctccaatggctcctggagtggcagctcaccttcctgcctgccttgcagatgttccacaccagtaattgaatatggaactgtcaatgggacagattttgactgtggaaaggcagcccggattcagtgcttcaaaggcttcaagctcctaggactttctgaaatcacctgtgaagccgatggccagtggagctctgggttcccccactgtgaacacacttcttgtggttctcttccaatgataccaaatgcgttcatcagtgagaccagctcttggaaggaaaatgtgataacttacagctgcaggtctggatatgtcatacaaggcagttcagatctgatttgtacagagaaaggggtatggagccagccttatccagtctgtgagcccttgtcctgtgggtccccaccgtctgtcgccaatgcagtggcaactggagaggcacacacctatgaaagtgaagtgaaactcagatgtctggaaggttatacgatggatacagatacagatacattcacctgtcagaaagatggtcgctggttccctgagagaatctcctgcagtcctaaaaaatgtcctctcccggaaaacataacacatatacttgtacatggggacgatttcagtgtgaataggcaagtttctgtgtcatgtgcagaagggtatacctttgagggagttaacatatcagtatgtcagcttgatggaacctgggagccaccattctccgatgaatcttgcagtccagtttcttgtgggaaacctgaaagtccagaacatggatttgtggttggcagtaaatacacctttgaaagcacaattatttatcagtgtgagcctggctatgaactagaggggaacagggaacgtgtctgccaggagaacagacagtggagtggaggggtggcaatatgcaaagagaccaggtgtgaaactccacttgaatttctcaatgggaaagctgacattgaaaacaggacgactggacccaacgtggtatattcctgcaacagaggctacagtcttgaagggccatctgaggcacactgcacagaaaatggaacctggagccacccagtccctctctgcaaaccaaatccatgccctgttccttttgtgattcccgagaatgctctgctgtctgaaaaggagttttatgttgatcagaatgtgtccatcaaatgtagggaaggttttctgctgcagggccacggcatcattacctgcaaccccgacgagacgtggacacagacaagcgccaaatgtgaaaaaatctcatgtggtccaccagctcacgtagaaaatgcaattgctcgaggcgtacattatcaatatggagacatgatcacctactcatgttacagtggatacatgttggagggtttcctgaggagtgtttgtttagaaaatggaacatggacatcacctcctatttgcagagctgtctgtcgatttccatgtcagaatgggggcatctgccaacgcccaaatgcttgttcctgtccagagggctggatggggcgcctctgtgaagaaccaatctgcattcttccctgtctgaacggaggtcgctgtgtggccccttaccagtgtgactgcccgcctggctggacggggtctcgctgtcatacagctgtttgccagtctccctgcttaaatggtggaaaatgtgtaagaccaaaccgatgtcactgtctttcttcttggacgggacataactgttccaggaaaaggaggactgggttttaaccactgcacgaccatctggctctcccaaaagcaggatcatctctcctcggtagtgcctgggcatcctggaacttatgcaaagaaagtccaacatggtgctgggtcttgtttagtaaacttgttacttggggttactttttttattttgtgatatattttgttattccttgtgacatactttcttacatgtttccatttttaaatatgcctgtattttctatataaaaattatattaaatagatgctgctctaccctcacaaaatgtacatattctgctgtctattgggaaagttcctggtacacatttttattcagttacttaaaatgatttttccattaaagtatattttgctactaaataatattttgctggatagtaccattttatgaggtggccaagggattcatagagaggactcatgatctttcatctgtgccactggcaccacataggagaccccttacaataaaggagacccctttgttctggttccatcttctatacaatatgtgtaataataaaagctttttctttcatttaatcaatcagagagtaactgttggacctggtactctccaccacataattatgtcctggtacttagggtagcctggctaattcttttcacaacatttgaaaagccgtaggcattaacttcatggatgtggagaaacagcataatgaccttggttcacaatgaaagtgctagccttctttctcgtggctggaataagaaatgcaagaactggaagattaacaaagagctgatacccggactggtaatcccacaactcactattttgggaggaaggggaagacagggaaagagaaggaaaaaggcaaatgggaaacattccccagagctgtgctcctggtctcacctgcaaaaaagaattgcagccacctaagagaaagctgagctgcccctcagtcctcactgtcacctacctctatcacaacaattgtaccaagatgaagccttccccagacttcagaaaataaagtcaaaccctagattttgttttaaaataggaaactcagaatcaacttgcctccatcctctgggaaaactgctcccacacaggccttggagtgtgttgtagcactgtggaggaatgcagaaaggatgaaagagatcttgattctcctagtggttctcttcactaccgtaggcatccctcagccattgactcctccttctttctcttgacattcactttcttggccagtcttacatgcttatgagtctactttccaataaatttactcatagtccattaacttcc

SEQ ID NO: 30484 - DNA, 1725 bp, Homo sapiens
  source 1..1725: mol_type = unassigned DNA
atggactttgacgtcggcagaactacacacctaagttccagtccctgctctgccagtaacgggggtgaatctgggcaagtttctaagcgtcggtgtcttattggagaaagtggacatgataccccgtggtgctcccccatcaaggtgaagtatggggatgtgtactgcagggcccctcaaggaggatactacaaaacagccctgggaaccaggtgcgacattcgctgccagaagggctacgagctgcatggctcttccctactgatctgccagtcaaacaaacgatggtctgacaaggtcatctgcaaacaaaagcgatgtcctacccttgccatgccagcaaatggagggtttaagtgtgtagatggtgcctactttaactcccggtgtgagtattattgttcaccaggatacacgttgaaaggggagcggaccgtcacatgtatggacaacaaggcctggagcggccggccagcctcctgtgtggatatggaacctcctagaatcaagtgcccaagtgtgaaggaacgcattgcagaacccaacaaactgacagtccgggtgtcctgggagacacccgaaggaagagacacagcagatggaattcttactgatgtcattctaaaaggcctccccccaggctccaactttccagaaggagaccacaagatccagtacacagtctatgacagagctgagaataagggcacttgcaaatttcgagttaaagtaagagtcaaacgctgtggcaaactcaatgccccagagaatggttacatgaagtgctccagcgacggtgataattatggagccacctgtgagttctcctgcatcggcggctatgagctccagggtagccctgcccgagtatgtcaatccaacctggcttggtctggcacggagcccacctgtgcagccatgaacgtcaatgtgggtgtcagaacggcagctgcacttctggatcagttttatgagaaaaggagactcctcattgtgtccacacccacagcccgaaacctcctttaccggctccagctaggaatgctgcagcaagcacagtgtggccttgatcttcgacacatcaccgtggtggagctggtgggtgtgttcccgactctcattggcaggataggagcaaagattatgcctccagccctagcgctgcagctcaggctgttgctgcgaatcccactctactccttcagtatggtgctagtggataagcatggcatggacaaagagcgctatgtctccctggtgatgcctgtggccctgttcaacctgattgacacttttcccttgagaaaagaagagatggtcctacaagccgaaatgagccagacctgtaacacctgacatgatggttcctctcttggcaattcctcttcattgtctacatagtgacatgcacacgggaaagccttaaaaatatccttgatgtacagattttatttgtaattttaaaagtctattttattatgagctttctttgcacttaaaaattagcatgctgctttttgtacttggaagtgtttcaaaaaattatatgaccatatttactctttctaactttctttactccatcatggctgcttgattttgtagagaaattagaacccataaccatacacaggctatcaacatgttattcaatgtgacacctaactcttttctattttgttttttaagtaagacttttattaataaaacaaaatgttttggagc

SEQ ID NO: 30485 - DNA, 1874 bp, Homo sapiens
  source 1..1874: mol_type = unassigned DNA
cccggccttcgcccgcccgctagcacgcagtcccttggtctcttcggtctcctgccgcccccgggaagcgcgctgcgctgccgaggcgagctaagcgcccgctcgccatggggagccccgcacatcggcccgcgctgctgctgctgctgccgcctctgctgctgctgctgctgctgcgcgtcccgcccagccgcagcttcccaggatcgggagactcaccactagaagacgatgaagtcgggtattcacaccctagatataaagataccccgtggtgctcccccatcaaggtgaagtatggggatgtgtactgcagggcccctcaaggaggatactacaaaacagccctgggaaccaggtgcgacattcgctgccagaagggctacgagctgcatggctcttccctactgatctgccagtcaaacaaacgatggtctgacaaggtcatctgcaaacaaaagcgatgtcctacccttgccatgccagcaaatggagggtttaagtgtgtagatggtgcctactttaactcccggtgtgagtattattgttcaccaggatacacgttgaaaggggagcggaccgtcacatgtatggacaacaaggcctggagcggccggccagcctcctgtgtggatatggaacctcctagaatcaagtgcccaagtgtgaaggaacgcattgcagaacccaacaaactgacagtccgggtgtcctgggagacacccgaaggaagagacacagcagatggaattcttactgatgtcattctaaaaggcctccccccaggctccaactttccagaaggagaccacaagatccagtacacagtctatgacagagctgagaataagggcacttgcaaatttcgagttaaagtaagagtcaaacgctgtggcaaactcaatgccccagagaatggttacatgaagtgctccagcgacggtgataattatggagccacctgtgagttctcctgcatcggcggctatgagctccagggtagccctgcccgagtatgtcaatccaacctggcttggtctggcacggagcccacctgtgcagccatgaacgtcaatgtgggtgtcagaacggcagctgcacttctggatcagttttatgagaaaaggagactcctcattgtgtccacacccacagcccgaaacctcctttaccggctccagctaggaatgctgcagcaagcacagtgtggccttgatcttcgacacatcaccgtggtggagctggtgggtgtgttcccgactctcattggcaggataggagcaaagattatgcctccagccctagcgctgcagctcaggctgttgctgcgaatcccactctactccttcagtatggtgctagtggataagcatggcatggacaaagagcgctatgtctccctggtgatgcctgtggccctgttcaacctgattgacacttttcccttgagaaaagaagagatggtcctacaagccgaaatgagccagacctgtaacacctgacatgatggttcctctcttggcaattcctcttcattgtctacatagtgacatgcacacgggaaagccttaaaaatatccttgatgtacagattttatttgtaattttaaaagtctattttattatgagctttctttgcacttaaaaattagcatgctgctttttgtacttggaagtgtttcaaaaaattatatgaccatatttactctttctaactttctttactccatcatggctgcttgattttgtagagaaattagaacccataaccatacacaggctatcaacatgttattcaatgtgacacctaactcttttctattttgttttttaagtaagacttttattaataaaacaaaatgttttggagcaaa

SEQ ID NO: 30486 - DNA, 1725 bp, Homo sapiens
  source 1..1725: mol_type = unassigned DNA
agaggcgagaggaggagttttccagcccggccttcgcccgcccgctagcacgcagtcccttggtctcttcggtctcctgccgcccccgggaagcgcgctgcgctgccgaggcgagctaagcgcccgctcgccatggggagccccgcacatcggcccgcgctgctgctgctgctgccgcctctgctgctgctgctgctgctgcgcgtcccgcccagccgcagcttcccaggatcgggagactcaccactagaagacgatgaagtcgggtattcacaccctagatataaagataccccgtggtgctcccccatcaaggtgaagtatggggatgtgtactgcagggcccctcaaggaggatactacaaaacagccctgggaaccaggtgcgacattcgctgccagaagggctacgagctgcatggctcttccctactgatctgccagtcaaacaaacgatggtctgacaaggtcatctgcaaacatatggaacctcctagaatcaagtgcccaagtgtgaaggaacgcattgcagaacccaacaaactgacagtccgggtgtcctgggagacacccgaaggaagagacacagcagatggaattcttactgatgtcattctaaaaggcctccccccaggctccaactttccagaaggagaccacaagatccagtacacagtctatgacagagctgagaataagggcacttgcaaatttcgagttaaagtaagagtcaaacgctgtggcaaactcaatgccccagagaatggttacatgaagtgctccagcgacggtgataattatggagccacctgtgagttctcctgcatcggcggctatgagctccagggtagccctgcccgagtatgtcaatccaacctggcttggtctggcacggagcccacctgtgcagccatgaacgtcaatgtgggtgtcagaacggcagctgcacttctggatcagttttatgagaaaaggagactcctcattgtgtccacacccacagcccgaaacctcctttaccggctccagctaggaatgctgcagcaagcacagtgtggccttgatcttcgacacatcaccgtggtggagctggtgggtgtgttcccgactctcattggcaggataggagcaaagattatgcctccagccctagcgctgcagctcaggctgttgctgcgaatcccactctactccttcagtatggtgctagtggataagcatggcatggacaaagagcgctatgtctccctggtgatgcctgtggccctgttcaacctgattgacacttttcccttgagaaaagaagagatggtcctacaagccgaaatgagccagacctgtaacacctgacatgatggttcctctcttggcaattcctcttcattgtctacatagtgacatgcacacgggaaagccttaaaaatatccttgatgtacagattttatttgtaattttaaaagtctattttattatgagctttctttgcacttaaaaattagcatgctgctttttgtacttggaagtgtttcaaaaaattatatgaccatatttactctttctaactttctttactccatcatggctgcttgattttgtagagaaattagaacccataaccatacacaggctatcaacatgttattcaatgtgacacctaactcttttctattttgttttttaagtaagacttttattaataaaacaaaatgttttggagcaaattt

SEQ ID NO: 30487 - DNA, 1780 bp, Homo sapiens
  source 1..1780: mol_type = unassigned DNA
agaggcgagaggaggagttttccagcccggccttcgcccgcccgctagcacgcagtcccttggtctcttcggtctcctgccgcccccgggaagcgcgctgcgctgccgaggcgagctaagcgcccgctcgccatggggagccccgcacatcggcccgcgctgctgctgctgctgccgcctctgctgctgctgctgctgctgcgcgtcccgcccagccgcagcttcccaggatcgggagactcaccactagaagacgatgaagtcgggtattcacaccctagatataaagataccccgtggtgctcccccatcaaggtgaagtatggggatgtgtactgcagggcccctcaaggaggatactacaaaacagccctgggaaccaggtgcgacattcgctgccagaagggctacgagctgcatggctcttccctactgatctgccagtcaaacaaacgatggtctgacaaggtcatctgcaaacaaaagcgatgtcctacccttgccatgccagcaaatggagggtttaagtgtgtagatggtgcctactttaactcccggtgtgagtattattgttcaccaggatacacgttgaaaggggagcggaccgtcacatgtatggacaacaaggcctggagcggccggccagcctcctgtgtggatatggaacctcctagaatcaagtgcccaagtgtgaaggaacgcattgcagaacccaacaaactgacagtccgggtgtcctgggagacacccgaaggaagagacacagcagatggaattcttactgatgtcattctaaaaggcctccccccaggctccaactttccagaaggagaccacaagatccagtacacagtctatgacagagctgagaataagggcacttgcaaatttcgagttaaagtaagagtcaaacgctgtggcaaactcaatgccccagagaatggttacatgaagtgctccagcgacggtgataattatggagccacctgtgagttctcctgcatcggcggctatgagctccagggtagccctgcccgagtatgtcaatccaacctggcttggtctggcacggagcccacctgtgcagccatgaacgtcaatgtgggtgtcagaacggcagctgcacttctggatcagttttatgagaaaaggagactcctcattgtgtccacacccacagcccgaaacctcctttaccggctccagctaggaatgctgcaggctgttgctgcgaatcccactctactccttcagtatggtgctagtggataagcatggcatggacaaagagcgctatgtctccctggtgatgcctgtggccctgttcaacctgattgacacttttcccttgagaaaagaagagatggtcctacaagccgaaatgagccagacctgtaacacctgacatgatggttcctctcttggcaattcctcttcattgtctacatagtgacatgcacacgggaaagccttaaaaatatccttgatgtacagattttatttgtaattttaaaagtctattttattatgagctttctttgcacttaaaaattagcatgctgctttttgtacttggaagtgtttcaaaaaattatatgaccatatttactctttctaactttctttactccatcatggctgcttgattttgtagagaaattagaacccataaccatacacaggctatcaacatgttattcaatgtgacacctaactcttttctattttgttttttaagtaagacttttattaataaaacaaaatgttttggagcaaattt

SEQ ID NO: 30488 - DNA, 1842 bp, Homo sapiens
  source 1..1842: mol_type = unassigned DNA
agaggcgagaggaggagttttccagcccggccttcgcccgcccgctagcacgcagtcccttggtctcttcggtctcctgccgcccccgggaagcgcgctgcgctgccgaggcgagctaagcgcccgctcgccatggggagccccgcacatcggcccgcgctgctgctgctgctgccgcctctgctgctgctgctgctgctgcgcgtcccgcccagccgcagcttcccagataccccgtggtgctcccccatcaaggtgaagtatggggatgtgtactgcagggcccctcaaggaggatactacaaaacagccctgggaaccaggtgcgacattcgctgccagaagggctacgagctgcatggctcttccctactgatctgccagtcaaacaaacgatggtctgacaaggtcatctgcaaacaaaagcgatgtcctacccttgccatgccagcaaatggagggtttaagtgtgtagatggtgcctactttaactcccggtgtgagtattattgttcaccaggatacacgttgaaaggggagcggaccgtcacatgtatggacaacaaggcctggagcggccggccagcctcctgtgtggatatggaacctcctagaatcaagtgcccaagtgtgaaggaacgcattgcagaacccaacaaactgacagtccgggtgtcctgggagacacccgaaggaagagacacagcagatggaattcttactgatgtcattctaaaaggcctccccccaggctccaactttccagaaggagaccacaagatccagtacacagtctatgacagagctgagaataagggcacttgcaaatttcgagttaaagtaagagtcaaacgctgtggcaaactcaatgccccagagaatggttacatgaagtgctccagcgacggtgataattatggagccacctgtgagttctcctgcatcggcggctatgagctccagggtagccctgcccgagtatgtcaatccaacctggcttggtctggcacggagcccacctgtgcagccatgaacgtcaatgtgggtgtcagaacggcagctgcacttctggatcagttttatgagaaaaggagactcctcattgtgtccacacccacagcccgaaacctcctttaccggctccagctaggaatgctgcagcaagcacagtgtggccttgatcttcgacacatcaccgtggtggagctggtgggtgtgttcccgactctcattggcaggataggagcaaagattatgcctccagccctagcgctgcagctcaggctgttgctgcgaatcccactctactccttcagtatggtgctagtggataagcatggcatggacaaagagcgctatgtctccctggtgatgcctgtggccctgttcaacctgattgacacttttcccttgagaaaagaagagatggtcctacaagccgaaatgagccagacctgtaacacctgacatgatggttcctctcttggcaattcctcttcattgtctacatagtgacatgcacacgggaaagccttaaaaatatccttgatgtacagattttatttgtaattttaaaagtctattttattatgagctttctttgcacttaaaaattagcatgctgctttttgtacttggaagtgtttcaaaaaattatatgaccatatttactctttctaactttctttactccatcatggctgcttgattttgtagagaaattagaacccataaccatacacaggctatcaacatgttattcaatgtgacacctaactcttttctattttgttttttaagtaagacttttattaataaaacaaaatgttttggagcaaattt

SEQ ID NO: 30489 - DNA, 2138 bp, Homo sapiens
  source 1..2138: mol_type = unassigned DNA
agcagacggactgagttcctctaatccctgtgttccttctcccccatctttctaaaacccttctctgagagaggaataactatagcttcagggataatatagctttaaggaaacttttggcagatgtggacgtcgtaacatctgggcagtgttaacagaatcccggaggccgggacagaccaggagccactcgttctaggaatgttaaagtagaaggttttttccaattgatgagaggagcagagaggaaggagaaagaggaggagagagaaaaagggcacaaaataccataaaacagatcccatatttctgcttcccctcacttttagaagttaattgatggctgacttctgaaagtcactttcctttgccctggtacttcaggccatatacatcttttcttgtctccataatcctccctttcaaggatggccagtcagctaactcaaagaggagctctctttctgctgttcttcctaactccggcagtgacaccaacatggtatgcaggttctggctactatccggatgaaagctacaatgaagtatatgcagaggaggtcccacaggctcctgccctggactaccgagtcccccgatggtgttatacattaaatatccaggatggagaagccacatgctactcaccgaagggaggaaattatcacagcagcctgggcacgcgttgtgagctctcctgtgaccggggctttcgattgattggaaggaggtcggtgcaatgcctgccaagccgtcgttggtctggaactgcctactgcaggcagatgagatgccacgcactaccattcatcactagtggcacttacacctgcacaaatggagtgcttcttgactctcgctgtgactacagctgttccagtggctaccacctggaaggtgatcgcagccgaatctgcatggaagatgggagatggagtggaggcgagcctgtatgtgtagacatagatccccccaagatccgctgtccccactcacgtgagaagatggcagagccagagaaattgactgctcgagtatactgggacccaccgttggtgaaagattctgctgatggtaccatcaccagggtgacacttcggggccctgagcctggctctcactttcccgaaggagagcatgtgattcgttacactgcctatgaccgagcctacaaccgggccagctgcaagttcattgtgaaagtacaagtgagacgctgcccaactctgaaacctccgcagcacggctacctcacctgcacctcagcgggggacaactatggtgccacctgtgaataccactgtgatggcggttatgatcgccaggggacaccctcccgggtctgtcagtccagccgccagtggtcaggttcaccaccaatctgtgctcctatgaagattaacgtcaacgtcaactcagctgctggtctcttggatcaattctatgagaaacagcgactcctcatcatctcagctcctgatccttccaaccgatattataaaatgcagatctctatgctacagcaatccacctgtggactggatttgcggcatgtgaccatcattgaactggtgggacagccacctcaggaggtggggcgcatccgggagcaacagctgtcagccaacatcatcgaggagctcaggcaatttcagcgcctcactcgctcctacttcaacatggtgttgattgacaagcagggtattgaccgagaccgctacatggaacctgtcacccccgaggaaatcttcacattcattgatgactacctactgagcaatcaggagttgacccagcgtcgggagcaaagggacatatgcgagtgaacttgagccagggcatggttaaagtcaagggaaaagctcctctagttagctgaaactgggacctaataaaaggaggaaatgttttcccacagttctagggacaggactctgaggtgggtgagtttgacaaatcctgcggtgtttccaggcatccttttaggactgtgtaatagtttccctagaagctaggtagggactgaggacaggccttgggcagtgggttgggggtagaagttcttcctttcctaacccgggcccctgcccagctctccaaagtctttcagaaaagtaaatcctaaattcagtgatgaa

SEQ ID NO: 30490 - DNA, 3104 bp, Homo sapiens
  source 1..3104: mol_type = unassigned DNA
atactttcatggtggaagatgcagtggaagccattggctttggaaaatttcagtggaagctgtctgttctcactggcttggcttggatggctgatgccatggagatgatgatcctcagcatcctggcaccacagctgcattgcgagtggaggctcccaagctggcaggtggcattgctgacctcggtggtctttgtaggcatgatgtccagctccacgctctggggaaatatctcagaccagtacggcaggaaaacagggctgaagatcagcgtgctgtggactctgtactatggcatccttagtgcatttgcgcccgtgtatagctggatcctggtgctccggggcctggtgggcttcgggatcggaggagttccccagtcggtgacgctgtatgccgagttccttcccatgaaagccagagctaaatgtattttgctgattgaggtattctgggccatcgggacagtgttcgaggtcgtcctggctgtgttcgtgatgcccagcctgggctggcgttggctgctcatcctctcagctgtcccgctcctcctctttgccgtgctgtgtttctggctgcctgaaagtgcaaggtatgatgtgctgtcagggaaccaggaaaaggcaatcgccaccttaaagaggatagcaactgaaaacggagctcccatgccgctggggaaactcatcatctccagacaggaagaccgaggcaaaatgagggaccttttcacaccccattttagatggacaactttgctgctgtggtttatatggttttccaatgcattctcttactacgggttagttctactcaccacagaactcttccaggcaggagatgtctgcggcatctccagtcggaagaaggctgtagaggcaaaatgcagcctggcctgcgagtacctgagtgaggaggattacatggacttgctgtggaccaccctctctgagtttccaggtgtccttgtgactctgtggattattgaccgcctggggcgcaagaagaccatggccctgtgctttgtcatcttctccttctgcagcctcctgctgtttatctgtgttggaagaaatgtgctcactctgttactcttcattgcaagagcgtttatttctggaggctttcaagcggcatatgtttacacacctgaggtctaccccacggcaacgcgggccctcggcctgggcacctgcagcggcatggcaagagtgggtgctctcatcactccgttcatcgcccaggtgatgctggaatcctctgtgtacctgactctggcagtttacagtggctgctgcctcctggctgccctggcctcctgctttttgcccattgagaccaaaggccgaggactgcaggagtccagccaccgggagtggggccaggagatggtcggccgaggaatgcacggtgcaggtgttaccaggtcgaactctggctctcaggaatagtgaccgatgggggactgagctggtctttgaggctgcagagcttggggggctggcaggccccaactggggcactgattgtcactgccgacatcaagaactcacccaagagtatgacctggaccaacagggttttgtgtcttgactcagtttgctcatcttcattgaggtccacccagggatggggagatgtttgctctagggggttctctgtatatgtggtgaaagctttgttcataacctgtggatctacatgggaagactacccatattaggagggtctggtaatgccagcaaccaatcagacaccacccagagtcacccggccaaaccctcagtgaacaaccaaaatatctctctgtagataccgtccaggctcaggcccatgtgacacctgctgtccacccaccggacctgttcagtaggtttctcccacactcacagccccaggctttcttctttgaaattgcaggcgatctaggtgtggtctgagcagctatttcctggcaggggccccccggtttgcctccctagagcctgaccagtggattctctggcagatggacatggtgcattcaaactggagccacatgcccccacccagccccctctggagttgccgttgttggcaccaagagatccagatgtgtccctggggacagctggtcttgcaccaggtgacaacctcagaacgccgttaccccctgggaactgaggactgaggccaaagtgaatcaagctgaagtcagagcacgggcctccccttctgaagcagcgaaggccacggttccgacttctttcctggccccctccttggtcaggctgaatggtgacttttattgttttttgagacggagtcttgatctgtcgcccaggctggagtgcagtagcgtgatctcggctcactgcaactctgcctcccgggttcaagcaattctcctgtctcagcctcccgagtagctgggattacaggtgcccacctgtactttttagtagagacagggtttcaccatgttggccaggctggtctcgaactcctgacctcaagtgatccacccgcctcggcctcccacagtgctgagattacaggtgggagccactgcacccggcctgaatgatgactcttgaggggaaaaagtttactcaggtttgcaggtacaaaatccaaaatccagggctttgggttttgtgcatgggtagacagctgaatgggcagagaaaccagaaggatgctacacccaccatctcatcccatggggatcaggggaccaggattccctgatgcgaagctgctcctctgtccagggacgtcttgatcattacacaaaggcagcccctggagttccattcatggagcctgccgtggagtggagaggggtgggaggactcaggtgtgtgaaatgtatatgttttcaaaggaagcagtgggaggccagttggttttgagttggtctccgcaggcaacatcacttctgggatttggtttactggagccttttttcccatggtgaaggcaggggacatagacaaggagggaggaagctggcagatcccatcaaaggccagagcagacagacctactgcttgaagtaaacattgcaaggaagccaatttgtgcgttcaactcttattaaaacatgtcagtgatggacattg

SEQ ID NO: 30491 - DNA, 407 bp, Homo sapiens
  source 1..407: mol_type = unassigned DNA
aaagggtgctcactggtacccggacaaccatttcacagactggtgtgccctataggcatcccagtgatacaccatcagccagagagcctgtgaactcttccaagcagaagggctctccctgccccctctccccgcgcagctcgctctgccctccgcctcctcttctccgcccactctcgccgcggtctcctggcggcggaggctttgtctcgtgggctggtccccagcggctccctccccgaacagctgctgctccagggaggaagcggcgcgggtgctgtccagcttcccggtgctgaaaaccggagggctcgtcatccaccactaccatgtaagggccatgagaagggctcatcctggcgcagcgcggacatggaggaggacttattccagctaaggcagctgcc

SEQ ID NO: 30492 - DNA, 1413 bp, Homo sapiens
  source 1..1413: mol_type = unassigned DNA
cttgcagatggtgttttttggctacatggttttcagtatcctctttggcctcctggctgacagatatggccgctggaaggttaatcataaagactgaatttttgcccacgaaataccgaggctatatgttacccttgtctcaggtgttctggcttgcgggctccctgctcatcattggcttggcctctgtgatcatccccaccatcgggtggcgctggctcattcgcgtcgcctccatcccgggcatcatcctcatcgtggccttcaagtttattcctgaatctgcccggttcaatgtctccactgggaacactcgggctgccctggccactctggagcgcgttgccaagatgaaccgctcggtcatgccggaggggaagctggtggagcccgtcctggaaaaaagaggaagatttgcagacctattggatgctaaatatttacggaccacattacagatctgggtcatatggcttggaatctcttttgcctactatggggttatcctggccagtgctgagctgctggagcgggacttggtctgtggttcaaagtcagactctgcggtggtggtgactgggggggactcaggggagagccagagcccctgctactgccacatgtttgcaccctctgactatcggaccatgatcatcagcaccatcggtgaaattgctttgaatcctttaaatatactgggcatcaatttcctgggaagacggctgagcctttctattaccatgggatgcacggctttattcttccttctcctcaacatttgcacttcaagtgccggcctgattggcttcctcttcatgctgagggctctggtagctgcaaacttcaacaccgtctacatttacacagctgaggtctaccccaccacgatgcgcgctttggggatgggaaccagcggctccctgtgtcgcattggtgcaatggtggcaccatttatatcccaggttcttatgagtgcatcaatactgggggccctgtgtctcttctcatctgtctgtgttgtatgcgccatttctgcattcactctccccatcgaaaccaaaggacgggccctccagcaaattaaatgaagacctgcaaagctatgtctaccagatgagaaaaatgaattctatcttcagaactgcggtgcatttttttaaaacttggttttacttctgtatgctactcggtaattagtaaagtgattttttttttaaaggcatatatgggaatggggtaggtaactgtatattgatctcttccttgaggaacaatatataaagtacttttataaaatataatttaagctttcaaaggggtgtgagagggagatggtgggggggaagatggcttttcttcattgaaatcaagtctgtaaacctttatatgaataaatactaaattttaaactta

SEQ ID NO: 30493 - DNA, 1489 bp, Homo sapiens
  source 1..1489: mol_type = unassigned DNA
atggcaaccaagccaacagagcctgtcacgatcctcagccttcggaaattgagcctggggaccgcagagccacaggttaaagagccaaagacgttcaccgtggaagatgcagtggagactatcggcttcgggcgtttccacattgccctctttctgatcatgggcagtactggggtggttgaggccatggagatcatgttgatagctgttgtgtctcctgtcatccgctgtgaatggcaactggagaattggcaggtggcattagtaaccacgatggtgttttttggctacatggttttcagtatcctctttggcctcctggctgacagatatggccgctggaagattctgctcatctcgttcctgtggggagcctatttctccttgctgacctcgtttgctccttcgtacatctggtttgtcttcctgcggacgatggtgggctgtggtgtgtccggccactcgcaagggttaatcataaagactgaatttttgcccacgaaataccgaggctatatgttacccttgtctcaggtgttctggcttgcgggctccctgctcatcattggcttggcctctgtgatcatccccaccatcgggtggcgctggctcattcgcgtcgcctccatcccgggcatcatcctcatcgtggccttcaagtttattcctgaatctgcccggttcaatgtctccactgggaacactcgggctgccctggccactctggagcgcgttgccaagatgaaccgctcggtcatgccggaggggaagctggtggagcccgtcctggaaaaaagaggaagatttgcagacctattggatgctaaatatttacggaccacattacagatctgggtcatatggcttggaatctcttttgcctactatggggttatcctggccagtgctgagctgctggagcgggacttggtctgtggttcaaagtcagactctgcggtggtggtgactgggggggactcaggggagagccagagcccctgctactgccacatgtttgcaccctctgactatcggaccatgatcatcagcaccatcggtgaaattgctttgaatcctttaaatatactgggcatcaatttcctgggaagacggctgagcctttctattaccatgggatgcacggctttattcttccttctcctcaacatttgcacttcaagtgccggcctgattggcttcctcttcatgctgagggctctggtagctgcaaacttcaacaccgtctacatttacacagctgaggtctaccccaccacgatgcgcgctttggggatgggaaccagcggctccctgtgtcgcattggtgcaatggtggcaccatttatatcccaggttcttatgagtgcatcaatactgggggccctgtgtctcttctcatctgtctgtgttgtatgcgccatttctgcattcactctccccatcgaaaccaaaggacgggccctccagcaaattaaatgaagacctgcaa

SEQ ID NO: 30494 - DNA, 1421 bp, Homo sapiens
  source 1..1421: mol_type = unassigned DNA
caggacgtcttccagatggtgttttttggctacatggttttcagtatcctctttggcctcctggctgacagatatggccgctggaaggttaatcataaagactgaatttttgcccacgaaataccgaggctatatgttacccttgtctcaggtgttctggcttgcgggctccctgctcatcattggcttggcctctgtgatcatccccaccatcgggtggcgctggctcattcgcgtcgcctccatcccgggcatcatcctcatcgtggccttcaagtttattcctgaatctgcccggttcaatgtctccactgggaacactcgggctgccctggccactctggagcgcgttgccaagatgaaccgctcggtcatgccggaggggaagctggtggagcccgtcctggaaaaaagaggaagatttgcagacctattggatgctaaatatttacggaccacattacagatctgggtcatatggcttggaatctcttttgcctactatggggttatcctggccagtgctgagctgctggagcgggacttggtctgtggttcaaagtcagactctgcggtggtggtgactgggggggactcaggggagagccagagcccctgctactgccacatgtttgcaccctctgactatcggaccatgatcatcagcaccatcggtgaaattgctttgaatcctttaaatatactgggcatcaatttcctgggaagacggctgagcctttctattaccatgggatgcacggctttattcttccttctcctcaacatttgcacttcaagtgccggcctgattggcttcctcttcatgctgagggctctggtagctgcaaacttcaacaccgtctacatttacacagctgaggtctaccccaccacgatgcgcgctttggggatgggaaccagcggctccctgtgtcgcattggtgcaatggtggcaccatttatatcccaggttcttatgagtgcatcaatactgggggccctgtgtctcttctcatctgtctgtgttgtatgcgccatttctgcattcactctccccatcgaaaccaaaggacgggccctccagcaaattaaatgaagacctgcaaagctatgtctaccagatgagaaaaatgaattctatcttcagaactgcggtgcatttttttaaaacttggttttacttctgtatgctactcggtaattagtaaagtgattttttttttaaaggcatatatgggaatggggtaggtaactgtatattgatctcttccttgaggaacaatatataaagtacttttataaaatataatttaagctttcaaaggggtgtgagagggagatggtgggggggaagatggcttttcttcattgaaatcaagtctgtaaacctttatatgaataaatactaaattttaaactta

SEQ ID NO: 30495 - DNA, 4882 bp, Homo sapiens
  source 1..4882: mol_type = unassigned DNA
aggtgactgcgcggcgggctgtggctgcggaggttgaggggcgtccgaggcgcggaggggctggctgggcaggaggggttggcggggcagcagggccgcggccatggggagcttgaaggaggagctgctcaaagccatctggcacgccttcaccgcactcgaccaggaccacagcggcaaggtctccaagtcccagctcaaggtcctttcccataacctgtgcacggtgctgaaggttcctcatgacccagttgcccttgaagagcacttcagggatgatgatgagggtccagtgtccaaccagggctacatgccttatttaaacaggttcattttggaaaaggtccaagacaactttgacaagattgaattcaataggatgtgttggaccctctgtgtcaaaaaaaacctcacaaagaatcccctgctcattacagaagaagatgcatttaaaatatgggttattttcaactttttatctgaggacaagtatccattaattattgtgtcagaagagattgaatacctgcttaagaagcttacagaagctatgggaggaggttggcagcaagaacaatttgaacattataaaatcaactttgatgacagtaaaaatggcctttctgcatgggaacttattgagcttattggaaatggacagtttagcaaaggcatggaccggcagactgtgtctatggcaattaatgaagtctttaatgaacttatattagatgtgttaaagcagggttacatgatgaaaaagggccacagacggaaaaactggactgaaagatggtttgtactaaaacccaacataatttcttactatgtgagtgaggatctgaaggataagaaaggagacattctcttggatgaaaattgctgtgtagagtccttgcctgacaaagatggaaagaaatgcctttttctcgtaaaatgttttgataagacttttgaaatcagtgcttcagataagaagaagaaacaggagtggattcaagccattcattctactattcatctgttgaagctgggcagccctccaccacacaaagaagcccgccagcgtcggaaagaactccggaagaagcagctggctgaacaagaggaactggagcgacaaatgaaggaactccaggccgccaacgaaagcaagcagcaggagctggaggccgtgcggaagaaactggaggaagcagcatctcgtgcagcagaagaggaaaagaaacgccttcagactcaagtggaacttcaggccaggttcagcacagagctggaaagagagaagcttatcagacagcagatggaagaacaggttgctcaaaagtcctctgaactggaacagtatttacagcgagtacgggagctggaagacatgtacctaaagctgcaggaggctcttgaagatgagagacaggcccggcaagatgaagagacagtgcggaagcttcaggccaggttgttggaggaagagtcttccaagagggctgaactagaaaagtggcacttggagcagcagcaggccattcagacaaccgaggcggagaagcaggagttggagaatcagcgtgtcctgaaggaacaggccctgcaggaggccatggagcagctggagcagcttgagttagaacggaagcaagcacttgagcagtacgaggaagttaaaaagaagctggagatggcaactaataagaccaagagctggaaggacaaagtggcccatcatgaaggattaattcgactgatagaaccaggttcaaagaaccctcacctgatcactaactggggacctgcagctttcactgaggcagaacttgaagagagagagaagaactggaaagagaaaaagaccacggagtgactgagcttgctggcagtcacgtcagttatgtagatactgcatggcaggagagctttacgctaaagacaaaagaaacagctttgggggccgggcgtggtggctcacgcctgtaatcccagcactttgggaggccgaggcgggtggatcacctgaggtcaggagttcaagagcagcctggccaacctggtgaaaccctgtctctactaaaaatacaaaaaaaattagctgagcgtggtggcgggcgcctgtaatcccagctacttgggaggctgaggcaggagaatcacttgaacgtgggaggcggaggttgcagcgagctgagatcatgccgttgtactccagcttgggcaacagagtgagactccatctcaaaacaaaacaaaacaaaacaaaacaaaaaaacccggctttgctgcttttaactcttcttccttctgtgcctctctaagtgggtcagtatcctaaggaagccttcttatttatcttcctgcaaacaagggttacctgaaaagaaaaaaaaagtcaacattgtcaagctgtttgtttactctttctttgaaaacatcaccttctgaaatttgtcttttagctctctcagattcttccccaaatgaggcagggtgcagacagcacagtcagctctgcagagtttggaggggctcactgccactgggtactcagaacctctgtggactggatgtcagctctttcctttggcagcgtgtttccttttccgagtatgtgctgttaaactagattggccggttcgctttccatttcctgacacttgacatggaatgcctttgaccattggtgctctgacagagaagtcatggagtcattgccatttcctggttgcccttttggaatgtgatcctgttagtagaggttttctagcttctactaagatatttctttccctaaccatcatacacttggcatgtttcattcccatctcctttcccctcaccttaaaggagactacccctttgccccatattgtcaacctaattttctctcgtactctctctagtgaatgatgtgctaccaagtatatgccaggctgtgagaggattatactgagtagtagaaagaagctaatttgaaataaaaattatttgtataattaagaaagcagattagatgcacatggtcaacaggaagttgactgtatgtctgctagttagattcaaaacatcataaagatgatagcatgtcaatatattagcctagccattatgttagcctttgttaggtgggcagcttttctgctttttcccttcctctgtggtgacaacggaggaaatatccaacagaaatacgtctaacagggaaattgggatcatagtttatatgcatctgatttgaaaggagtattgaggaaggttttcatatatgatctatctttggattaaaaagaacatttatgaaatcaagccttctaacactagttataattgagaagcaacagtaactccgtggacagcaatcaagcttaaaattgtaaataaatatggggataattcagttgttgcaaaaaaagggcagaattcagtagaataaagtccttttctcttacaggtattaaatgaggacagagaacctcaggtgttcttatgctagtgcttgctgagtgcatactaagaaagcaattccaaatagatgtatacatctagagagagtggtattagagattcagtgtatgtatttatttacatgagaggaaactggaatataatcccataaattatcaccttttatgactggaaaatatttgccaatgaagaaatggtctgtaggtatttgtcttaagatttttggctgtttaataaaaatgtaactttaacggtttcttatagttgcctttataaagtgtattgtctaaaatatttttgtatcatgtgcctttgaaatttgacagctgatttgggtgttggatttctgcccagccatttatcagtattatcattttattcagtagctggcaggtgtattagaccaacgagacttaggtaaggaatggaacctttcctgtggtttgactgcacattacaccagaagactccagtatccctcattccagaatgaggaaaaagtattctacaaagaacctaatcacctctgtgaaatctatgggatggaaacagtgtggccttaggagtcaaatagtctctgcatggtggggaggatcatgatggaatatgtgaatttctacttctagaagttgtgaaataggtcctgcacttttgcagaatgtccttctttaaacctggcttattccacagctgtagctgataacatgacctggggcttagctgctctagccctgggttcttggagacctcacactgcctggcccctggccatccacctaaggactgcctgctttctggtcacatgtggaccttgatacgactaagcggttacatatgtggttgtgcaaaagctttctgtttaatgcatagtgttaccgatttacatcttggttttcagtggcactatgtctaggaggcaatatccttttaaacagtgctttggctaagatagatacttgtgaatcaaagatagcacagaaatgaactaagtatatcccatttggaattatattttgatactatttaaaatggtttcacctgttaaagggccaacagaactcttggttttacttttgtaattactgtacagaaaatttcaagagtgtttgagtgcttgtcatcaggtgttttccttaataagtagggatatgatcatttacaggaattatatatgaaaaaagtttttgaaatgtatttttgtgatgtgctatgttgaggggaaaccaaatatttatgattttaaaacattcgtatgaaaacattgtacaatgtaatatgctcaactttctcaattttttgctaatttttctaagatacattaaaaatgttttatatttttttttaagtaaaatggacccagtaagaaaattaaaaataccagaacatacactttaaactgtctgatttaataaaacagtggggggta

SEQ ID NO: 30496 - DNA, 4048 bp, Homo sapiens
  source 1..4048: mol_type = unassigned DNA
gcggagtgattccccacccctgctccatctagctctttccagtgcagccactgccgccgcccaggagccctcgtcccctgccttgtccccctactcgttcccgctcccacggcatggagcaggacactgccgcagtggcagccaccgtggcagccgcggatgcgaccgccactatcgtggtcatagaggacgagcagcccgggccgtccacctctcaggaggagggagcggccgccgcggccaccgaagccaccgcggccacggagaagggcgagaagaagaaggagaaaaacgtttcttcatttcaactcaaacttgctgctaaagcgcctaaatctgaaaaggaaatggacccagaatatgaagagaaaatgaaagccgaccgagcaaagagatttgaatttttactgaagcagacagaactttttgcacatttcattcagccttcagcacagaaatctccaacatctccactgaacatgaaattgggacgtccccgaataaagaaagatgaaaagcagagcttaatttctgctggagactaccgccataggcgcacagagcaagaagaagatgaagagctactgtctgagagtcggaaaacatctaatgtgtgtattagatttgaggtgtcaccttcatatgtgaaaggggggccactgagagattatcagattcgaggactgaattggttgatctctttatatgaaaatggagtcaatggcattttggctgatgaaatgggccttgggaaaactttacaaacaattgctttgcttggttacctgaaacactaccgaaatattcctggacctcacatggttttagttccaaagtctactttacacaactggatgaatgaatttaaacgatgggtcccatctctccgtgtcatttgttttgtcggagacaaggatgccagagctgcttttattcgtgatgaaatgatgccaggagagtgggatgtttgcgttacttcttatgagatggtaattaaagaaaaatctgtattcaaaaagtttcactggcgatacctggtcattgatgaagctcacagaataaagaatgaaaaatctaagctttcagagattgttcgtgagttcaagtcgactaaccgcttgctcctaactggaacacctttgcagaataacctgcatgaactgtgggccttactcaactttttattgcctgatgtctttaattctgcagatgactttgattcttggtttgacactaaaaattgtcttggtgatcaaaaactcgtggaaagacttcatgcagttttaaaaccatttttgttacgccgtataaaaactgatgtagagaagagtctgccacctaaaaaggaaataaagatttacttggggctgagtaagatgcaacgagaatggtatacaaaaatcctgatgaaagatattgatgttttaaactcttctggcaagatggacaagatgcgactcttaaacattctgatgcagcttcgaaagtgttgtaatcatccatatctgtttgatggtgctgaacctggtccaccttataccactgatgagcatattgtcagcaacagtggtaaaatggtagttctggataaactattggccaaactcaaagaacagggttcaagggttctcattttcagccagatgactcgcttgctggatattttggaagattattgcatgtggcgtggttatgagtattgtcgactggatggacaaaccccgcatgaagaaagagaggaagcaatagaggcttttaatgctcctaatagtagcaaattcatctttatgctaagtaccagggctggaggtctcggaattaacctggcaagtgctgatgtggttatactatatgattcagactggaacccacaggttgatctacaagctatggatcgagcacatcgtattggtcagaagaaaccagtacgtgtattccgtctcatcactgacaacactgttgaagagaggattgtagaaagagctgagataaaactgagactcgattcaattgttatacaacaaggaagactcattgaccaacagtctaacaagctggcaaaagaggaaatgttacaaatgatacggcatggagccacccatgtttttgcttctaaagagagtgagttgacagatgaagacattacaactattctggaaagaggggaaaagaagactgcagagatgaatgaacgcctgcaaaaaatgggagagtcttctctaagaaattttagaatggacattgaacaaagtttatacaaatttgagggagaagattatagagaaaaacagaagcttggcatggtggaatggattgaacctcctaaacgagaacgcaaagcaaactacgcagtggatgcctactttagagaggctttgcgtgtcagcgagccaaagattccaaaggctccacggcctccaaaacagccaaatgttcaggattttcaatttttcccaccacgcttatttgagctcctggaaaaggaaattctttattatcggaagacaataggctataaggttccaaggaatcctgatatcccaaatccagctctggctcaaagagaagagcaaaaaaagattgatggagctgaacctcttacaccagaagagactgaagaaaaggaaaaacttctcacacaaggtttcacaaactggactaaacgagattttaaccagtttattaaagctaatgagaaatatggaagagatgacattgataacatagctcgagaggtagagggcaaatcccctgaggaggtcatggagtattcagctgtattttgggaacgttgcaatgaattacaggacattgagaaaattatggctcaaattgaacgtggagaagcaagaattcaacgaaggatcagtatcaagaaagccctggatgccaaaattgcaagatacaaggctccatttcatcagttgcgcattcagtatggaaccagcaaaggaaagaactatactgaggaagaagatagattcttgatttgtatgttacacaaaatgggctttgatagagaaaatgtatatgaagaattaagacagtgtgtacgaaatgctccccagtttagatttgactggtttatcaagtctaggactgccatggaattccagagacgctgtaacactctgatttcattgattgagaaagaaaatatggaaattgaggaaagagagagagcagaaaagaagaaacgggcaactaaaactccaatggtaaaattttcagcattttcctaacttttagatttaacattgttgggccatttaaaatgtgcatattggagcagaacattaaatctgtttccattttagtcacagaaaagaaaagcagagtcagctactgagagctctggaaagaaggatgtcaagaaggtgaaatcctaaagcctagaaataaagttttaaatgggaaactgctattttcttgttcccatcttcaaatgctaattgccagttccagtgtattcatggtactctaagaaaaatctctttggttttgatttcttgcatattttatatattttacaatgctttctacctgaaatgtgtagctttatattttatggcattctagtatttttgtgtactgtattttgtgcatttcatgtcttcatcaaaatcctctcagtccttgttcttttgaagcttgtgctgaggttttagcttttctatgttttatatgccgctgctttgaaagagaacctagattctatagttgtattattgttgtttcatactttaaatttatatggctgtggaaaaacgaattaaaatgttttgaggagaaagactttttcacttctttgttgctttcttttctattgagtctgggcttgtttgtgttactgcatactgtgattagcataataattgtttctttgaggtcatctaaatatttttttcctaaaggaataaagggtgaggaaagaaaaatattaaaaaagctaatatttgatactgtgcttgctgtcagtatgcattacatttaaattattctctattcaagtgggaaaatataataaagaaatgtctataagaaattt

SEQ ID NO: 30497 - DNA, 4099 bp, Homo sapiens
  source 1..4099: mol_type = unassigned DNA
gagcgaaggggttggaagcggagtgattccccacccctgctccatctagctctttccagtgcagccactgccgccgcccaggagccctcgtcccctgccttgtccccctactcgttcccgctcccacggcatggagcaggacactgccgcagtggcagccaccgtggcagccgcggatgcgaccgccactatcgtggtcatagaggacgagcagcccgggccgtccacctctcaggaggagggagcggccgccgcggccaccgaagccaccgcggccacggagaagggcgagaagaagaaggagaaaaacgtttcttcatttcaactcaaacttgctgctaaagcgcctaaatctgaaaaggaaatggacccagaatatgaagagaaaatgaaagccgaccgagcaaagagatttgaatttttactgaagcagacagaactttttgcacatttcattcagccttcagcacagaaatctccaacatctccactgaacatgaaattgggacgtccccgaataaagaaagatgaaaagcagagcttaatttctgctggagactaccgccataggcgcacagagcaagaagaagatgaagagctactgtctgagagtcggaaaacatctaatgtgtgtattagatttgaggtgtcaccttcatatgtgaaaggggggccactgagagattatcagattcgaggactgaattggttgatctctttatatgaaaatggagtcaatggcattttggctgatgaaatgggccttgggaaaactttacaaacaattgctttgcttggttacctgaaacactaccgaaatattcctggacctcacatggttttagttccaaagtctactttacacaactggatgaatgaatttaaacgatgggtcccatctctccgtgtcatttgttttgtcggagacaaggatgccagagctgcttttattcgtgatgaaatgatgccaggagagtgggatgtttgcgttacttcttatgagatggtaattaaagaaaaatctgtattcaaaaagtttcactggcgatacctggtcattgatgaagctcacagaataaagaatgaaaaatctaagctttcagagattgttcgtgagttcaagtcgactaaccgcttgctcctaactggaacacctttgcagaataacctgcatgaactgtgggccttactcaactttttattgcctgatgtctttaattctgcagatgactttgattcttggtttgacactaaaaattgtcttggtgatcaaaaactcgtggaaagacttcatgcagttttaaaaccatttttgttacgccgtataaaaactgatgtagagaagagtctgccacctaaaaaggaaataaagatttacttggggctgagtaagatgcaacgagaatggtatacaaaaatcctgatgaaagatattgatgttttaaactcttctggcaagatggacaagatgcgactcttaaacattctgatgcagcttcgaaagtgttgtaatcatccatatctgtttgatggtgctgaacctggtccaccttataccactgatgagcatattgtcagcaacagtggtaaaatggtagttctggataaactattggccaaactcaaagaacagggttcaagggttctcattttcagccagatgactcgcttgctggatattttggaagattattgcatgtggcgtggttatgagtattgtcgactggatggacaaaccccgcatgaagaaagagaggataaattcctagaagtggaatttctgggtcaaagggaagcaatagaggcttttaatgctcctaatagtagcaaattcatctttatgctaagtaccagggctggaggtctcggaattaacctggcaagtgctgatgtggttatactatatgattcagactggaacccacaggttgatctacaagctatggatcgagcacatcgtattggtcagaagaaaccagtacgtgtattccgtctcatcactgacaacactgttgaagagaggattgtagaaagagctgagataaaactgagactcgattcaattgttatacaacaaggaagactcattgaccaacagtctaacaagctggcaaaagaggaaatgttacaaatgatacggcatggagccacccatgtttttgcttctaaagagagtgagttgacagatgaagacattacaactattctggaaagaggggaaaagaagactgcagagatgaatgaacgcctgcaaaaaatgggagagtcttctctaagaaattttagaatggacattgaacaaagtttatacaaatttgagggagaagattatagagaaaaacagaagcttggcatggtggaatggattgaacctcctaaacgagaacgcaaagcaaactacgcagtggatgcctactttagagaggctttgcgtgtcagcgagccaaagattccaaaggctccacggcctccaaaacagccaaatgttcaggattttcaatttttcccaccacgcttatttgagctcctggaaaaggaaattctttattatcggaagacaataggctataaggttccaaggaatcctgatatcccaaatccagctctggctcaaagagaagagcaaaaaaagattgatggagctgaacctcttacaccagaagagactgaagaaaaggaaaaacttctcacacaaggtttcacaaactggactaaacgagattttaaccagtttattaaagctaatgagaaatatggaagagatgacattgataacatagctcgagaggtagagggcaaatcccctgaggaggtcatggagtattcagctgtattttgggaacgttgcaatgaattacaggacattgagaaaattatggctcaaattgaacgtggagaagcaagaattcaacgaaggatcagtatcaagaaagccctggatgccaaaattgcaagatacaaggctccatttcatcagttgcgcattcagtatggaaccagcaaaggaaagaactatactgaggaagaagatagattcttgatttgtatgttacacaaaatgggctttgatagagaaaatgtatatgaagaattaagacagtgtgtacgaaatgctccccagtttagatttgactggtttatcaagtctaggactgccatggaattccagagacgctgtaacactctgatttcattgattgagaaagaaaatatggaaattgaggaaagagagagagcagaaaagaagaaacgggcaactaaaactccaatggtaaaattttcagcattttcctaacttttagatttaacattgttgggccatttaaaatgtgcatattggagcagaacattaaatctgtttccattttagtcacagaaaagaaaagcagagtcagctactgagagctctggaaagaaggatgtcaagaaggtgaaatcctaaagcctagaaataaagttttaaatgggaaactgctattttcttgttcccatcttcaaatgctaattgccagttccagtgtattcatggtactctaagaaaaatctctttggttttgatttcttgcatattttatatattttacaatgctttctacctgaaatgtgtagctttatattttatggcattctagtatttttgtgtactgtattttgtgcatttcatgtcttcatcaaaatcctctcagtccttgttcttttgaagcttgtgctgaggttttagcttttctatgttttatatgccgctgctttgaaagagaacctagattctatagttgtattattgttgtttcatactttaaatttatatggctgtggaaaaacgaattaaaatgttttgaggagaaagactttttcacttctttgttgctttcttttctattgagtctgggcttgtttgtgttactgcatactgtgattagcataataattgtttctttgaggtcatctaaatatttttttcctaaaggaataaagggtgaggaaagaaaaatattaaaaaagctaatatttgatactgtgcttgctgtcagtatgcattacatttaaattattctctattcaagtgggaaaatataataaagaaatgtctataagaaat

SEQ ID NO: 30498 - DNA, 3995 bp, Homo sapiens
  source 1..3995: mol_type = unassigned DNA
gagcgaaggggttggaagcggagtgattccccacccctgctccatctagctctttccagtgcagccactgccgccgcccaggagccctcgtcccctgccttgtccccctactcgttcccgctcccacggcatggagcaggacactgccgcagtggcagccaccgtggcagccgcggatgcgaccgccactatcgtggtcatagaggacgagcagcccgggccgtccacctctcaggaggagggagcggccgccgcggccaccgaagccaccgcggccacggagaagggcgagaagaagaaggagaaaaacgtttcttcatttcaactcaaacttgctgctaaagcgcctaaatctgaaaaggaaatggacccagaatatgaagagaaaatgaaagccgaccgagcaaagagatttgaatttttactgaagcagacagaactttttgcacatttcattcagccttcagcacagaaatctccaacatctccactgaacatgaaattgggacgtccccgaataaagaaagatgaaaagcagagcttaatttctgctggagactaccgccataggcgcacagagcaagaagaagatgaagagctactgtctgagagtcggaaaacatctaatgtgtgtattagatttgaggtgtcaccttcatatgtgaaaggggggccactgagagattatcagattcgaggactgaattggttgatctctttatatgaaaatggagtcaatggcattttggctgatgaaatgggccttgggaaaactttacaaacaattgctttgcttggttacctgaaacactaccgaaatattcctggacctcacatggttttagttccaaagtctactttacacaactggatgaatgaatttaaacgatgggtcccatctctccgtgtcatttgttttgtcggagacaaggatgccagagctgcttttattcgtgatgaaatgatgccaggagagtgggatgtttgcgttacttcttatgagatggtaattaaagaaaaatctgtattcaaaaagtttcactggcgatacctggtcattgatgaagctcacagaataaagaatgaaaaatctaagctttcagagattgttcgtgagttcaagtcgactaaccgcttgctcctaactggaacacctttgcagaataacctgcatgaactgtgggccttactcaactttttattgcctgatgtctttaattctgcagatgactttgattcttggtttgacactaaaaattgtcttggtgatcaaaaactcgtggaaagacttcatgcagttttaaaaccatttttgttacgccgtataaaaactgatgtagagaagagtctgccacctaaaaaggaaataaagatttacttggggctgagtaagatgcaacgagaatggtatacaaaaatcctgatgaaagatattgatgttttaaactcttctggcaagatggacaagatgcgactcttaaacattctgatgcagcttcgaaagtgttgtaatcatccatatctgtttgatggtgctgaacctggtccaccttataccactgatgagcatattgtcagcaacagtggtaaaatggtagttctggataaactattggccaaactcaaagaacagggttcaagggttctcattttcagccagatgactcgcttgctggatattttggaagattattgcatgtggcgtggttatgagtattgtcgactggatggacaaaccccgcatgaagaaagagaggaagcaatagaggcttttaatgctcctaatagtagcaaattcatctttatgctaagtaccagggctggaggtctcggaattaacctggcaagtgctgatgtggttatactatatgattcagactggaacccacaggttgatctacaagctatggatcgagcacatcgtattggtcagaagaaaccagtacgtgtattccgtctcatcactgacaacactgttgaagagaggattgtagaaagagctgagataaaactgagactcgattcaattgttatacaacaaggaagactcattgaccaacagtctaacaagctggcaaaagaggaaatgttacaaatgatacggcatggagccacccatgtttttgcttctaaagagagtgagttgacagatgaagacattacaactattctggaaagaggggaaaagaagactgcagagatgaatgaacgcctgcaaaaaatgggagagtcttctctaagaaattttagaatggacattgaacaaagtttatacaaatttgagggagaagattatagagaaaaacagaagcttggcatggtggaatggattgaacctcctaaacgagaacgcaaagcaaactacgcagtggatgcctactttagagaggctttgcgtgtcagcgagccaaagattccaaaggctccacggcctccaaaacagccaaatgttcaggattttcaatttttcccaccacgcttatttgagctcctggaaaaggaaattctttattatcggaagacaataggctataaggttccaaggaatcctgatatcccaaatccagctctggctcaaagagaagagcaaaaaaagattgatggagctgaacctcttacaccagaagagactgaagaaaaggaaaaacttctcacacaaggtttcacaaactggactaaacgagattttaaccagtttattaaagctaatgagaaatatggaagagatgacattgataacatagctcgagaggtagagggcaaatcccctgaggaggtcatggagtattcagctgtattttgggaacgttgcaatgaattacaggacattgagaaaattatggctcaaattgaacgtggagaagcaagaattcaacgaaggatcagtatcaagaaagccctggatgccaaaattgcaagatacaaggctccatttcatcagttgcgcattcagtatggaaccagcaaaggaaagaactatactgaggaagaagatagattcttgatttgtatgttacacaaaatgggctttgatagagaaaatgtatatgaagaattaagacagtgtgtacgaaatgctccccagtttagatttgactggtttatcaagtctaggactgccatggaattccagagacgctgtaacactctgatttcattgattgagaaagaaaatatggaaattgaggaaagagagagagcagaaaagaagaaacgggcaactaaaactccaatggtaaaattttcagcattttcctaacttttagtcacagaaaagaaaagcagagtcagctactgagagctctggaaagaaggatgtcaagaaggtgaaatcctaaagcctagaaataaagttttaaatgggaaactgctattttcttgttcccatcttcaaatgctaattgccagttccagtgtattcatggtactctaagaaaaatctctttggttttgatttcttgcatattttatatattttacaatgctttctacctgaaatgtgtagctttatattttatggcattctagtatttttgtgtactgtattttgtgcatttcatgtcttcatcaaaatcctctcagtccttgttcttttgaagcttgtgctgaggttttagcttttctatgttttatatgccgctgctttgaaagagaacctagattctatagttgtattattgttgtttcatactttaaatttatatggctgtggaaaaacgaattaaaatgttttgaggagaaagactttttcacttctttgttgctttcttttctattgagtctgggcttgtttgtgttactgcatactgtgattagcataataattgtttctttgaggtcatctaaatatttttttcctaaaggaataaagggtgaggaaagaaaaatattaaaaaagctaatatttgatactgtgcttgctgtcagtatgcattacatttaaattattctctattcaagtgggaaaatataataaagaaatgtctataagaaat

SEQ ID NO: 30499 - DNA, 3090 bp, Homo sapiens
  source 1..3090: mol_type = unassigned DNA
agtgcagccactgccgccgcccaggagccctcgtcccctgccttgtccccctactcgttcccgctcccacggcatggagcaggacactgccgcagtggcagccaccgtggcagccgcggatgcgaccgccactatcgtggtcatagaggacgagcagcccgggccgtccacctctcaggaggagaaaaacgtttcttcatttcaactcaaacttgctgctaaagcgcctaaatctgaaaaggaaatggacccagaatatgaagagaaaatgaaagccgaccgagcaaagagatttgaatttttactgaagcagacagaactttttgcacatttcattcagccttcagcacagaaatctccaacatctccactgaacatgaaattgggacgtccccgaataaagaaagatgaaaagcagagcttaatttctgctggagactaccgccataggcgcacagagcaagaagaagatgaagagctactgtctgagagtcggaaaacatctaatgtgtgtattagatttgaggtgtcaccttcatatgtgaaaggggggccactgagagattatcagattcgaggactgaattggttgatctctttatatgaaaatggagtcaatggcattttggctgatgaaatgggccttgggaaaactttacaaacaattgctttgcttggttacctgaaacactaccgaaatattcctggacctcacatggttttagttccaaagtctactttacacaactggatgaatgaatttaaacgatgggtcccatctctccgtgtcatttgttttgtcggagacaaggatgccagagctgcttttattcgtgatgaaatgatgccaggagagtgggatgtttgcgttacttcttatgagatggtaattaaagaaaaatctgtattcaaaaagtttcactggcgatacctggtcattgatgaagctcacagaataaagaatgaaaaatctaagctttcagagattgttcgtgagttcaagtcgactaaccgcttgctcctaactggaacacctttgcagaataacctgcatgaactgtgggccttactcaactttttattgcctgatgtctttaattctgcagatgactttgattcttggtttgacactaaaaattgtcttggtgatcaaaaactcgtggaaagacttcatgcagttttaaaaccatttttgttacgccgtataaaaactgatgtagagaagagtctgccacctaaaaaggaaataaagatttacttggggctgagtaagatgcaacgagaatggtatacaaaaatcctgatgaaagatattgatgttttaaactcttctggcaagatggacaagatgcgactcttaaacattctgatgcagcttcgaaagtgttgtaatcatccatatctgtttgatggtgctgaacctggtccaccttataccactgatgagcatattgtcagcaacagtggtaaaatggtagttctggataaactattggccaaactcaaagaacagggttcaagggttctcattttcagccagatgactcgcttgctggatattttggaagattattgcatgtggcgtggttatgagtattgtcgactggatggacaaaccccgcatgaagaaagagaggataaattcctagaagtggaatttctgggtcaaagggaagcaatagaggcttttaatgctcctaatagtagcaaattcatctttatgctaagtaccagggctggaggtctcggaattaacctggcaagtgctgatgtggttatactatatgattcagactggaacccacaggttgatctacaagctatggatcgagcacatcgtattggtcagaagaaaccagtacgtgtattccgtctcatcactgacaacactgttgaagagaggattgtagaaagagctgagataaaactgagactcgattcaattgttatacaacaaggaagactcattgaccaacagtctaacaagctggcaaaagaggaaatgttacaaatgatacggcatggagccacccatgtttttgcttctaaagagagtgagttgacagatgaagacattacaactattctggaaagaggggaaaagaagactgcagagatgaatgaacgcctgcaaaaaatgggagagtcttctctaagaaattttagaatggacattgaacaaagtttatacaaatttgagggagaagattatagagaaaaacagaagcttggcatggtggaatggattgaacctcctaaacgagaacgcaaagcaaactacgcagtggatgcctactttagagaggctttgcgtgtcagcgagccaaagattccaaaggctccacggcctccaaaacagccaaatgttcaggattttcaatttttcccaccacgcttatttgagctcctggaaaaggaaattctttattatcggaagacaataggctataaggttccaaggaatcctgatatcccaaatccagctctggctcaaagagaagagcaaaaaaagattgatggagctgaacctcttacaccagaagagactgaagaaaaggaaaaacttctcacacaaggtttcacaaactggactaaacgagattttaaccagtttattaaagctaatgagaaatatggaagagatgacattgataacatagctcgagaggtagagggcaaatcccctgaggaggtcatggagtattcagctgtattttgggaacgttgcaatgaattacaggacattgagaaaattatggctcaaattgaacgtggagaagcaagaattcaacgaaggatcagtatcaagaaagccctggatgccaaaattgcaagatacaaggctccatttcatcagttgcgcattcagtatggaaccagcaaaggaaagaactatactgaggaagaagatagattcttgatttgtatgttacacaaaatgggctttgatagagaaaatgtatatgaagaattaagacagtgtgtacgaaatgctccccagtttagatttgactggtttatcaagtctaggactgccatggaattccagagacgctgtaacactctgatttcattgattgagaaagaaaa

SEQ ID NO: 30500 - DNA, 2239 bp, Homo sapiens
  source 1..2239: mol_type = unassigned DNA
acttcattaaatctagaggcagttgagcatgggagccgtctgtatgttgaattagggctcgcactcttgcgcaacacgtcaccagtcggaaactgggggtttgcttctgtgatttatttcattattgtgctggtaaaaggtttggaagggaattctttttgggggtagtactttagcattgtgtagcaagttttggggttttttttgtgtgtgaccccccagcccccagcgctgagtttgagtcagttgagccagtttagtaaataattttttaaaataaaagaacagtttaaaatctccatgaataattttacttacatgcaggagtaatcttactctactctttatgtgcgaaaagcattgggaagtgtttagtgaattgatttccattagaaaaagacccttagaaatcacagaacataaagcactgcatatggatgtgtttggggtctttggggaggagggaagatgttttgtagctctctgcattcctgcataaaaccttagtttgaggggaataatgctgatgaagagactagcagctcgctgctttgctggcttgttaattttatccccactaactgtgatttctgatagccggcctgctgatagtggtaaggccatcgaagacggcaatttggaggaaatggaagaggaagtacggcttaagaagcgaaaaagacgaagaaatgtggataaagatcctgcaaaagaagatgtggaaaaagctaagaagagaagaggccgccctcccgctgagaaactgtcaccaaatccccccaaactgacaaagcagatgaacgctatcatcgatactgtgataaactacaaagatagttcagggcgacagctcagtgaagtcttcattcagttaccttcaaggaaagaattaccagaatactatgaattaattaggaagccagtggatttcaaaaaaataaaggaaaggattcgtaatcataagtaccggagcctaggcgacctggagaaggatgtcatgcttctctgtcacaacgctcagacgttcaacctggagggatcccagatctatgaagactccatcgtcttacagtcagtgtttaagagtgcccggcagaaaattgccaaagaggaagagagtgaggatgaaagcaatgaagaggaggaagaggaagatgaagaagagtcagagtccgaggcaaaatcagtcaaggtgaaaattaagctcaataaaaaagatgacaaaggccgggacaaagggaaaggcaagaaaaggccaaatcgaggaaaagccaaacctgtagtgagcgattttgacagcgatgaggagcaggatgaacgtgaacagtcagaaggaagtgggacggatgatgagtgatcagtatggacctttttccttggtagaactgaattccttcctcccctgtctcatttctacccagtgagttcatttgtcatataggcactgggttgtttctatatcatcatcgtctataaactagctttaggatagtgccagacaaacatatgatatcatggtgtaaaaaacacacacatacacaaatatttgtaacatattgtgaccaaatgggcctcaaagattcagattgaaacaaacaaaaagcttttgatggaaaatatgtgggtggatagtatatttctatgggtgggtctaatttggtaacggtttgattgtgcctggttttatcacctgttcagatgagaagatttttgtcttttgtagcactgataaccaggagaagccattaaaagccactggttattttatttttcatcaggcaattttcgaggtttttatttgttcggtattgtttttttacactgtggtacatataagcaactttaataggtgataaatgtacagtagttagatttcacctgcatatacatttttccattttatgctctatgatctgaacaaaagctttttgaattgtataagatttatgtctactgtaaacattgcttaatttttttgctcttgatttaaaaaaaagttttgttgaaagcgctattgaatattgcaatctatatagtgtattggatggcttcttttgtcaccctgatctcctatgttaccaatgtgtatcgtctccttctccctaaagtgtacttaatctttgctttctttgcacaatgtctttggttgcaagtcataagcctgaggcaaataaaattccagtaatttcgaagaatgtggtgttggtgctttcctaataaagaaataatttagcttgac

SEQ ID NO: 30501 - DNA, 1118 bp, Homo sapiens
  source 1..1118: mol_type = unassigned DNA
acttcattaaatctagaggcagttgagcatgggagccgtctgtatgttgaattagggctcgcactcttgcgcaacacgtcaccagtcggaaactgggggtttgcttctgtgatttatttcattattgtgctgctgatgaagagactagcagctcgctgctttgctggcttgttaattttatccccactaactgtgatttctgatagccggcctgctgatagtggtaagtgctgctggctctggtttaaagcaagcgtttgcaggccatcgaagacggcaatttggaggaaatggaagaggaagtacggcttaagaagcgaaaaagacgaagaaatgtggataaagatcctgcaaaagaagatgtggaaaaagctaagaagagaagaggccgccctcccgctgagaaactgtcaccaaatccccccaaactgacaaagcagatgaacgctatcatcgatactgtgataaactacaaagatagttcagggcgacagctcagtgaagtcttcattcagttaccttcaaggaaagaattaccagaatactatgaattaattaggaagccagtggatttcaaaaaaataaaggaaaggattcgtaatcataagtaccggagcctaggcgacctggagaaggatgtcatgcttctctgtcacaacgctcagacgttcaacctggagggatcccagatctatgaagactccatcgtcttacagtcagtgtttaagagtgcccggcagaaaattgccaaagaggaagagagtgaggatgaaagcaatgaagaggaggaagaggaagatgaagaagagtcagagtccgaggcaaaatcagtcaaggtgaaaattaagctcaataaaaaagatgacaaaggccgggacaaagggaaaggcaagaaaaggccaaatcgaggaaaagccaaacctgtagtgagcgattttgacagcgatgaggagcaggatgaacgtgaacagtcagaaggaagtgggacggatgatgagtgatcagtatggacctttttccttggtagaactgaattccttcctcccctgtctcatttctacccagtgagttcatttgtcatataggcactgggttgtttctatatcatcatcgtctat

SEQ ID NO: 30502 - DNA, 5757 bp, Homo sapiens
  source 1..5757: mol_type = unassigned DNA
tttctgtactctgggtgactcagagagggaagagattcagccagcacactcctcgcgagcaagcattactctactgactggcagagacaggagaggtagatgtccacgcccacagaccctggtgcgatgccccacccagggccttcgccggggcctgggccttcccctgggccaattcttgggcctagtccaggaccaggaccatccccaggttccgtccacagcatgatggggccaagtcctggacctccaagtgtctcccatcctatgccgacgatggggtccacagacttcccacaggaaggcatgcatcaaatgcataagcccatcgatggtatacatgacaaggggattgtagaagacatccattgtggatccatgaagggcactggtatgcgaccacctcacccaggcatgggccctccccagagtccaatggatcaacacagccaaggttatatgtcaccacacccatctccattaggagccccagagcacgtctccagccctatgtctggaggaggcccaactccacctcagatgccaccaagccagccgggggccctcatcccaggtgatccgcaggccatgagccagcccaacagaggtccctcacctttcagtcctgtccagctgcatcagcttcgagctcagattttagcttataaaatgctggcccgaggccagcccctccccgaaacgctgcagcttgcagtccaggggaaaaggacgttgcctggcttgcagcaacaacagcagcagcaacagcagcagcagcagcagcagcagcagcagcagcagcagcaacagcagccgcagcagcagccgccgcaaccacagacgcagcaacaacagcagccggcccttgttaactacaacagaccatctggcccggggccggagctgagcggcccgagcaccccgcagaagctgccggtgcccgcgcccggcggccggccctcgcccgcgccccccgcagccgcgcagccgcccgcggccgcagtgcccgggccctcagtgccgcagccggccccggggcagccctcgcccgtcctccagctgcagcagaagcagagccgcatcagccccatccagaaaccgcaaggcctggaccccgtggaaattctgcaagagcgggaatacagacttcaggcccgcatagctcataggatacaagaactggaaaatctgcctggctctttgccaccagatttaagaaccaaagcaaccgtggaactaaaagcacttcggttactcaatttccagcgtcagctgagacaggaggtggtggcctgcatgcgcagggacacgaccctggagacggctctcaactccaaagcatacaaacggagcaagcgccagactctgagagaagctcgcatgaccgagaagctggagaagcagcagaagattgagcaggagaggaaacgccgtcagaaacaccaggaatacctgaacagtattttgcaacatgcaaaagattttaaggaatatcatcggtctgtggccggaaagatccagaagctctccaaagcagtggcaacttggcatgccaacactgaaagagagcagaagaaggagacagagcggattgaaaaggagagaatgcggcgactgatggctgaagatgaggagggttatagaaaactgattgatcaaaagaaagacaggcgtttagcttaccttttgcagcagaccgatgagtatgtagccaatctgaccaatctggtttgggagcacaagcaagcccaggcagccaaagagaagaagaagaggaggaggaggaagaagaaggctgaggagaatgcagagggtggggagtctgccctgggaccggatggagagcccatagatgagagcagccagatgagtgacctccctgtcaaagtgactcacacagaaaccggcaaggttctgttcggaccagaagcacccaaagcaagtcagctggacgcctggctggaaatgaatcctggttatgaagttgcccctagatctgacagtgaagagagtgattctgattatgaggaagaggatgaggaagaagagtccagtaggcaggaaaccgaagagaaaatactcctggatccaaatagcgaagaagtttctgagaaggatgctaagcagatcattgagacagctaagcaagacgtggatgatgaatacagcatgcagtacagtgccaggggctcccagtcctactacaccgtggctcatgccatctcggagagggtggagaaacagtctgccctcctaattaatgggaccctaaagcattaccagctccagggcctggaatggatggtttccctgtataataacaacttgaacggaatcttagccgatgaaatggggcttggaaagaccatacagaccattgcactcatcacttatctgatggagcacaaaagactcaatggcccctatctcatcattgttcccctttcgactctatctaactggacatatgaatttgacaaatgggctccttctgtggtgaagatttcttacaagggtactcctgccatgcgtcgctcccttgtcccccagctacggagtggcaaattcaatgtcctcttgactacttatgagtatattataaaagacaagcacattcttgcaaagattcggtggaaatacatgatagtggacgaaggccaccgaatgaagaatcaccactgcaagctgactcaggtcttgaacactcactatgtggcccccagaaggatcctcttgactgggaccccgctgcagaataagctccctgaactctgggccctcctcaacttcctcctcccaacaatttttaagagctgcagcacatttgaacaatggttcaatgctccatttgccatgactggtgaaagggtggacttaaatgaagaagaaactatattgatcatcaggcgtctacataaggtgttaagaccatttttactaaggagactgaagaaagaagttgaatcccagcttcccgaaaaagtggaatatgtgatcaagtgtgacatgtcagctctgcagaagattctgtatcgccatatgcaagccaaggggatccttctcacagatggttctgagaaagataagaaggggaaaggaggtgctaagacacttatgaacactattatgcagttgagaaaaatctgcaaccacccatatatgtttcagcacattgaggaatcctttgctgaacacctaggctattcaaatggggtcatcaatggggctgaactgtatcgggcctcagggaagtttgagctgcttgatcgtattctgccaaaattgagagcgactaatcaccgagtgctgcttttctgccagatgacatctctcatgaccatcatggaggattattttgcttttcggaacttcctttacctacgccttgatggcaccaccaagtctgaagatcgtgctgctttgctgaagaaattcaatgaacctggatcccagtatttcattttcttgctgagcacaagagctggtggcctgggcttaaatcttcaggcagctgatacagtggtcatctttgacagcgactggaatcctcatcaggatctgcaggcccaagaccgagctcaccgcatcgggcagcagaacgaggtccgggtactgaggctctgtaccgtgaacagcgtggaggaaaagatcctcgcggccgcaaaatacaagctgaacgtggatcagaaagtgatccaggcgggcatgtttgaccaaaagtcttcaagccacgagcggagggcattcctgcaggccatcttggagcatgaggaggaaaatgaggaagaagatgaagtaccggacgatgagactctgaaccaaatgattgctcgacgagaagaagaatttgacctttttatgcggatggacatggaccggcggagggaagatgcccggaacccgaaacggaagccccgtttaatggaggaggatgagctgccctcctggatcattaaggatgacgctgaagtagaaaggctcacctgtgaagaagaggaggagaaaatatttgggagggggtcccgccagcgccgtgacgtggactacagtgacgccctcacggagaagcagtggctaagggccatcgaagacggcaatttggaggaaatggaagaggaagtacggcttaagaagcgaaaaagacgaagaaatgtggataaagatcctgcaaaagaagatgtggaaaaagctaagaagagaagaggccgccctcccgctgagaaactgtcaccaaatccccccaaactgacaaagcagatgaacgctatcatcgatactgtgataaactacaaagataggtgtaacgtggagaaggtgcccagtaattctcagttggaaatagaaggaaacagttcagggcgacagctcagtgaagtcttcattcagttaccttcaaggaaagaattaccagaatactatgaattaattaggaagccagtggatttcaaaaaaataaaggaaaggattcgtaatcataagtaccggagcctaggcgacctggagaaggatgtcatgcttctctgtcacaacgctcagacgttcaacctggagggatcccagatctatgaagactccatcgtcttacagtcagtgtttaagagtgcccggcagaaaattgccaaagaggaagagagtgaggatgaaagcaatgaagaggaggaagaggaagatgaagaagagtcagagtccgaggcaaaatcagtcaaggtgaaaattaagctcaataaaaaagatgacaaaggccgggacaaagggaaaggcaagaaaaggccaaatcgaggaaaagccaaacctgtagtgagcgattttgacagcgatgaggagcaggatgaacgtgaacagtcagaaggaagtgggacggatgatgagtgatcagtatggacctttttccttggtagaactgaattccttcctcccctgtctcatttctacccagtgagttcatttgtcatataggcactgggttgtttctatatcatcatcgtctataaactagctttaggatagtgccagacaaacatatgatatcatggtgtaaaaaacacacacatacacaaatatttgtaacatattgtgaccaaatgggcctcaaagattcagattgaaacaaacaaaaagcttttgatggaaaatatgtgggtggatagtatatttctatgggtgggtctaatttggtaacggtttgattgtgcctggttttatcacctgttcagatgagaagatttttgtcttttgtagcactgataaccaggagaagccattaaaagccactggttattttatttttcatcaggcaattttcgaggtttttatttgttcggtattgtttttttacactgtggtacatataagcaactttaataggtgataaatgtacagtagttagatttcacctgcatatacatttttccattttatgctctatgatctgaacaaaagctttttgaattgtataagatttatgtctactgtaaacattgcttaatttttttgctcttgatttaaaaaaaagttttgttgaaagcgctattgaatattgcaatctatatagtgtattggatggcttcttttgtcaccctgatctcctatgttaccaatgtgtatcgtctccttctccctaaagtgtacttaatctttgctttctttgcacaatgtctttggttgcaagtcataagcctgaggcaaataaaattccagtaatttcgaagaatgtggtgttggtgctttcctaataaagaaataatttagcttgacaaa

SEQ ID NO: 30503 - DNA, 5703 bp, Homo sapiens
  source 1..5703: mol_type = unassigned DNA
tttctgtactctgggtgactcagagagggaagagattcagccagcacactcctcgcgagcaagcattactctactgactggcagagacaggagaggtagatgtccacgcccacagaccctggtgcgatgccccacccagggccttcgccggggcctgggccttcccctgggccaattcttgggcctagtccaggaccaggaccatccccaggttccgtccacagcatgatggggccaagtcctggacctccaagtgtctcccatcctatgccgacgatggggtccacagacttcccacaggaaggcatgcatcaaatgcataagcccatcgatggtatacatgacaaggggattgtagaagacatccattgtggatccatgaagggcactggtatgcgaccacctcacccaggcatgggccctccccagagtccaatggatcaacacagccaaggttatatgtcaccacacccatctccattaggagccccagagcacgtctccagccctatgtctggaggaggcccaactccacctcagatgccaccaagccagccgggggccctcatcccaggtgatccgcaggccatgagccagcccaacagaggtccctcacctttcagtcctgtccagctgcatcagcttcgagctcagattttagcttataaaatgctggcccgaggccagcccctccccgaaacgctgcagcttgcagtccaggggaaaaggacgttgcctggcttgcagcaacaacagcagcagcaacagcagcagcagcagcagcagcagcagcagcagcagcagcaacagcagccgcagcagcagccgccgcaaccacagacgcagcaacaacagcagccggcccttgttaactacaacagaccatctggcccggggccggagctgagcggcccgagcaccccgcagaagctgccggtgcccgcgcccggcggccggccctcgcccgcgccccccgcagccgcgcagccgcccgcggccgcagtgcccgggccctcagtgccgcagccggccccggggcagccctcgcccgtcctccagctgcagcagaagcagagccgcatcagccccatccagaaaccgcaaggcctggaccccgtggaaattctgcaagagcgggaatacagacttcaggcccgcatagctcataggatacaagaactggaaaatctgcctggctctttgccaccagatttaagaaccaaagcaaccgtggaactaaaagcacttcggttactcaatttccagcgtcagctgagacaggaggtggtggcctgcatgcgcagggacacgaccctggagacggctctcaactccaaagcatacaaacggagcaagcgccagactctgagagaagctcgcatgaccgagaagctggagaagcagcagaagattgagcaggagaggaaacgccgtcagaaacaccaggaatacctgaacagtattttgcaacatgcaaaagattttaaggaatatcatcggtctgtggccggaaagatccagaagctctccaaagcagtggcaacttggcatgccaacactgaaagagagcagaagaaggagacagagcggattgaaaaggagagaatgcggcgactgatggctgaagatgaggagggttatagaaaactgattgatcaaaagaaagacaggcgtttagcttaccttttgcagcagaccgatgagtatgtagccaatctgaccaatctggtttgggagcacaagcaagcccaggcagccaaagagaagaagaagaggaggaggaggaagaagaaggctgaggagaatgcagagggtggggagtctgccctgggaccggatggagagcccatagatgagagcagccagatgagtgacctccctgtcaaagtgactcacacagaaaccggcaaggttctgttcggaccagaagcacccaaagcaagtcagctggacgcctggctggaaatgaatcctggttatgaagttgcccctagatctgacagtgaagagagtgattctgattatgaggaagaggatgaggaagaagagtccagtaggcaggaaaccgaagagaaaatactcctggatccaaatagcgaagaagtttctgagaaggatgctaagcagatcattgagacagctaagcaagacgtggatgatgaatacagcatgcagtacagtgccaggggctcccagtcctactacaccgtggctcatgccatctcggagagggtggagaaacagtctgccctcctaattaatgggaccctaaagcattaccagctccagggcctggaatggatggtttccctgtataataacaacttgaacggaatcttagccgatgaaatggggcttggaaagaccatacagaccattgcactcatcacttatctgatggagcacaaaagactcaatggcccctatctcatcattgttcccctttcgactctatctaactggacatatgaatttgacaaatgggctccttctgtggtgaagatttcttacaagggtactcctgccatgcgtcgctcccttgtcccccagctacggagtggcaaattcaatgtcctcttgactacttatgagtatattataaaagacaagcacattcttgcaaagattcggtggaaatacatgatagtggacgaaggccaccgaatgaagaatcaccactgcaagctgactcaggtcttgaacactcactatgtggcccccagaaggatcctcttgactgggaccccgctgcagaataagctccctgaactctgggccctcctcaacttcctcctcccaacaatttttaagagctgcagcacatttgaacaatggttcaatgctccatttgccatgactggtgaaagggtggacttaaatgaagaagaaactatattgatcatcaggcgtctacataaggtgttaagaccatttttactaaggagactgaagaaagaagttgaatcccagcttcccgaaaaagtggaatatgtgatcaagtgtgacatgtcagctctgcagaagattctgtatcgccatatgcaagccaaggggatccttctcacagatggttctgagaaagataagaaggggaaaggaggtgctaagacacttatgaacactattatgcagttgagaaaaatctgcaaccacccatatatgtttcagcacattgaggaatcctttgctgaacacctaggctattcaaatggggtcatcaatggggctgaactgtatcgggcctcagggaagtttgagctgcttgatcgtattctgccaaaattgagagcgactaatcaccgagtgctgcttttctgccagatgacatctctcatgaccatcatggaggattattttgcttttcggaacttcctttacctacgccttgatggcaccaccaagtctgaagatcgtgctgctttgctgaagaaattcaatgaacctggatcccagtatttcattttcttgctgagcacaagagctggtggcctgggcttaaatcttcaggcagctgatacagtggtcatctttgacagcgactggaatcctcatcaggatctgcaggcccaagaccgagctcaccgcatcgggcagcagaacgaggtccgggtactgaggctctgtaccgtgaacagcgtggaggaaaagatcctcgcggccgcaaaatacaagctgaacgtggatcagaaagtgatccaggcgggcatgtttgaccaaaagtcttcaagccacgagcggagggcattcctgcaggccatcttggagcatgaggaggaaaatgaggaagaagatgaagtaccggacgatgagactctgaaccaaatgattgctcgacgagaagaagaatttgacctttttatgcggatggacatggaccggcggagggaagatgcccggaacccgaaacggaagccccgtttaatggaggaggatgagctgccctcctggatcattaaggatgacgctgaagtagaaaggctcacctgtgaagaagaggaggagaaaatatttgggagggggtcccgccagcgccgtgacgtggactacagtgacgccctcacggagaagcagtggctaagggccatcgaagacggcaatttggaggaaatggaagaggaagtacggcttaagaagcgaaaaagacgaagaaatgtggataaagatcctgcaaaagaagatgtggaaaaagctaagaagagaagaggccgccctcccgctgagaaactgtcaccaaatccccccaaactgacaaagcagatgaacgctatcatcgatactgtgataaactacaaagatagttcagggcgacagctcagtgaagtcttcattcagttaccttcaaggaaagaattaccagaatactatgaattaattaggaagccagtggatttcaaaaaaataaaggaaaggattcgtaatcataagtaccggagcctaggcgacctggagaaggatgtcatgcttctctgtcacaacgctcagacgttcaacctggagggatcccagatctatgaagactccatcgtcttacagtcagtgtttaagagtgcccggcagaaaattgccaaagaggaagagagtgaggatgaaagcaatgaagaggaggaagaggaagatgaagaagagtcagagtccgaggcaaaatcagtcaaggtgaaaattaagctcaataaaaaagatgacaaaggccgggacaaagggaaaggcaagaaaaggccaaatcgaggaaaagccaaacctgtagtgagcgattttgacagcgatgaggagcaggatgaacgtgaacagtcagaaggaagtgggacggatgatgagtgatcagtatggacctttttccttggtagaactgaattccttcctcccctgtctcatttctacccagtgagttcatttgtcatataggcactgggttgtttctatatcatcatcgtctataaactagctttaggatagtgccagacaaacatatgatatcatggtgtaaaaaacacacacatacacaaatatttgtaacatattgtgaccaaatgggcctcaaagattcagattgaaacaaacaaaaagcttttgatggaaaatatgtgggtggatagtatatttctatgggtgggtctaatttggtaacggtttgattgtgcctggttttatcacctgttcagatgagaagatttttgtcttttgtagcactgataaccaggagaagccattaaaagccactggttattttatttttcatcaggcaattttcgaggtttttatttgttcggtattgtttttttacactgtggtacatataagcaactttaataggtgataaatgtacagtagttagatttcacctgcatatacatttttccattttatgctctatgatctgaacaaaagctttttgaattgtataagatttatgtctactgtaaacattgcttaatttttttgctcttgatttaaaaaaaagttttgttgaaagcgctattgaatattgcaatctatatagtgtattggatggcttcttttgtcaccctgatctcctatgttaccaatgtgtatcgtctccttctccctaaagtgtacttaatctttgctttctttgcacaatgtctttggttgcaagtcataagcctgaggcaaataaaattccagtaatttcgaagaatgtggtgttggtgctttcctaataaagaaataatttagcttgacaaa

SEQ ID NO: 30504 - DNA, 1347 bp, Homo sapiens
  source 1..1347: mol_type = unassigned DNA
ggccgccctcccgctgagaaactgtcaccaaatccccccaaactgacaaagcagatgaacgctatcatcgatactgtgataaactacaaagataggaaaggattcgtaatcataagtaccggagcctaggcgacctggagaaggatgtcatgcttctctgtcacaacgctcagacgttcaacctggagggatcccagatctatgaagactccatcgtcttacagtcagtgtttaagagtgcccggcagaaaattgccaaagaggaagagagtgaggatgaaagcaatgaagaggaggaagaggaagatgaagaagagtcagagtccgaggcaaaatcagtcaaggtgaaaattaagctcaataaaaaagatgacaaaggccgggacaaagggaaaggcaagaaaaggccaaatcgaggaaaagccaaacctgtagtgagcgattttgacagcgatgaggagcaggatgaacgtgaacagtcagaaggaagtgggacggatgatgagtgatcagtatggacctttttccttggtagaactgaattccttcctcccctgtctcatttctacccagtgagttcatttgtcatataggcactgggttgtttctatatcatcatcgtctataaactagctttaggatagtgccagacaaacatatgatatcatggtgtaaaaaacacacacatacacaaatatttgtaacatattgtgaccaaatgggcctcaaagattcagattgaaacaaacaaaaagcttttgatggaaaatatgtgggtggatagtatatttctatgggtgggtctaatttggtaacggtttgattgtgcctggttttatcacctgttcagatgagaagatttttgtcttttgtagcactgataaccaggagaagccattaaaagccactggttattttatttttcatcaggcaattttcgaggtttttatttgttcggtattgtttttttacactgtggtacatataagcaactttaataggtgataaatgtacagtagttagatttcacctgcatatacatttttccattttatgctctatgatctgaacaaaagctttttgaattgtataagatttatgtctactgtaaacattgcttaatttttttgctcttgatttaaaaaaaagttttgttgaaagcgctattgaatattgcaatctatatagtgtattggatggcttcttttgtcaccctgatctcctatgttaccaatgtgtatcgtctccttctccctaaagtgtacttaatctttgctttctttgcacaatgtctttggttgcaagtcataagcctgaggcaaataaaattccagtaatttcgaagaa

SEQ ID NO: 30505 - DNA, 1121 bp, Homo sapiens
  source 1..1121: mol_type = unassigned DNA
ctcgcactcttgcgcaacacgtcaccagtcggaaactgggggtttgcttctgtgatttatttcattattgtgctggtaaaaggccatcgaagacggcaatttggaggaaatggaagaggaagtacggcttaagaagcgaaaaagacgaagaaatgtggataaagatcctgcaaaagaagatgtggaaaaagctaagaagagaagaggccgccctcccgctgagaaactgtcaccaaatccccccaaactgacaaagcagatgaacgctatcatcgatactgtgataaactacaaagatagttcagggcgacagctcagtgaagtcttcattcagttaccttcaaggaaagaattaccagaatactatgaattaattaggaagccagtggatttcaaaaaaataaaggaaaggattcgtaatcataagtaccggagcctaggcgacctggagaaggatgtcatgcttctctgtcacaacgctcagacgttcaacctggagggatcccagatctatgaagactccatcgtcttacagtcagtgtttaagagtgcccggcagaaaattgccaaagaggaagagagtgaggatgaaagcaatgaagaggaggaagaggaagatgaagaagagtcagagtccgaggcaaaatcagtcaaggtgaaaattaagctcaataaaaaagatgacaaaggccgggacaaagggaaaggcaagaaaaggccaaatcgaggaaaagccaaacctgtagtgagcgattttgacagcgatgaggagcaggatgaacgtgaacagtcagaaggaagtgggacggatgatgagtgatcagtatggacctttttccttggtagaactgaattccttcctcccctgtctcatttctacccagtgagttcatttgtcatataggcactgggttgtttctatatcatcatcgtctataaactagctttaggatagtgccagacaaacatatgatatcatggtgtaaaaaacacacacatacacaaatatttgtaacatattgtgaccaaatgggcctcaaagattcagattgaaacaaacaaaaagcttttgatggaaaatatgtgggtggatagtatatttctatgggtgggtctaattt

SEQ ID NO: 30506 - DNA, 1787 bp, Homo sapiens
  source 1..1787: mol_type = unassigned DNA
agggctcgcactcttgcgcaacacgtcaccagtcggaaactgggggtttgcttctgtgatttatttcattattgtgctggtaaaagctgatgaagagactagcagctcgctgctttgctggcttgttaattttatccccactaactgtgatttctgatagccggcctgctgatagtggtaagtgctgctggctctggtttaaagcaagcgtttgcaggccatcgaagacggcaatttggaggaaatggaagaggaagtacggcttaagaagcgaaaaagacgaagaaatgtggataaagatcctgcaaaagaagatgtggaaaaagctaagaagagaagaggccgccctcccgctgagaaactgtcaccaaatccccccaaactgacaaagcagatgaacgctatcatcgatactgtgataaactacaaagatagttcagggcgacagctcagtgaagtcttcattcagttaccttcaaggaaagaattaccagaatactatgaattaattaggaagccagtggatttcaaaaaaataaaggaaaggattcgtaatcataagtaccggagcctaggcgacctggagaaggatgtcatgcttctctgtcacaacgctcagacgttcaacctggagggatcccagatctatgaagactccatcgtcttacagtcagtgtttaagagtgcccggcagaaaattgccaaagaggaagagagtgaggatgaaagcaatgaagaggaggaagaggaagatgaagaagagtcagagtccgaggcaaaatcagtcaaggtgaaaattaagctcaataaaaaagatgacaaaggccgggacaaagggaaaggcaagaaaaggccaaatcgaggaaaagccaaacctgtagtgagcgattttgacagcgatgaggagcaggatgaacgtgaacagtcagaaggaagtgggacggatgatgagtgatcagtatggacctttttccttggtagaactgaattccttcctcccctgtctcatttctacccagtgagttcatttgtcatataggcactgggttgtttctatatcatcatcgtctataaactagctttaggatagtgccagacaaacatatgatatcatggtgtaaaaaacacacacatacacaaatatttgtaacatattgtgaccaaatgggcctcaaagattcagattgaaacaaacaaaaagcttttgatggaaaatatgtgggtggatagtatatttctatgggtgggtctaatttggtaacggtttgattgtgcctggttttatcacctgttcagatgagaagatttttgtcttttgtagcactgataaccaggagaagccattaaaagccactggttattttatttttcatcaggcaattttcgaggtttttatttgttcggtattgtttttttacactgtggtacatataagcaactttaataggtgataaatgtacagtagttagatttcacctgcatatacatttttccattttatgctctatgatctgaacaaaagctttttgaattgtataagatttatgtctactgtaaacattgcttaatttttttgctcttgatttaaaaaaaagttttgttgaaagcgctattgaatattgcaatctatatagtgtattggatggcttcttttgtcaccctgatctcctatgttaccaatgtgtatcgtctccttctccctaaagtgtacttaatctttgctttctttgcacaatgtctttggttgcaagtcataagcctgaggcaaataaaattccagtaatttc

SEQ ID NO: 30507 - DNA, 947 bp, Homo sapiens
  source 1..947: mol_type = unassigned DNA
agcatgggagccgtctgtatgttgaattagggctcgcactcttgcgcaacacgtcaccagtcggaaactgggggtttgcttctgtgatttatttcattattgtgctgtgctgctggctctggtttaaagcaagcgtttgcaggccatcgaagacggcaatttggaggaaatggaagaggaagtacggcttaagaagcgaaaaagacgaagaaatgtggataaagatcctgcaaaagaagatgtggaaaaagctaagaagagaagaggccgccctcccgctgagaaactgtcaccaaatccccccaaactgacaaagcagatgaacgctatcatcgatactgtgataaactacaaagataggtgtaacgtggagaaggtgcccagtaattctcagttggaaatagaaggaaacagttcagggcgacagctcagtgaagtcttcattcagttaccttcaaggaaagaattaccagaatactatgaattaattaggaagccagtggatttcaaaaaaataaaggaaaggattcgtaatcataagtaccggagcctaggcgacctggagaaggatgtcatgcttctctgtcacaacgctcagacgttcaacctggagggatcccagatctatgaagactccatcgtcttacagtcagtgtttaagagtgcccggcagaaaattgccaaagaggaagagagtgaggatgaaagcaatgaagaggaggaagaggaagatgaagaagagtcagagtccgaggcaaaatcagtcaaggtgaaaattaagctcaataaaaaagatgacaaaggccgggacaaagggaaaggcaagaaaaggccaaatcgaggaaaagccaaacctgtagtgagcgattttgacagcgatgaggagcaggatgaacgtgaacagtcagaaggaagtgggacggatgatgagtgatcagtatggacct

SEQ ID NO: 30508 - DNA, 5561 bp, Homo sapiens
  source 1..5561: mol_type = unassigned DNA
gtagatgtccacgcccacagaccctggtgcgatgccccacccagggccttcgccggggcctgggccttcccctgggccaattcttgggcctagtccaggaccaggaccatccccaggttccgtccacagcatgatggggccaagtcctggacctccaagtgtctcccatcctatgccgacgatggggtccacagacttcccacaggaaggcatgcatcaaatgcataagcccatcgatggtatacatgacaaggggattgtagaagacatccattgtggatccatgaagggcactggtatgcgaccacctcacccaggcatgggccctccccagagtccaatggatcaacacagccaaggttatatgtcaccacacccatctccattaggagccccagagcacgtctccagccctatgtctggaggaggcccaactccacctcagatgccaccaagccagccgggggccctcatcccaggtgatccgcaggccatgagccagcccaacagaggtccctcacctttcagtcctgtccagctgcatcagcttcgagctcagattttagcttataaaatgctggcccgaggccagcccctccccgaaacgctgcagcttgcagtccaggggaaaaggacgttgcctggcttgcagcaacaacagcagcagcaacagcagcagcagcagcagcagcagcagcagcagcagcagcaacagcagccgcagcagcagccgccgcaaccacagacgcagcaacaacagcagccggcccttgttaactacaacagaccatctggcccggggccggagctgagcggcccgagcaccccgcagaagctgccggtgcccgcgcccggcggccggccctcgcccgcgccccccgcagccgcgcagccgcccgcggccgcagtgcccgggccctcagtgccgcagccggccccggggcagccctcgcccgtcctccagctgcagcagaagcagagccgcatcagccccatccagaaaccgcaaggcctggaccccgtggaaattctgcaagagcgggaatacagacttcaggcccgcatagctcataggatacaagaactggaaaatctgcctggctctttgccaccagatttaagaaccaaagcaaccgtggaactaaaagcacttcggttactcaatttccagcgtcagctgagacaggaggtggtggcctgcatgcgcagggacacgaccctggagacggctctcaactccaaagcatacaaacggagcaagcgccagactctgagagaagctcgcatgaccgagaagctggagaagcagcagaagattgagcaggagaggaaacgccgtcagaaacaccaggaatacctgaacagtattttgcaacatgcaaaagattttaaggaatatcatcggtctgtggccggaaagatccagaagctctccaaagcagtggcaacttggcatgccaacactgaaagagagcagaagaaggagacagagcggattgaaaaggagagaatgcggcgactgatggctgaagatgaggagggttatagaaaactgattgatcaaaagaaagacaggcgtttagcttaccttttgcagcagaccgatgagtatgtagccaatctgaccaatctggtttgggagcacaagcaagcccaggcagccaaagagaagaagaagaggaggaggaggaagaagaaggctgaggagaatgcagagggtggggagtctgccctgggaccggatggagagcccatagatgagagcagccagatgagtgacctccctgtcaaagtgactcacacagaaaccggcaaggttctgttcggaccagaagcacccaaagcaagtcagctggacgcctggctggaaatgaatcctggttatgaagttgcccctagatctgacagtgaagagagtgattctgattatgaggaagaggatgaggaagaagagtccagtaggcaggaaaccgaagagaaaatactcctggatccaaatagcgaagaagtttctgagaaggatgctaagcagatcattgagacagctaagcaagacgtggatgatgaatacagcatgcagtacagtgccaggggctcccagtcctactacaccgtggctcatgccatctcggagagggtggagaaacagtctgccctcctaattaatgggaccctaaagcattaccagctccagggcctggaatggatggtttccctgtataataacaacttgaacggaatcttagccgatgaaatggggcttggaaagaccatacagaccattgcactcatcacttatctgatggagcacaaaagactcaatggcccctatctcatcattgttcccctttcgactctatctaactggacatatgaatttgacaaatgggctccttctgtggtgaagatttcttacaagggtactcctgccatgcgtcgctcccttgtcccccagctacggagtggcaaattcaatgtcctcttgactacttatgagtatattataaaagacaagcacattcttgcaaagattcggtggaaatacatgatagtggacgaaggccaccgaatgaagaatcaccactgcaagctgactcaggtcttgaacactcactatgtggcccccagaaggatcctcttgactgggaccccgctgcagaataagctccctgaactctgggccctcctcaacttcctcctcccaacaatttttaagagctgcagcacatttgaacaatggttcaatgctccatttgccatgactggtgaaagggtggacttaaatgaagaagaaactatattgatcatcaggcgtctacataaggtgttaagaccatttttactaaggagactgaagaaagaagttgaatcccagcttcccgaaaaagtggaatatgtgatcaagtgtgacatgtcagctctgcagaagattctgtatcgccatatgcaagccaaggggatccttctcacagatggttctgagaaagataagaaggggaaaggaggtgctaagacacttatgaacactattatgcagttgagaaaaatctgcaaccacccatatatgtttcagcacattgaggaatcctttgctgaacacctaggctattcaaatggggtcatcaatggggctgaactgtatcgggcctcagggaagtttgagctgcttgatcgtattctgccaaaattgagagcgactaatcaccgagtgctgcttttctgccagatgacatctctcatgaccatcatggaggattattttgcttttcggaacttcctttacctacgccttgatggcaccaccaagtctgaagatcgtgctgctttgctgaagaaattcaatgaacctggatcccagtatttcattttcttgctgagcacaagagctggtggcctgggcttaaatcttcaggcagctgatacagtggtcatctttgacagcgactggaatcctcatcaggatctgcaggcccaagaccgagctcaccgcatcgggcagcagaacgaggtccgggtactgaggctctgtaccgtgaacagcgtggaggaaaagatcctcgcggccgcaaaatacaagctgaacgtggatcagaaagtgatccaggcgggcatgtttgaccaaaagtcttcaagccacgagcggagggcattcctgcaggccatcttggagcatgaggaggaaaatgaggaagaagatgaagtaccggacgatgagactctgaaccaaatgattgctcgacgagaagaagaatttgacctttttatgcggatggacatggaccggcggagggaagatgcccggaacccgaaacggaagccccgtttaatggaggaggatgagctgccctcctggatcattaaggatgacgctgaagtagaaaggctcacctgtgaagaagaggaggagaaaatatttgggagggggtcccgccagcgccgtgacgtggactacagtgacgccctcacggagaagcagtggctaagggccatcgaagacggcaatttggaggaaatggaagaggaagtacggcttaagaagcgaaaaagacgaagaaatgtggataaagatcctgcaaaagaagatgtggaaaaagctaagaagagaagaggccgccctcccgctgagaaactgtcaccaaatccccccaaactgacaaagcagatgaacgctatcatcgatactgtgataaactacaaagatagttcagggcgacagctcagtgaagtcttcattcagttaccttcaaggaaagaattaccagaatactatgaattaattaggaagccagtggatttcaaaaaaataaaggaaaggattcgtaatcataagtaccggagcctaggcgacctggagaaggatgtcatgcttctctgtcacaacgctcagacgttcaacctggagggatcccagatctatgaagactccatcgtcttacagtcagtgtttaagagtgcccggcagaaaattgccaaagaggaagagagtgaggatgaaagcaatgaagaggaggaagaggaagatgaagaagagtcagagtccgaggcaaaatcagtcaaggtgaaaattaagctcaataaaaaagatgacaaaggccgggacaaagggaaaggcaagaaaaggccaaatcgaggaaaagccaaacctgtagtgagcgattttgacagcgatgaggagcaggatgaacgtgaacagtcagaaggaagtgggacggatgatgagtgatcagtatggacctttttccttggtagaactgaattccttcctcccctgtctcatttctacccagtgagttcatttgtcatataggcactgggttgtttctatatcatcatcgtctataaactagctttaggatagtgccagacaaacatatgatatcatggtgtaaaaaacacacacatacacaaatatttgtaacatattgtgaccaaatgggcctcaaagattcagattgaaacaaacaaaaagcttttgatggaaaatatgtgggtggatagtatatttctatgggtgggtctaatttggtaacggtttgattgtgcctggttttatcacctgttcagatgagaagatttttgtcttttgtagcactgataaccaggagaagccattaaaagccactggttattttatttttcatcaggcaattttcgaggtttttatttgttcggtattgtttttttacactgtggtacatataagcaactttaataggtgataaatgtacagtagttagatttcacctgcatatacatttttccattttatgctctatgatctgaacaaaagctttttgaattgtataagatttatgtctactgtaaacattgcttaatttttttgctcttgatttaaaaaaaagttttgttgaaagcgctattgaatattgcaatctatatagtgtattggatggcttcttttgtcaccctgatctcctatgttaccaatgtgtatcgtctccttctccctaaagtgtacttaatctttgctttctttgcacaatgtctttggttgcaagtcataagcctgaggcaaataaaattccagtaatttcgaagaa

SEQ ID NO: 30509 - DNA, 5867 bp, Homo sapiens
  source 1..5867: mol_type = unassigned DNA
tcagaagaaagccccgagatcacagagacccggcgagatcacagagacccggcctgaaggaacgtggaaagaccaatgtacctgttttgaccggttgcctggagcaagaagttccagttggggagaattttcagaagataaagtcggagattgtggaaagacttgacttgcagcattactctactgactggcagagacaggagaggtagatgtccacgcccacagaccctggtgcgatgccccacccagggccttcgccggggcctgggccttcccctgggccaattcttgggcctagtccaggaccaggaccatccccaggttccgtccacagcatgatggggccaagtcctggacctccaagtgtctcccatcctatgccgacgatggggtccacagacttcccacaggaaggcatgcatcaaatgcataagcccatcgatggtatacatgacaaggggattgtagaagacatccattgtggatccatgaagggcactggtatgcgaccacctcacccaggcatgggccctccccagagtccaatggatcaacacagccaaggttatatgtcaccacacccatctccattaggagccccagagcacgtctccagccctatgtctggaggaggcccaactccacctcagatgccaccaagccagccgggggccctcatcccaggtgatccgcaggccatgagccagcccaacagaggtccctcacctttcagtcctgtccagctgcatcagcttcgagctcagattttagcttataaaatgctggcccgaggccagcccctccccgaaacgctgcagcttgcagtccaggggaaaaggacgttgcctggcttgcagcaacaacagcagcagcaacagcagcagcagcagcagcagcagcagcagcagcagcagcaacagcagccgcagcagcagccgccgcaaccacagacgcagcaacaacagcagccggcccttgttaactacaacagaccatctggcccggggccggagctgagcggcccgagcaccccgcagaagctgccggtgcccgcgcccggcggccggccctcgcccgcgccccccgcagccgcgcagccgcccgcggccgcagtgcccgggccctcagtgccgcagccggccccggggcagccctcgcccgtcctccagctgcagcagaagcagagccgcatcagccccatccagaaaccgcaaggcctggaccccgtggaaattctgcaagagcgggaatacagacttcaggcccgcatagctcataggatacaagaactggaaaatctgcctggctctttgccaccagatttaagaaccaaagcaaccgtggaactaaaagcacttcggttactcaatttccagcgtcagctgagacaggaggtggtggcctgcatgcgcagggacacgaccctggagacggctctcaactccaaagcatacaaacggagcaagcgccagactctgagagaagctcgcatgaccgagaagctggagaagcagcagaagattgagcaggagaggaaacgccgtcagaaacaccaggaatacctgaacagtattttgcaacatgcaaaagattttaaggaatatcatcggtctgtggccggaaagatccagaagctctccaaagcagtggcaacttggcatgccaacactgaaagagagcagaagaaggagacagagcggattgaaaaggagagaatgcggcgactgatggctgaagatgaggagggttatagaaaactgattgatcaaaagaaagacaggcgtttagcttaccttttgcagcagaccgatgagtatgtagccaatctgaccaatctggtttgggagcacaagcaagcccaggcagccaaagagaagaagaagaggaggaggaggaagaagaaggctgaggagaatgcagagggtggggagtctgccctgggaccggatggagagcccatagatgagagcagccagatgagtgacctccctgtcaaagtgactcacacagaaaccggcaaggttctgttcggaccagaagcacccaaagcaagtcagctggacgcctggctggaaatgaatcctggttatgaagttgcccctagatctgacagtgaagagagtgattctgattatgaggaagaggatgaggaagaagagtccagtaggcaggaaaccgaagagaaaatactcctggatccaaatagcgaagaagtttctgagaaggatgctaagcagatcattgagacagctaagcaagacgtggatgatgaatacagcatgcagtacagtgccaggggctcccagtcctactacaccgtggctcatgccatctcggagagggtggagaaacagtctgccctcctaattaatgggaccctaaagcattaccagctccagggcctggaatggatggtttccctgtataataacaacttgaacggaatcttagccgatgaaatggggcttggaaagaccatacagaccattgcactcatcacttatctgatggagcacaaaagactcaatggcccctatctcatcattgttcccctttcgactctatctaactggacatatgaatttgacaaatgggctccttctgtggtgaagatttcttacaagggtactcctgccatgcgtcgctcccttgtcccccagctacggagtggcaaattcaatgtcctcttgactacttatgagtatattataaaagacaagcacattcttgcaaagattcggtggaaatacatgatagtggacgaaggccaccgaatgaagaatcaccactgcaagctgactcaggtcttgaacactcactatgtggcccccagaaggatcctcttgactgggaccccgctgcagaataagctccctgaactctgggccctcctcaacttcctcctcccaacaatttttaagagctgcagcacatttgaacaatggttcaatgctccatttgccatgactggtgaaagggtggacttaaatgaagaagaaactatattgatcatcaggcgtctacataaggtgttaagaccatttttactaaggagactgaagaaagaagttgaatcccagcttcccgaaaaagtggaatatgtgatcaagtgtgacatgtcagctctgcagaagattctgtatcgccatatgcaagccaaggggatccttctcacagatggttctgagaaagataagaaggggaaaggaggtgctaagacacttatgaacactattatgcagttgagaaaaatctgcaaccacccatatatgtttcagcacattgaggaatcctttgctgaacacctaggctattcaaatggggtcatcaatggggctgaactgtatcgggcctcagggaagtttgagctgcttgatcgtattctgccaaaattgagagcgactaatcaccgagtgctgcttttctgccagatgacatctctcatgaccatcatggaggattattttgcttttcggaacttcctttacctacgccttgatggcaccaccaagtctgaagatcgtgctgctttgctgaagaaattcaatgaacctggatcccagtatttcattttcttgctgagcacaagagctggtggcctgggcttaaatcttcaggcagctgatacagtggtcatctttgacagcgactggaatcctcatcaggatctgcaggcccaagaccgagctcaccgcatcgggcagcagaacgaggtccgggtactgaggctctgtaccgtgaacagcgtggaggaaaagatcctcgcggccgcaaaatacaagctgaacgtggatcagaaagtgatccaggcgggcatgtttgaccaaaagtcttcaagccacgagcggagggcattcctgcaggccatcttggagcatgaggaggaaaatgaggaagaagatgaagtaccggacgatgagactctgaaccaaatgattgctcgacgagaagaagaatttgacctttttatgcggatggacatggaccggcggagggaagatgcccggaacccgaaacggaagccccgtttaatggaggaggatgagctgccctcctggatcattaaggatgacgctgaagtagaaaggctcacctgtgaagaagaggaggagaaaatatttgggagggggtcccgccagcgccgtgacgtggactacagtgacgccctcacggagaagcagtggctaagggccatcgaagacggcaatttggaggaaatggaagaggaagtacggcttaagaagcgaaaaagacgaagaaatgtggataaagatcctgcaaaagaagatgtggaaaaagctaagaagagaagaggccgccctcccgctgagaaactgtcaccaaatccccccaaactgacaaagcagatgaacgctatcatcgatactgtgataaactacaaagataggtgtaacgtggagaaggtgcccagtaattctcagttggaaatagaaggaaacagttcagggcgacagctcagtgaagtcttcattcagttaccttcaaggaaagaattaccagaatactatgaattaattaggaagccagtggatttcaaaaaaataaaggaaaggattcgtaatcataagtaccggagcctaggcgacctggagaaggatgtcatgcttctctgtcacaacgctcagacgttcaacctggagggatcccagatctatgaagactccatcgtcttacagtcagtgtttaagagtgcccggcagaaaattgccaaagaggaagagagtgaggatgaaagcaatgaagaggaggaagaggaagatgaagaagagtcagagtccgaggcaaaatcagtcaaggtgaaaattaagctcaataaaaaagatgacaaaggccgggacaaagggaaaggcaagaaaaggccaaatcgaggaaaagccaaacctgtagtgagcgattttgacagcgatgaggagcaggatgaacgtgaacagtcagaaggaagtgggacggatgatgagtgatcagtatggacctttttccttggtagaactgaattccttcctcccctgtctcatttctacccagtgagttcatttgtcatataggcactgggttgtttctatatcatcatcgtctataaactagctttaggatagtgccagacaaacatatgatatcatggtgtaaaaaacacacacatacacaaatatttgtaacatattgtgaccaaatgggcctcaaagattcagattgaaacaaacaaaaagcttttgatggaaaatatgtgggtggatagtatatttctatgggtgggtctaatttggtaacggtttgattgtgcctggttttatcacctgttcagatgagaagatttttgtcttttgtagcactgataaccaggagaagccattaaaagccactggttattttatttttcatcaggcaattttcgaggtttttatttgttcggtattgtttttttacactgtggtacatataagcaactttaataggtgataaatgtacagtagttagatttcacctgcatatacatttttccattttatgctctatgatctgaacaaaagctttttgaattgtataagatttatgtctactgtaaacattgcttaatttttttgctcttgatttaaaaaaaagttttgttgaaagcgctattgaatattgcaatctatatagtgtattggatggcttcttttgtcaccctgatctcctatgttaccaatgtgtatcgtctccttctccctaaagtgtacttaatctttgctttctttgcacaatgtctttggttgcaagtcataagcctgaggcaaataaaattccagtaatttcgaagaatgtggtgttggtgctttcctaataaagaaataatttagcttgacaaa

SEQ ID NO: 30510 - DNA, 587 bp, Homo sapiens
  source 1..587: mol_type = unassigned DNA
agtagaactacatcccaggcatgtgtaggccatcgaagacggcaatttggaggaaatggaagaggaagtacggcttaagaagcgaaaaagacgaagaaatgtggataaagatcctgcaaaagaagatgtggaaaaagctaagaagagaagaggccgccctcccgctgagaaactgtcaccaaatccccccaaactgacaaagcagatgaacgctatcatcgatactgtgataaactacaaagatagttcagggcgacagctcagtgaagtcttcattcagttaccttcaaggaaagaattaccagaatactatgaattaattaggaagccagtggatttcaaaaaaataaaggaaaggattcgtaatcataagtaccggagcctaggcgacctggagaaggatgtcatgcttctctgtcacaacgctcagacgttcaacctggagggatcccagatctatgaagactccatcgtcttacagtcagtgtttaagagtgcccggcagaaaattgccaaagaggaagagagtgaggatgaaagcaatgaagaggaggaagaggaagatgaagaagagtcagagtccgagg

SEQ ID NO: 30511 - DNA, 921 bp, Homo sapiens
  source 1..921: mol_type = unassigned DNA
tgggagccgtctgtatgttgaattagggctcgcactcttgcgcaacacgtcaccagtcggaaactgggggtttgcttctgtgatttatttcattattgtgctgctgatgaagagactagcagctcgctgctttgctggcttgttaattttatccccactaactgtgatttctgatagccggcctgctgatagtggtaaggccatcgaagacggcaatttggaggaaatggaagaggaagtacggcttaagaagcgaaaaagacgaagaaatgtggataaagatcctgcaaaagaagatgtggaaaaagctaagaagagaagaggccgccctcccgctgagaaactgtcaccaaatccccccaaactgacaaagcagatgaacgctatcatcgatactgtgataaactacaaagatagttcagggcgacagctcagtgaagtcttcattcagttaccttcaaggaaagaattaccagaatactatgaattaattaggaagccagtggatttcaaaaaaataaaggaaaggattcgtaatcataagtaccggagcctaggcgacctggagaaggatgtcatgcttctctgtcacaacgctcagacgttcaacctggagggatcccagatctatgaagactccatcgtcttacagtcagtgtttaagagtgcccggcagaaaattgccaaagaggaagagagtgaggatgaaagcaatgaagaggaggaagaggaagatgaagaagagtcagagtccgaggcaaaatcagtcaaggtgaaaattaagctcaataaaaaagatgacaaaggccgggacaaagggaaaggcaagaaaaggccaaatcgaggaaaagccaaacctgtagtgagcgattttgacagcgatgaggagcaggatgaacgtgtaagtgtagccgactggga

SEQ ID NO: 30512 - DNA, 594 bp, Homo sapiens
  source 1..594: mol_type = unassigned DNA
aaatctagaggcagttgagcatgggagccgtctgtatgttgaattagggctcgcactcttgcgcaacacgtcaccagtcggaaactgggggtttgcttctgtgatttatttcattattgtgctggtaaaagctgatgaagagactagcagctcgctgctttgctggcttgttaattttatccccactaactgtgatttctgatagccggcctgctgatagtggtaaggccatcgaagacggcaatttggaggaaatggaagaggaagtacggcttaagaagcgaaaaagacgaagaaatgtggataaagatcctgcaaaagaagatgtggaaaaagctaagaagagaagaggccgccctcccgctgagaaactgtcaccaaatccccccaaactgacaaagcagatgaacgctatcatcgatactgtgataaactacaaagatagttcagggcgacagctcagtgaagtcttcattcagttaccttcaaggaaagaattaccagaatactatgaattaattaggaagccagtggatttcaaaaaaataaaggaaaggattcgtaatcataagtaccggagcctaggcgacctgg

SEQ ID NO: 30513 - DNA, 564 bp, Homo sapiens
  source 1..564: mol_type = unassigned DNA
gcagcggctcgggcagctgctcctgcccgcaccctcccctggagcccggggaggacaaggcgagcattactctactgactggcagagacaggagaggtagatgtccacgcccacagaccctggtgcgatgccccacccagggccttcgccggggcctgggccttcccctgggccaattcttgggcctagtccaggaccaggaccatccccaggttccgtccacagcatgatggggccaagtcctggacctccaagtgtctcccatcctatgccgacgatggggtccacagacttcccacaggaaggcatgcatcaaatgcataagcccatcgatggtatacatgacaaggggattgtagaagacatccattgtggatccatgaagggcactggtatgcgaccacctcacccaggcatgggccctccccagagtccaatggatcaacacagccaaggttatatgtcaccacacccatctccattaggagccccagagcacgtctccagccctatgtctggaggaggcccaactccacctcagatgccaccaagccagccgggggc

SEQ ID NO: 30514 - DNA, 1744 bp, Homo sapiens
  source 1..1744: mol_type = unassigned DNA
agattcagccagcacactcctcgcgagcaagcattactctactgactggcagagacaggagaggtagatgtccacgcccacagaccctggtgcgatgccccacccagggccttcgccggggcctgggccttcccctgggccaattcttgggcctagtccaggaccaggaccatccccaggttccgtccacagcatgatggggccaagtcctggacctccaagtgtctcccatcctatgccgacgatggggtccacagacttcccacaggaaggcatgcatcaaatgcataagcccatcgatggtatacatgacaaggggattgtagaagacatccattgtggatccatgaagggcactggtatgcgaccacctcacccaggcatgggccctccccagagtccaatggatcaacacagccaaggttatatgtcaccacacccatctccattaggagccccagagcacgtctccagccctatgtctggaggaggcccaactccacctcagatgccaccaagccagccgggggccctcatcccaggtgatccgcaggccatgagccagcccaacagaggtccctcacctttcagtcctgtccagctgcatcagcttcgagctcagattttagcttataaaatgctggcccgaggccagcccctccccgaaacgctgcagcttgcagtccaggggaaaaggacgttgcctggcttgcagcaacaacagcagcagcaacagcagcagcagcagcagcagcagcagcagcagcagcagcaacagcagccgcagcagcagccgccgcaaccacagacgcagcaacaacagcagccggcccttgttaactacaacagaccatctggcccggggccggagctgagcggcccgagcaccccgcagaagctgccggtgcccgcgcccggcggccggccctcgcccgcgccccccgcagccgcgcagccgcccgcggccgcagtgcccgggccctcagtgccgcagccggccccggggcagccctcgcccgtcctccagctgcagcagaagcagagccgcatcagccccatccagaaaccgcaaggcctggaccccgtggaaattctgcaagagcgggaatacagacttcaggcccgcatagctcataggatacaagaactggaaaatctgcctggctctttgccaccagatttaagaaccaaagcaaccgtggaactaaaagcacttcggttactcaatttccagcgtcagctgagacaggaggtggtggcctgcatgcgcagggacacgaccctggagacggctctcaactccaaagcatacaaacggagcaagcgccagactctgagagaagctcgcatgaccgagaagctggagaagcagcagaagattgagcaggagaggaaacgccgtcagaaacaccaggaatacctgaacagtattttgcaacatgcaaaagattttaaggaatatcatcggtctgtggccggaaagatccagaagctctccaaagcagtggcaacttggcatgccaacactgaaagagagcagaagaaggagacagagcggattgaaaaggagagaatgcggcgactgatggctgaagatgaggagggttatagaaaactgattgatcaaaagaaagacaggcgtttagcttaccttttgcagcagaccgatgagtatgtagccaatctgaccaatctggtttgggagcacaagcaagcccaggcagccaaagagaagaagaagagg

SEQ ID NO: 30515 - DNA, 750 bp, Homo sapiens
  source 1..750: mol_type = unassigned DNA
cttggagaggcggaggtggaaacgatgcgcaggagttggcttggggctttttgtttgcgtgtccctgtttacctattcataatcatggatcccctctgctttgtgatactgtgaaccacgcataacagcaattctttacaccaccgggttgagaagaaggcgcctgaggctgactttctggacctgccgtcacgcagtaaagatgtggttggccatcgaagacggcaatttggaggaaatggaagaggaagtacggcttaagaagcgaaaaagacgaagaaatgtggataaagatcctgcaaaagaagatgtggaaaaagctaagaagagaagaggccgccctcccgctgagaaactgtcaccaaatccccccaaactgacaaagcagatgaacgctatcatcgatactgtgataaactacaaagataggtgtaacgtggagaaggtgcccagtaattctcagttggaaatagaaggaaacagttcagggcgacagctcagtgaagtcttcattcagttaccttcaaggaaagaattaccagaatactatgaattaattaggaagccagtggatttcaaaaaaataaaggaaaggattcgtaatcataagtaccggagcctaggcgacctggagaaggatgtcatgcttctctgtcacaacgctcagacgttcaacctggagggatcccagatctatgaagactccatcgtcttacagtcagtgtttaagagtgcccggcagaaaattgc

SEQ ID NO: 30516 - DNA, 356 bp, Homo sapiens
  source 1..356: mol_type = unassigned DNA
tttccggtacacgcggggaaatcgcctcctgccagtgtctgatcgctcgcctccgcctccgcctctgccgcctggattgcattattatttttatccgggttgccgtttgctgcggatggtgcattactctactgactggcagagacaggagaggtagatgtccacgcccacagaccctggtgcgatgccccacccagggccttcgccggggcctgggccttcccctgggccaattcttgggcctagtccaggaccaggaccatccccaggttccgtccacagcatgatggggccaagtcctggacctccaagtgtctcccatcctatgccgacgatggggtccacagacttcccac

SEQ ID NO: 30517 - DNA, 5392 bp, Homo sapiens
  source 1..5392: mol_type = unassigned DNA
gtgaagggggggcggtggccgaggcgggcgggcgcgcgcgcgaggcttcccctcgtttggcggcggcggcggcttctttgtttcgtgaagagaagcgagacgcccattctgcccccggccccgcgcggaggggcgggggaggcgccgggaagtcgacggcgccggcggctcctgcaggaggccactgtctgcagctcccgtgaagatgtccactccagacccacccctgggcggaactcctcggccaggtccttccccgggccctggcccttcccctggagccatgctgggccctagcccgggtccctcgccgggctccgcccacagcatgatggggcccagcccagggccgccctcagcaggacaccccatccccacccaggggcctggagggtaccctcaggacaacatgcaccagatgcacaagcccatggagtccatgcatgagaagggcatgtcggacgacccgcgctacaaccagatgaaaggaatggggatgcggtcagggggccatgctgggatggggcccccgcccagccccatggaccagcactcccaaggttacccctcgcccctgggtggctctgagcatgcctctagtccagttccagccagtggcccgtcttcggggccccagatgtcttccgggccaggaggtgccccgctggatggtgctgacccccaggccttggggcagcagaaccggggcccaaccccatttaaccagaaccagctgcaccagctcagagctcagatcatggcctacaagatgctggccagggggcagcccctccccgaccacctgcagatggcggtgcagggcaagcggccgatgcccgggatgcagcagcagatgccaacgctacctccaccctcggtgtccgcaacaggacccggccctggccctggccctggccccggcccgggtcccggcccggcacctccaaattacagcaggcctcatggtatgggagggcccaacatgcctcccccaggaccctcgggcgtgccccccgggatgccaggccagcctcctggagggcctcccaagccctggcctgaaggacccatggcgaatgctgctgcccccacgagcacccctcagaagctgattcccccgcagccaacgggccgcccttcccccgcgccccctgccgtcccacccgccgcctcgcccgtgatgccaccgcagacccagtcccccgggcagccggcccagcccgcgcccatggtgccactgcaccagaagcagagccgcatcacccccatccagaagccgcggggcctcgaccctgtggagatcctgcaggagcgcgagtacaggctgcaggctcgcatcgcacaccgaattcaggaacttgaaaaccttcccgggtccctggccggggatttgcgaaccaaagcgaccattgagctcaaggccctcaggctgctgaacttccagaggcagctgcgccaggaggtggtggtgtgcatgcggagggacacagcgctggagacagccctcaatgctaaggcctacaagcgcagcaagcgccagtccctgcgcgaggcccgcatcactgagaagctggagaagcagcagaagatcgagcaggagcgcaagcgccggcagaagcaccaggaatacctcaatagcattctccagcatgccaaggatttcaaggaatatcacagatccgtcacaggcaaaatccagaagctgaccaaggcagtggccacgtaccatgccaacacggagcgggagcagaagaaagagaacgagcggatcgagaaggagcgcatgcggaggctcatggctgaagatgaggaggggtaccgcaagctcatcgaccagaagaaggacaagcgcctggcctacctcttgcagcagacagacgagtacgtggctaacctcacggagctggtgcggcagcacaaggctgcccaggtcgccaaggagaaaaagaagaaaaagaaaaagaagaaggcagaaaatgcagaaggacagacgcctgccattgggccggatggcgagcctctggacgagaccagccagatgagcgacctcccggtgaaggtgatccacgtggagagtgggaagatcctcacaggcacagatgcccccaaagccgggcagctggaggcctggctcgagatgaacccggggtatgaagtagctccgaggtctgatagtgaagaaagtggctcagaagaagaggaagaggaggaggaggaagagcagccgcaggcagcacagcctcccaccctgcccgtggaggagaagaagaagattccagatccagacagcgatgacgtctctgaggtggacgcgcggcacatcattgagaatgccaagcaagatgtcgatgatgaatatggcgtgtcccaggcccttgcacgtggcctgcagtcctactatgccgtggcccatgctgtcactgagagagtggacaagcagtcagcgcttatggtcaatggtgtcctcaaacagtaccagatcaaaggtttggagtggctggtgtccctgtacaacaacaacctgaacggcatcctggccgacgagatgggcctggggaagaccatccagaccatcgcgctcatcacgtacctcatggagcacaaacgcatcaatgggcccttcctcatcatcgtgcctctctcaacgctgtccaactgggcgtacgagtttgacaagtgggccccctccgtggtgaaggtgtcttacaagggatccccagcagcaagacgggcctttgtcccccagctccggagtgggaagttcaacgtcttgctgacgacgtacgagtacatcatcaaagacaagcacatcctcgccaagatccgttggaagtacatgattgtggacgaaggtcaccgcatgaagaaccaccactgcaagctgacgcaggtgctcaacacgcactatgtggcaccccgccgcctgctgctgacgggcacaccgctgcagaacaagcttcccgagctctgggcgctgctcaacttcctgctgcccaccatcttcaagagctgcagcaccttcgagcagtggtttaacgcaccctttgccatgaccggggaaaaggtggacctgaatgaggaggaaaccattctcatcatccggcgtctccacaaagtgctgcggcccttcttgctccgacgactcaagaaggaagtcgaggcccagttgcccgaaaaggtggagtacgtcatcaagtgcgacatgtctgcgctgcagcgagtgctctaccgccacatgcaggccaagggcgtgctgctgactgatggctccgagaaggacaagaagggcaaaggcggcaccaagaccctgatgaacaccatcatgcagctgcggaagatctgcaaccacccctacatgttccagcacatcgaggagtccttttccgagcacttggggttcactggcggcattgtccaagggctggacctgtaccgagcctcgggtaaatttgagcttcttgatagaattcttcccaaactccgagcaaccaaccacaaagtgctgctgttctgccaaatgacctccctcatgaccatcatggaagattactttgcgtatcgcggctttaaatacctcaggcttgatggaaccacgaaggcggaggaccggggcatgctgctgaaaaccttcaacgagcccggctctgagtacttcatcttcctgctcagcacccgggctggggggctcggcctgaacctccagtcggcagacactgtgatcatttttgacagcgactggaatcctcaccaggacctgcaagcgcaggaccgagcccaccgcatcgggcagcagaacgaggtgcgtgtgctccgcctctgcaccgtcaacagcgtggaggagaagatcctagctgcagccaagtacaagctcaacgtggaccagaaggtgatccaggccggcatgttcgaccagaagtcctccagccatgagcggcgcgccttcctgcaggccatcctggagcacgaggagcaggatgagagcagacactgcagcacgggcagcggcagtgccagcttcgcccacactgcccctccgccagcgggcgtcaaccccgacttggaggagccacctctaaaggaggaagacgaggtgcccgacgacgagaccgtcaaccagatgatcgcccggcacgaggaggagtttgatctgttcatgcgcatggacctggaccgcaggcgcgaggaggcccgcaaccccaagcggaagccgcgcctcatggaggaggacgagctcccctcgtggatcatcaaggacgacgcggaggtggagcggctgacctgtgaggaggaggaggagaagatgttcggccgtggctcccgccaccgcaaggaggtggactacagcgactcactgacggagaagcagtggctcaaggccatcgaggagggcacgctggaggagatcgaagaggaggtccggcagaagaaatcatcacggaagcgcaagcgagacagcgacgccggctcctccaccccgaccaccagcacccgcagccgcgacaaggacgacgagagcaagaagcagaagaagcgcgggcggccgcctgccgagaaactctcccctaacccacccaacctcaccaagaagatgaagaagattgtggatgccgtgatcaagtacaaggacagcagcagtggacgtcagctcagcgaggtcttcatccagctgccctcgcgaaaggagctgcccgagtactacgagctcatccgcaagcccgtggacttcaagaagataaaggagcgcattcgcaaccacaagtaccgcagcctcaacgacctagagaaggacgtcatgctcctgtgccagaacgcacagaccttcaacctggagggctccctgatctatgaagactccatcgtcttgcagtcggtcttcaccagcgtgcggcagaaaatcgagaaggaggatgacagtgaaggcgaggagagtgaggaggaggaagagggcgaggaggaaggctccgaatccgaatctcggtccgtcaaagtgaagatcaagcttggccggaaggagaaggcacaggaccggctgaagggcggccggcggcggccgagccgagggtcccgagccaagccggtcgtgagtgacgatgacagtgaggaggaacaagaggaggaccgctcaggaagtggcagcgaagaagactgagccccgacattccagtctcgaccccgagcccctcgttccagagctgagatggcataggccttagcagtaacgggtagcagcagatgtagtttcagacttggagtaaaactgtataaacaaaagaatcttccatatttatacagcagagaagctgtaggactgtttgtgactggccctgtcctggcatcagtagcatctgtaacagcattaactgtcttaaagagagagagagagaattccgaa

SEQ ID NO: 30518 - DNA, 5790 bp, Homo sapiens
  source 1..5790: mol_type = unassigned DNA
ggagaggccgccgcggtgctgagggggaggggagccggcgagcgcgcgcgcagcgggggcgcgggtggcgcgcgtgtgtgtgaagggggggcggtggccgaggcgggcgggcgcgcgcgcgaggcttcccctcgtttggcggcggcggcggcttctttgtttcgtgaagagaagcgagacgcccattctgcccccggccccgcgcggaggggcgggggaggcgccgggaagtcgacggcgccggcggctcctgcaggaggccactgtctgcagctcccgtgaagatgtccactccagacccacccctgggcggaactcctcggccaggtccttccccgggccctggcccttcccctggagccatgctgggccctagcccgggtccctcgccgggctccgcccacagcatgatggggcccagcccagggccgccctcagcaggacaccccatccccacccaggggcctggagggtaccctcaggacaacatgcaccagatgcacaagcccatggagtccatgcatgagaagggcatgtcggacgacccgcgctacaaccagatgaaaggaatggggatgcggtcagggggccatgctgggatggggcccccgcccagccccatggaccagcactcccaaggttacccctcgcccctgggtggctctgagcatgcctctagtccagttccagccagtggcccgtcttcggggccccagatgtcttccgggccaggaggtgccccgctggatggtgctgacccccaggccttggggcagcagaaccggggcccaaccccatttaaccagaaccagctgcaccagctcagagctcagatcatggcctacaagatgctggccagggggcagcccctccccgaccacctgcagatggcggtgcagggcaagcggccgatgcccgggatgcagcagcagatgccaacgctacctccaccctcggtgtccgcaacaggacccggccctggccctggccctggccccggcccgggtcccggcccggcacctccaaattacagcaggcctcatggtatgggagggcccaacatgcctcccccaggaccctcgggcgtgccccccgggatgccaggccagcctcctggagggcctcccaagccctggcctgaaggacccatggcgaatgctgctgcccccacgagcacccctcagaagctgattcccccgcagccaacgggccgcccttcccccgcgccccctgccgtcccacccgccgcctcgcccgtgatgccaccgcagacccagtcccccgggcagccggcccagcccgcgcccatggtgccactgcaccagaagcagagccgcatcacccccatccagaagccgcggggcctcgaccctgtggagatcctgcaggagcgcgagtacaggctgcaggctcgcatcgcacaccgaattcaggaacttgaaaaccttcccgggtccctggccggggatttgcgaaccaaagcgaccattgagctcaaggccctcaggctgctgaacttccagaggcagctgcgccaggaggtggtggtgtgcatgcggagggacacagcgctggagacagccctcaatgctaaggcctacaagcgcagcaagcgccagtccctgcgcgaggcccgcatcactgagaagctggagaagcagcagaagatcgagcaggagcgcaagcgccggcagaagcaccaggaatacctcaatagcattctccagcatgccaaggatttcaaggaatatcacagatccgtcacaggcaaaatccagaagctgaccaaggcagtggccacgtaccatgccaacacggagcgggagcagaagaaagagaacgagcggatcgagaaggagcgcatgcggaggctcatggctgaagatgaggaggggtaccgcaagctcatcgaccagaagaaggacaagcgcctggcctacctcttgcagcagacagacgagtacgtggctaacctcacggagctggtgcggcagcacaaggctgcccaggtcgccaaggagaaaaagaagaaaaagaaaaagaagaaggcagaaaatgcagaaggacagacgcctgccattgggccggatggcgagcctctggacgagaccagccagatgagcgacctcccggtgaaggtgatccacgtggagagtgggaagatcctcacaggcacagatgcccccaaagccgggcagctggaggcctggctcgagatgaacccggggtatgaagtagctccgaggtctgatagtgaagaaagtggctcagaagaagaggaagaggaggaggaggaagagcagccgcaggcagcacagcctcccaccctgcccgtggaggagaagaagaagattccagatccagacagcgatgacgtctctgaggtggacgcgcggcacatcattgagaatgccaagcaagatgtcgatgatgaatatggcgtgtcccaggcccttgcacgtggcctgcagtcctactatgccgtggcccatgctgtcactgagagagtggacaagcagtcagcgcttatggtcaatggtgtcctcaaacagtaccagatcaaaggtttggagtggctggtgtccctgtacaacaacaacctgaacggcatcctggccgacgagatgggcctggggaagaccatccagaccatcgcgctcatcacgtacctcatggagcacaaacgcatcaatgggcccttcctcatcatcgtgcctctctcaacgctgtccaactgggcgtacgagtttgacaagtgggccccctccgtggtgaaggtgtcttacaagggatccccagcagcaagacgggcctttgtcccccagctccggagtgggaagttcaacgtcttgctgacgacgtacgagtacatcatcaaagacaagcacatcctcgccaagatccgttggaagtacatgattgtggacgaaggtcaccgcatgaagaaccaccactgcaagctgacgcaggtgctcaacacgcactatgtggcaccccgccgcctgctgctgacgggcacaccgctgcagaacaagcttcccgagctctgggcgctgctcaacttcctgctgcccaccatcttcaagagctgcagcaccttcgagcagtggtttaacgcaccctttgccatgaccggggaaaaggtggacctgaatgaggaggaaaccattctcatcatccggcgtctccacaaagtgctgcggcccttcttgctccgacgactcaagaaggaagtcgaggcccagttgcccgaaaaggtggagtacgtcatcaagtgcgacatgtctgcgctgcagcgagtgctctaccgccacatgcaggccaagggcgtgctgctgactgatggctccgagaaggacaagaagggcaaaggcggcaccaagaccctgatgaacaccatcatgcagctgcggaagatctgcaaccacccctacatgttccagcacatcgaggagtccttttccgagcacttggggttcactggcggcattgtccaagggctggacctgtaccgagcctcgggtaaatttgagcttcttgatagaattcttcccaaactccgagcaaccaaccacaaagtgctgctgttctgccaaatgacctccctcatgaccatcatggaagattactttgcgtatcgcggctttaaatacctcaggcttgatggaaccacgaaggcggaggaccggggcatgctgctgaaaaccttcaacgagcccggctctgagtacttcatcttcctgctcagcacccgggctggggggctcggcctgaacctccagtcggcagacactgtgatcatttttgacagcgactggaatcctcaccaggacctgcaagcgcaggaccgagcccaccgcatcgggcagcagaacgaggtgcgtgtgctccgcctctgcaccgtcaacagcgtggaggagaagatcctagctgcagccaagtacaagctcaacgtggaccagaaggtgatccaggccggcatgttcgaccagaagtcctccagccatgagcggcgcgccttcctgcaggccatcctggagcacgaggagcaggatgagagcagacactgcagcacgggcagcggcagtgccagcttcgcccacactgcccctccgccagcgggcgtcaaccccgacttggaggagccacctctaaaggaggaagacgaggtgcccgacgacgagaccgtcaaccagatgatcgcccggcacgaggaggagtttgatctgttcatgcgcatggacctggaccgcaggcgcgaggaggcccgcaaccccaagcggaagccgcgcctcatggaggaggacgagctcccctcgtggatcatcaaggacgacgcggaggtggagcggctgacctgtgaggaggaggaggagaagatgttcggccgtggctcccgccaccgcaaggaggtggactacagcgactcactgacggagaagcagtggctcaagaaaattacaggaaaagatatccatgacacagccagcagtgtggcacgtgggctacaattccagcgtggccttcagttctgcacacgtgcgtcaaaggccatcgaggagggcacgctggaggagatcgaagaggaggtccggcagaagaaatcatcacggaagcgcaagcgagacagcgacgccggctcctccaccccgaccaccagcacccgcagccgcgacaaggacgacgagagcaagaagcagaagaagcgcgggcggccgcctgccgagaaactctcccctaacccacccaacctcaccaagaagatgaagaagattgtggatgccgtgatcaagtacaaggacagcagcagtggacgtcagctcagcgaggtcttcatccagctgccctcgcgaaaggagctgcccgagtactacgagctcatccgcaagcccgtggacttcaagaagataaaggagcgcattcgcaaccacaagtaccgcagcctcaacgacctagagaaggacgtcatgctcctgtgccagaacgcacagaccttcaacctggagggctccctgatctatgaagactccatcgtcttgcagtcggtcttcaccagcgtgcggcagaaaatcgagaaggaggatgacagtgaaggcgaggagagtgaggaggaggaagagggcgaggaggaaggctccgaatccgaatctcggtccgtcaaagtgaagatcaagcttggccggaaggagaaggcacaggaccggctgaagggcggccggcggcggccgagccgagggtcccgagccaagccggtcgtgagtgacgatgacagtgaggaggaacaagaggaggaccgctcaggaagtggcagcgaagaagactgagccccgacattccagtctcgaccccgagcccctcgttccagagctgagatggcataggccttagcagtaacgggtagcagcagatgtagtttcagacttggagtaaaactgtataaacaaaagaatcttccatatttatacagcagagaagctgtaggactgtttgtgactggccctgtcctggcatcagtagcatctgtaacagcattaactgtcttaaagagagagagagagaattccgaattggggaacacacgatacctgtttttcttttccgttgctggcagtactgttgcgccgcagtttggagtcactgtagttaagtgtggatgcatgtgcgtcaccgtccactcctcctactgtattttattggacaggtcagactcgccgggggcccggcgagggtatgtcagtgtcactggatgtcaaacagtaataaattaaaccaacaacaaaacgcacagcc

SEQ ID NO: 30519 - DNA, 4854 bp, Homo sapiens
  source 1..4854: mol_type = unassigned DNA
atgtccactccagacccacccctgggcggaactcctcggccaggtccttccccgggccctggcccttcccctggagccatgctgggccctagcccgggtccctcgccgggctccgcccacagcatgatggggcccagcccagggccgccctcagcaggacaccccatccccacccaggggcctggagggtaccctcaggacaacatgcaccagatgcacaagcccatggagtccatgcatgagaagggcatgtcggacgacccgcgctacaaccagatgaaaggaatggggatgcggtcagggggccatgctgggatggggcccccgcccagccccatggaccagcactcccaaggttacccctcgcccctgggtggctctgagcatgcctctagtccagttccagccagtggcccgtcttcggggccccagatgtcttccgggccaggaggtgccccgctggatggtgctgacccccaggccttggggcagcagaaccggggcccaaccccatttaaccagaaccagctgcaccagctcagagctcagatcatggcctacaagatgctggccagggggcagcccctccccgaccacctgcagatggcggtgcagggcaagcggccgatgcccgggatgcagcagcagatgccaacgctacctccaccctcggtgtccgcaacaggacccggccctggccctggccctggccccggcccgggtcccggcccggcacctccaaattacagcaggcctcatggtatgggagggcccaacatgcctcccccaggaccctcgggcgtgccccccgggatgccaggccagcctcctggagggcctcccaagccctggcctgaaggacccatggcgaatgctgctgcccccacgagcacccctcagaagctgattcccccgcagccaacgggccgcccttcccccgcgccccctgccgtcccacccgccgcctcgcccgtgatgccaccgcagacccagtcccccgggcagccggcccagcccgcgcccatggtgccactgcaccagaagcagagccgcatcacccccatccagaagccgcggggcctcgaccctgtggagatcctgcaggagcgcgagtacaggctgcaggctcgcatcgcacaccgaattcaggaacttgaaaaccttcccgggtccctggccggggatttgcgaaccaaagcgaccattgagctcaaggccctcaggctgctgaacttccagaggcagctgcgccaggaggtggtggtgtgcatgcggagggacacagcgctggagacagccctcaatgctaaggcctacaagcgcagcaagcgccagtccctgcgcgaggcccgcatcactgagaagctggagaagcagcagaagatcgagcaggagcgcaagcgccggcagaagcaccaggaatacctcaatagcattctccagcatgccaaggatttcaaggaatatcacagatccgtcacaggcaaaatccagaagctgaccaaggcagtggccacgtaccatgccaacacggagcgggagcagaagaaagagaacgagcggatcgagaaggagcgcatgcggaggctcatggctgaagatgaggaggggtaccgcaagctcatcgaccagaagaaggacaagcgcctggcctacctcttgcagcagacagacgagtacgtggctaacctcacggagctggtgcggcagcacaaggctgcccaggtcgccaaggagaaaaagaagaaaaagaaaaagaagaaggcagaaaatgcagaaggacagacgcctgccattgggccggatggcgagcctctggacgagaccagccagatgagcgacctcccggtgaaggtgatccacgtggagagtgggaagatcctcacaggcacagatgcccccaaagccgggcagctggaggcctggctcgagatgaacccggggtatgaagtagctccgaggtctgatagtgaagaaagtggctcagaagaagaggaagaggaggaggaggaagagcagccgcaggcagcacagcctcccaccctgcccgtggaggagaagaagaagattccagatccagacagcgatgacgtctctgaggtggacgcgcggcacatcattgagaatgccaagcaagatgtcgatgatgaatatggcgtgtcccaggcccttgcacgtggcctgcagtcctactatgccgtggcccatgctgtcactgagagagtggacaagcagtcagcgcttatggtcaatggtgtcctcaaacagtaccagatcaaaggtttggagtggctggtgtccctgtacaacaacaacctgaacggcatcctggccgacgagatgggcctggggaagaccatccagaccatcgcgctcatcacgtacctcatggagcacaaacgcatcaatgggcccttcctcatcatcgtgcctctctcaacgctgtccaactgggcgtacgagtttgacaagtgggccccctccgtggtgaaggtgtcttacaagggatccccagcagcaagacgggcctttgtcccccagctccggagtgggaagttcaacgtcttgctgacgacgtacgagtacatcatcaaagacaagcacatcctcgccaagatccgttggaagtacatgattgtggacgaaggtcaccgcatgaagaaccaccactgcaagctgacgcaggtgctcaacacgcactatgtggcaccccgccgcctgctgctgacgggcacaccgctgcagaacaagcttcccgagctctgggcgctgctcaacttcctgctgcccaccatcttcaagagctgcagcaccttcgagcagtggtttaacgcaccctttgccatgaccggggaaaaggtggacctgaatgaggaggaaaccattctcatcatccggcgtctccacaaagtgctgcggcccttcttgctccgacgactcaagaaggaagtcgaggcccagttgcccgaaaaggtggagtacgtcatcaagtgcgacatgtctgcgctgcagcgagtgctctaccgccacatgcaggccaagggcgtgctgctgactgatggctccgagaaggacaagaagggcaaaggcggcaccaagaccctgatgaacaccatcatgcagctgcggaagatctgcaaccacccctacatgttccagcacatcgaggagtccttttccgagcacttggggttcactggcggcattgtccaagggctggacctgtaccgagcctcgggtaaatttgagcttcttgatagaattcttcccaaactccgagcaaccaaccacaaagtgctgctgttctgccaaatgacctccctcatgaccatcatggaagattactttgcgtatcgcggctttaaatacctcaggcttgatggaaccacgaaggcggaggaccggggcatgctgctgaaaaccttcaacgagcccggctctgagtacttcatcttcctgctcagcacccgggctggggggctcggcctgaacctccagtcggcagacactgtgatcatttttgacagcgactggaatcctcaccaggacctgcaagcgcaggaccgagcccaccgcatcgggcagcagaacgaggtgcgtgtgctccgcctctgcaccgtcaacagcgtggaggagaagatcctagctgcagccaagtacaagctcaacgtggaccagaaggtgatccaggccggcatgttcgaccagaagtcctccagccatgagcggcgcgccttcctgcaggccatcctggagcacgaggagcaggatgaggaggaagacgaggtgcccgacgacgagaccgtcaaccagatgatcgcccggcacgaggaggagtttgatctgttcatgcgcatggacctggaccgcaggcgcgaggaggcccgcaaccccaagcggaagccgcgcctcatggaggaggacgagctcccctcgtggatcatcaaggacgacgcggaggtggagcggctgacctgtgaggaggaggaggagaagatgttcggccgtggctcccgccaccgcaaggaggtggactacagcgactcactgacggagaagcagtggctcaagaccctgaaggccatcgaggagggcacgctggaggagatcgaagaggaggtccggcagaagaaatcatcacggaagcgcaagcgagacagcgacgccggctcctccaccccgaccaccagcacccgcagccgcgacaaggacgacgagagcaagaagcagaagaagcgcgggcggccgcctgccgagaaactctcccctaacccacccaacctcaccaagaagatgaagaagattgtggatgccgtgatcaagtacaaggacagcagcagtggacgtcagctcagcgaggtcttcatccagctgccctcgcgaaaggagctgcccgagtactacgagctcatccgcaagcccgtggacttcaagaagataaaggagcgcattcgcaaccacaagtaccgcagcctcaacgacctagagaaggacgtcatgctcctgtgccagaacgcacagaccttcaacctggagggctccctgatctatgaagactccatcgtcttgcagtcggtcttcaccagcgtgcggcagaaaatcgagaaggaggatgacagtgaaggcgaggagagtgaggaggaggaagagggcgaggaggaaggctccgaatccgaatctcggtccgtcaaagtgaagatcaagcttggccggaaggagaaggcacaggaccggctgaagggcggccggcggcggccgagccgagggtcccgagccaagccggtcgtgagtgacgatgacagtgaggaggaacaagaggaggaccgctcaggaagtggcagcgaagaagactga

SEQ ID NO: 30520 - DNA, 5796 bp, Homo sapiens
  source 1..5796: mol_type = unassigned DNA
ggagaggccgccgcggtgctgagggggaggggagccggcgagcgcgcgcgcagcgggggcgcgggtggcgcgcgtgtgtgtgaagggggggcggtggccgaggcgggcgggcgcgcgcgcgaggcttcccctcgtttggcggcggcggcggcttctttgtttcgtgaagagaagcgagacgcccattctgcccccggccccgcgcggaggggcgggggaggcgccgggaagtcgacggcgccggcggctcctgcaggaggccactgtctgcagctcccgtgaagatgtccactccagacccacccctgggcggaactcctcggccaggtccttccccgggccctggcccttcccctggagccatgctgggccctagcccgggtccctcgccgggctccgcccacagcatgatggggcccagcccagggccgccctcagcaggacaccccatccccacccaggggcctggagggtaccctcaggacaacatgcaccagatgcacaagcccatggagtccatgcatgagaagggcatgtcggacgacccgcgctacaaccagatgaaaggaatggggatgcggtcagggggccatgctgggatggggcccccgcccagccccatggaccagcactcccaaggttacccctcgcccctgggtggctctgagcatgcctctagtccagttccagccagtggcccgtcttcggggccccagatgtcttccgggccaggaggtgccccgctggatggtgctgacccccaggccttggggcagcagaaccggggcccaaccccatttaaccagaaccagctgcaccagctcagagctcagatcatggcctacaagatgctggccagggggcagcccctccccgaccacctgcagatggcggtgcagggcaagcggccgatgcccgggatgcagcagcagatgccaacgctacctccaccctcggtgtccgcaacaggacccggccctggccctggccctggccccggcccgggtcccggcccggcacctccaaattacagcaggcctcatggtatgggagggcccaacatgcctcccccaggaccctcgggcgtgccccccgggatgccaggccagcctcctggagggcctcccaagccctggcctgaaggacccatggcgaatgctgctgcccccacgagcacccctcagaagctgattcccccgcagccaacgggccgcccttcccccgcgccccctgccgtcccacccgccgcctcgcccgtgatgccaccgcagacccagtcccccgggcagccggcccagcccgcgcccatggtgccactgcaccagaagcagagccgcatcacccccatccagaagccgcggggcctcgaccctgtggagatcctgcaggagcgcgagtacaggctgcaggctcgcatcgcacaccgaattcaggaacttgaaaaccttcccgggtccctggccggggatttgcgaaccaaagcgaccattgagctcaaggccctcaggctgctgaacttccagaggcagctgcgccaggaggtggtggtgtgcatgcggagggacacagcgctggagacagccctcaatgctaaggcctacaagcgcagcaagcgccagtccctgcgcgaggcccgcatcactgagaagctggagaagcagcagaagatcgagcaggagcgcaagcgccggcagaagcaccaggaatacctcaatagcattctccagcatgccaaggatttcaaggaatatcacagatccgtcacaggcaaaatccagaagctgaccaaggcagtggccacgtaccatgccaacacggagcgggagcagaagaaagagaacgagcggatcgagaaggagcgcatgcggaggctcatgggacagagggaaaagagcaggcgcgggcttgggagtcagtcctgggctcggatatttgctgatctctctgatcatcagaatgactgtgtgacctcagtgactgagtcgctggttgggcagatattggcagcgtgttctggtgaggagggggaagtggagtggaaggggagggacagggtaagaaggcttcgggctgaagatgaggaggggtaccgcaagctcatcgaccagaagaaggacaagcgcctggcctacctcttgcagcagacagacgagtacgtggctaacctcacggagctggtgcggcagcacaaggctgcccaggtcgccaaggagaaaaagaagaaaaagaaaaagaagaaggcagaaaatgcagaaggacagacgcctgccattgggccggatggcgagcctctggacgagaccagccagatgagcgacctcccggtgaaggtgatccacgtggagagtgggaagatcctcacaggcacagatgcccccaaagccgggcagctggaggcctggctcgagatgaacccggggtatgaagtagctccgaggtctgatagtgaagaaagtggctcagaagaagaggaagaggaggaggaggaagagcagccgcaggcagcacagcctcccaccctgcccgtggaggagaagaagaagattccagatccagacagcgatgacgtctctgaggtggacgcgcggcacatcattgagaatgccaagcaagatgtcgatgatgaatatggcgtgtcccaggcccttgcacgtggcctgcagtcctactatgccgtggcccatgctgtcactgagagagtggacaagcagtcagcgcttatggtcaatggtgtcctcaaacagtaccagatcaaaggtttggagtggctggtgtccctgtacaacaacaacctgaacggcatcctggccgacgagatgggcctggggaagaccatccagaccatcgcgctcatcacgtacctcatggagcacaaacgcatcaatgggcccttcctcatcatcgtgcctctctcaacgctgtccaactgggcgtacgagtttgacaagtgggccccctccgtggtgaaggtgtcttacaagggatccccagcagcaagacgggcctttgtcccccagctccggagtgggaagttcaacgtcttgctgacgacgtacgagtacatcatcaaagacaagcacatcctcgccaagatccgttggaagtacatgattgtggacgaaggtcaccgcatgaagaaccaccactgcaagctgacgcaggtgctcaacacgcactatgtggcaccccgccgcctgctgctgacgggcacaccgctgcagaacaagcttcccgagctctgggcgctgctcaacttcctgctgcccaccatcttcaagagctgcagcaccttcgagcagtggtttaacgcaccctttgccatgaccggggaaaaggtggacctgaatgaggaggaaaccattctcatcatccggcgtctccacaaagtgctgcggcccttcttgctccgacgactcaagaaggaagtcgaggcccagttgcccgaaaaggtggagtacgtcatcaagtgcgacatgtctgcgctgcagcgagtgctctaccgccacatgcaggccaagggcgtgctgctgactgatggctccgagaaggacaagaagggcaaaggcggcaccaagaccctgatgaacaccatcatgcagctgcggaagatctgcaaccacccctacatgttccagcacatcgaggagtccttttccgagcacttggggttcactggcggcattgtccaagggctggacctgtaccgagcctcgggtaaatttgagcttcttgatagaattcttcccaaactccgagcaaccaaccacaaagtgctgctgttctgccaaatgacctccctcatgaccatcatggaagattactttgcgtatcgcggctttaaatacctcaggcttgatggaaccacgaaggcggaggaccggggcatgctgctgaaaaccttcaacgagcccggctctgagtacttcatcttcctgctcagcacccgggctggggggctcggcctgaacctccagtcggcagacactgtgatcatttttgacagcgactggaatcctcaccaggacctgcaagcgcaggaccgagcccaccgcatcgggcagcagaacgaggtgcgtgtgctccgcctctgcaccgtcaacagcgtggaggagaagatcctagctgcagccaagtacaagctcaacgtggaccagaaggtgatccaggccggcatgttcgaccagaagtcctccagccatgagcggcgcgccttcctgcaggccatcctggagcacgaggagcaggatgaggaggaagacgaggtgcccgacgacgagaccgtcaaccagatgatcgcccggcacgaggaggagtttgatctgttcatgcgcatggacctggaccgcaggcgcgaggaggcccgcaaccccaagcggaagccgcgcctcatggaggaggacgagctcccctcgtggatcatcaaggacgacgcggaggtggagcggctgacctgtgaggaggaggaggagaagatgttcggccgtggctcccgccaccgcaaggaggtggactacagcgactcactgacggagaagcagtggctcaagaccctgaaggccatcgaggagggcacgctggaggagatcgaagaggaggtccggcagaagaaatcatcacggaagcgcaagcgagacagcgacgccggctcctccaccccgaccaccagcacccgcagccgcgacaaggacgacgagagcaagaagcagaagaagcgcgggcggccgcctgccgagaaactctcccctaacccacccaacctcaccaagaagatgaagaagattgtggatgccgtgatcaagtacaaggacagcagcagtggacgtcagctcagcgaggtcttcatccagctgccctcgcgaaaggagctgcccgagtactacgagctcatccgcaagcccgtggacttcaagaagataaaggagcgcattcgcaaccacaagtaccgcagcctcaacgacctagagaaggacgtcatgctcctgtgccagaacgcacagaccttcaacctggagggctccctgatctatgaagactccatcgtcttgcagtcggtcttcaccagcgtgcggcagaaaatcgagaaggaggatgacagtgaaggcgaggagagtgaggaggaggaagagggcgaggaggaaggctccgaatccgaatctcggtccgtcaaagtgaagatcaagcttggccggaaggagaaggcacaggaccggctgaagggcggccggcggcggccgagccgagggtcccgagccaagccggtcgtgagtgacgatgacagtgaggaggaacaagaggaggaccgctcaggaagtggcagcgaagaagactgagccccgacattccagtctcgaccccgagcccctcgttccagagctgagatggcataggccttagcagtaacgggtagcagcagatgtagtttcagacttggagtaaaactgtataaacaaaagaatcttccatatttatacagcagagaagctgtaggactgtttgtgactggccctgtcctggcatcagtagcatctgtaacagcattaactgtcttaaagagagagagagagaattccgaattggggaacacacgatacctgtttttcttttccgttgctggcagtactgttgcgccgcagtttggagtcactgtagttaagtgtggatgcatgtgcgtcaccgtccactcctcctactgtattttattggacaggtcagactcgccgggggcccggcgagggtatgtcagtgtcactggatgtcaaacagtaataaattaaaccaacaacaaaacgcacagcc

SEQ ID NO: 30521 - DNA, 5770 bp, Homo sapiens
  source 1..5770: mol_type = unassigned DNA
ggagaggccgccgcggtgctgagggggaggggagccggcgagcgcgcgcgcagcgggggcgcgggtggcgcgcgtgtgtgtgaagggggggcggtggccgaggcgggcgggcgcgcgcgcgaggcttcccctcgtttggcggcggcggcggcttctttgtttcgtgaagagaagcgagacgcccattctgcccccggccccgcgcggaggggcgggggaggcgccgggaagtcgacggcgccggcggctcctgcgtctcgcccttttgcccaggctagagtgcagtggtgcggtcatggttcactgcagcctcaacctcctggactcagcaggaggccactgtctgcagctcccgtgaagatgtccactccagacccacccctgggcggaactcctcggccaggtccttccccgggccctggcccttcccctggagccatgctgggccctagcccgggtccctcgccgggctccgcccacagcatgatggggcccagcccagggccgccctcagcaggacaccccatccccacccaggggcctggagggtaccctcaggacaacatgcaccagatgcacaagcccatggagtccatgcatgagaagggcatgtcggacgacccgcgctacaaccagatgaaaggaatggggatgcggtcagggggccatgctgggatggggcccccgcccagccccatggaccagcactcccaaggttacccctcgcccctgggtggctctgagcatgcctctagtccagttccagccagtggcccgtcttcggggccccagatgtcttccgggccaggaggtgccccgctggatggtgctgacccccaggccttggggcagcagaaccggggcccaaccccatttaaccagaaccagctgcaccagctcagagctcagatcatggcctacaagatgctggccagggggcagcccctccccgaccacctgcagatggcggtgcagggcaagcggccgatgcccgggatgcagcagcagatgccaacgctacctccaccctcggtgtccgcaacaggacccggccctggccctggccctggccccggcccgggtcccggcccggcacctccaaattacagcaggcctcatggtatgggagggcccaacatgcctcccccaggaccctcgggcgtgccccccgggatgccaggccagcctcctggagggcctcccaagccctggcctgaaggacccatggcgaatgctgctgcccccacgagcacccctcagaagctgattcccccgcagccaacgggccgcccttcccccgcgccccctgccgtcccacccgccgcctcgcccgtgatgccaccgcagacccagtcccccgggcagccggcccagcccgcgcccatggtgccactgcaccagaagcagagccgcatcacccccatccagaagccgcggggcctcgaccctgtggagatcctgcaggagcgcgagtacaggctgcaggctcgcatcgcacaccgaattcaggaacttgaaaaccttcccgggtccctggccggggatttgcgaaccaaagcgaccattgagctcaaggccctcaggctgctgaacttccagaggcagctgcgccaggaggtggtggtgtgcatgcggagggacacagcgctggagacagccctcaatgctaaggcctacaagcgcagcaagcgccagtccctgcgcgaggcccgcatcactgagaagctggagaagcagcagaagatcgagcaggagcgcaagcgccggcagaagcaccaggaatacctcaatagcattctccagcatgccaaggatttcaaggaatatcacagatccgtcacaggcaaaatccagaagctgaccaaggcagtggccacgtaccatgccaacacggagcgggagcagaagaaagagaacgagcggatcgagaaggagcgcatgcggaggctcatggctgaagatgaggaggggtaccgcaagctcatcgaccagaagaaggacaagcgcctggcctacctcttgcagcagacagacgagtacgtggctaacctcacggagctggtgcggcagcacaaggctgcccaggtcgccaaggagaaaaagaagaaaaagaaaaagaagaaggcagaaaatgcagaaggacagacgcctgccattgggccggatggcgagcctctggacgagaccagccagatgagcgacctcccggtgaaggtgatccacgtggagagtgggaagatcctcacaggcacagatgcccccaaagccgggcagctggaggcctggctcgagatgaacccggggtatgaagtagctccgaggtctgatagtgaagaaagtggctcagaagaagaggaagaggaggaggaggaagagcagccgcaggcagcacagcctcccaccctgcccgtggaggagaagaagaagattccagatccagacagcgatgacgtctctgaggtggacgcgcggcacatcattgagaatgccaagcaagatgtcgatgatgaatatggcgtgtcccaggcccttgcacgtggcctgcagtcctactatgccgtggcccatgctgtcactgagagagtggacaagcagtcagcgcttatggtcaatggtgtcctcaaacagtaccagatcaaaggtttggagtggctggtgtccctgtacaacaacaacctgaacggcatcctggccgacgagatgggcctggggaagaccatccagaccatcgcgctcatcacgtacctcatggagcacaaacgcatcaatgggcccttcctcatcatcgtgcctctctcaacgctgtccaactgggcgtacgagtttgacaagtgggccccctccgtggtgaaggtgtcttacaagggatccccagcagcaagacgggcctttgtcccccagctccggagtgggaagttcaacgtcttgctgacgacgtacgagtacatcatcaaagacaagcacatcctcgccaagatccgttggaagtacatgattgtggacgaaggtcaccgcatgaagaaccaccactgcaagctgacgcaggtgctcaacacgcactatgtggcaccccgccgcctgctgctgacgggcacaccgctgcagaacaagcttcccgagctctgggcgctgctcaacttcctgctgcccaccatcttcaagagctgcagcaccttcgagcagtggtttaacgcaccctttgccatgaccggggaaaaggtggacctgaatgaggaggaaaccattctcatcatccggcgtctccacaaagtgctgcggcccttcttgctccgacgactcaagaaggaagtcgaggcccagttgcccgaaaaggtggagtacgtcatcaagtgcgacatgtctgcgctgcagcgagtgctctaccgccacatgcaggccaagggcgtgctgctgactgatggctccgagaaggacaagaagggcaaaggcggcaccaagaccctgatgaacaccatcatgcagctgcggaagatctgcaaccacccctacatgttccagcacatcgaggagtccttttccgagcacttggggttcactggcggcattgtccaagggctggacctgtaccgagcctcgggtaaatttgagcttcttgatagaattcttcccaaactccgagcaaccaaccacaaagtgctgctgttctgccaaatgacctccctcatgaccatcatggaagattactttgcgtatcgcggctttaaatacctcaggcttgatggaaccacgaaggcggaggaccggggcatgctgctgaaaaccttcaacgagcccggctctgagtacttcatcttcctgctcagcacccgggctggggggctcggcctgaacctccagtcggcagacactgtgatcatttttgacagcgactggaatcctcaccaggacctgcaagcgcaggaccgagcccaccgcatcgggcagcagaacgaggtgcgtgtgctccgcctctgcaccgtcaacagcgtggaggagaagatcctagctgcagccaagtacaagctcaacgtggaccagaaggtgatccaggccggcatgttcgaccagaagtcctccagccatgagcggcgcgccttcctgcaggccatcctggagcacgaggagcaggatgagagcagacactgcagcacgggcagcggcagtgccagcttcgcccacactgcccctccgccagcgggcgtcaaccccgacttggaggagccacctctaaaggaggaagacgaggtgcccgacgacgagaccgtcaaccagatgatcgcccggcacgaggaggagtttgatctgttcatgcgcatggacctggaccgcaggcgcgaggaggcccgcaaccccaagcggaagccgcgcctcatggaggaggacgagctcccctcgtggatcatcaaggacgacgcggaggtggagcggctgacctgtgaggaggaggaggagaagatgttcggccgtggctcccgccaccgcaaggaggtggactacagcgactcactgacggagaagcagtggctcaaggccatcgaggagggcacgctggaggagatcgaagaggaggtccggcagaagaaatcatcacggaagcgcaagcgagacagcgacgccggctcctccaccccgaccaccagcacccgcagccgcgacaaggacgacgagagcaagaagcagaagaagcgcgggcggccgcctgccgagaaactctcccctaacccacccaacctcaccaagaagatgaagaagattgtggatgccgtgatcaagtacaaggacagcagcagtggacgtcagctcagcgaggtcttcatccagctgccctcgcgaaaggagctgcccgagtactacgagctcatccgcaagcccgtggacttcaagaagataaaggagcgcattcgcaaccacaagtaccgcagcctcaacgacctagagaaggacgtcatgctcctgtgccagaacgcacagaccttcaacctggagggctccctgatctatgaagactccatcgtcttgcagtcggtcttcaccagcgtgcggcagaaaatcgagaaggaggatgacagtgaaggcgaggagagtgaggaggaggaagagggcgaggaggaaggctccgaatccgaatctcggtccgtcaaagtgaagatcaagcttggccggaaggagaaggcacaggaccggctgaagggcggccggcggcggccgagccgagggtcccgagccaagccggtcgtgagtgacgatgacagtgaggaggaacaagaggaggaccgctcaggaagtggcagcgaagaagactgagccccgacattccagtctcgaccccgagcccctcgttccagagctgagatggcataggccttagcagtaacgggtagcagcagatgtagtttcagacttggagtaaaactgtataaacaaaagaatcttccatatttatacagcagagaagctgtaggactgtttgtgactggccctgtcctggcatcagtagcatctgtaacagcattaactgtcttaaagagagagagagagaattccgaattggggaacacacgatacctgtttttcttttccgttgctggcagtactgttgcgccgcagtttggagtcactgtagttaagtgtggatgcatgtgcgtcaccgtccactcctcctactgtattttattggacaggtcagactcgccgggggcccggcgagggtatgtcagtgtcactggatgtcaaacagtaataaattaaaccaacaacaaaacgcacagcc

SEQ ID NO: 30522 - DNA, 4842 bp, Homo sapiens
  source 1..4842: mol_type = unassigned DNA
atgtccactccagacccacccctgggcggaactcctcggccaggtccttccccgggccctggcccttcccctggagccatgctgggccctagcccgggtccctcgccgggctccgcccacagcatgatggggcccagcccagggccgccctcagcaggacaccccatccccacccaggggcctggagggtaccctcaggacaacatgcaccagatgcacaagcccatggagtccatgcatgagaagggcatgtcggacgacccgcgctacaaccagatgaaaggaatggggatgcggtcagggggccatgctgggatggggcccccgcccagccccatggaccagcactcccaaggttacccctcgcccctgggtggctctgagcatgcctctagtccagttccagccagtggcccgtcttcggggccccagatgtcttccgggccaggaggtgccccgctggatggtgctgacccccaggccttggggcagcagaaccggggcccaaccccatttaaccagaaccagctgcaccagctcagagctcagatcatggcctacaagatgctggccagggggcagcccctccccgaccacctgcagatggcggtgcagggcaagcggccgatgcccgggatgcagcagcagatgccaacgctacctccaccctcggtgtccgcaacaggacccggccctggccctggccctggccccggcccgggtcccggcccggcacctccaaattacagcaggcctcatggtatgggagggcccaacatgcctcccccaggaccctcgggcgtgccccccgggatgccaggccagcctcctggagggcctcccaagccctggcctgaaggacccatggcgaatgctgctgcccccacgagcacccctcagaagctgattcccccgcagccaacgggccgcccttcccccgcgccccctgccgtcccacccgccgcctcgcccgtgatgccaccgcagacccagtcccccgggcagccggcccagcccgcgcccatggtgccactgcaccagaagcagagccgcatcacccccatccagaagccgcggggcctcgaccctgtggagatcctgcaggagcgcgagtacaggctgcaggctcgcatcgcacaccgaattcaggaacttgaaaaccttcccgggtccctggccggggatttgcgaaccaaagcgaccattgagctcaaggccctcaggctgctgaacttccagaggcagctgcgccaggaggtggtggtgtgcatgcggagggacacagcgctggagacagccctcaatgctaaggcctacaagcgcagcaagcgccagtccctgcgcgaggcccgcatcactgagaagctggagaagcagcagaagatcgagcaggagcgcaagcgccggcagaagcaccaggaatacctcaatagcattctccagcatgccaaggatttcaaggaatatcacagatccgtcacaggcaaaatccagaagctgaccaaggcagtggccacgtaccatgccaacacggagcgggagcagaagaaagagaacgagcggatcgagaaggagcgcatgcggaggctcatggctgaagatgaggaggggtaccgcaagctcatcgaccagaagaaggacaagcgcctggcctacctcttgcagcagacagacgagtacgtggctaacctcacggagctggtgcggcagcacaaggctgcccaggtcgccaaggagaaaaagaagaaaaagaaaaagaagaaggcagaaaatgcagaaggacagacgcctgccattgggccggatggcgagcctctggacgagaccagccagatgagcgacctcccggtgaaggtgatccacgtggagagtgggaagatcctcacaggcacagatgcccccaaagccgggcagctggaggcctggctcgagatgaacccggggtatgaagtagctccgaggtctgatagtgaagaaagtggctcagaagaagaggaagaggaggaggaggaagagcagccgcaggcagcacagcctcccaccctgcccgtggaggagaagaagaagattccagatccagacagcgatgacgtctctgaggtggacgcgcggcacatcattgagaatgccaagcaagatgtcgatgatgaatatggcgtgtcccaggcccttgcacgtggcctgcagtcctactatgccgtggcccatgctgtcactgagagagtggacaagcagtcagcgcttatggtcaatggtgtcctcaaacagtaccagatcaaaggtttggagtggctggtgtccctgtacaacaacaacctgaacggcatcctggccgacgagatgggcctggggaagaccatccagaccatcgcgctcatcacgtacctcatggagcacaaacgcatcaatgggcccttcctcatcatcgtgcctctctcaacgctgtccaactgggcgtacgagtttgacaagtgggccccctccgtggtgaaggtgtcttacaagggatccccagcagcaagacgggcctttgtcccccagctccggagtgggaagttcaacgtcttgctgacgacgtacgagtacatcatcaaagacaagcacatcctcgccaagatccgttggaagtacatgattgtggacgaaggtcaccgcatgaagaaccaccactgcaagctgacgcaggtgctcaacacgcactatgtggcaccccgccgcctgctgctgacgggcacaccgctgcagaacaagcttcccgagctctgggcgctgctcaacttcctgctgcccaccatcttcaagagctgcagcaccttcgagcagtggtttaacgcaccctttgccatgaccggggaaaaggtggacctgaatgaggaggaaaccattctcatcatccggcgtctccacaaagtgctgcggcccttcttgctccgacgactcaagaaggaagtcgaggcccagttgcccgaaaaggtggagtacgtcatcaagtgcgacatgtctgcgctgcagcgagtgctctaccgccacatgcaggccaagggcgtgctgctgactgatggctccgagaaggacaagaagggcaaaggcggcaccaagaccctgatgaacaccatcatgcagctgcggaagatctgcaaccacccctacatgttccagcacatcgaggagtccttttccgagcacttggggttcactggcggcattgtccaagggctggacctgtaccgagcctcgggtaaatttgagcttcttgatagaattcttcccaaactccgagcaaccaaccacaaagtgctgctgttctgccaaatgacctccctcatgaccatcatggaagattactttgcgtatcgcggctttaaatacctcaggcttgatggaaccacgaaggcggaggaccggggcatgctgctgaaaaccttcaacgagcccggctctgagtacttcatcttcctgctcagcacccgggctggggggctcggcctgaacctccagtcggcagacactgtgatcatttttgacagcgactggaatcctcaccaggacctgcaagcgcaggaccgagcccaccgcatcgggcagcagaacgaggtgcgtgtgctccgcctctgcaccgtcaacagcgtggaggagaagatcctagctgcagccaagtacaagctcaacgtggaccagaaggtgatccaggccggcatgttcgaccagaagtcctccagccatgagcggcgcgccttcctgcaggccatcctggagcacgaggagcaggatgaggaggaagacgaggtgcccgacgacgagaccgtcaaccagatgatcgcccggcacgaggaggagtttgatctgttcatgcgcatggacctggaccgcaggcgcgaggaggcccgcaaccccaagcggaagccgcgcctcatggaggaggacgagctcccctcgtggatcatcaaggacgacgcggaggtggagcggctgacctgtgaggaggaggaggagaagatgttcggccgtggctcccgccaccgcaaggaggtggactacagcgactcactgacggagaagcagtggctcaaggccatcgaggagggcacgctggaggagatcgaagaggaggtccggcagaagaaatcatcacggaagcgcaagcgagacagcgacgccggctcctccaccccgaccaccagcacccgcagccgcgacaaggacgacgagagcaagaagcagaagaagcgcgggcggccgcctgccgagaaactctcccctaacccacccaacctcaccaagaagatgaagaagattgtggatgccgtgatcaagtacaaggacagcagtggacgtcagctcagcgaggtcttcatccagctgccctcgcgaaaggagctgcccgagtactacgagctcatccgcaagcccgtggacttcaagaagataaaggagcgcattcgcaaccacaagtaccgcagcctcaacgacctagagaaggacgtcatgctcctgtgccagaacgcacagaccttcaacctggagggctccctgatctatgaagactccatcgtcttgcagtcggtcttcaccagcgtgcggcagaaaatcgagaaggaggatgacagtgaaggcgaggagagtgaggaggaggaagagggcgaggaggaaggctccgaatccgaatctcggtccgtcaaagtgaagatcaagcttggccggaaggagaaggcacaggaccggctgaagggcggccggcggcggccgagccgagggtcccgagccaagccggtcgtgagtgacgatgacagtgaggaggaacaagaggaggaccgctcaggaagtggcagcgaagaagactga

SEQ ID NO: 30523 - DNA, 4851 bp, Homo sapiens
  source 1..4851: mol_type = unassigned DNA
atgtccactccagacccacccctgggcggaactcctcggccaggtccttccccgggccctggcccttcccctggagccatgctgggccctagcccgggtccctcgccgggctccgcccacagcatgatggggcccagcccagggccgccctcagcaggacaccccatccccacccaggggcctggagggtaccctcaggacaacatgcaccagatgcacaagcccatggagtccatgcatgagaagggcatgtcggacgacccgcgctacaaccagatgaaaggaatggggatgcggtcagggggccatgctgggatggggcccccgcccagccccatggaccagcactcccaaggttacccctcgcccctgggtggctctgagcatgcctctagtccagttccagccagtggcccgtcttcggggccccagatgtcttccgggccaggaggtgccccgctggatggtgctgacccccaggccttggggcagcagaaccggggcccaaccccatttaaccagaaccagctgcaccagctcagagctcagatcatggcctacaagatgctggccagggggcagcccctccccgaccacctgcagatggcggtgcagggcaagcggccgatgcccgggatgcagcagcagatgccaacgctacctccaccctcggtgtccgcaacaggacccggccctggccctggccctggccccggcccgggtcccggcccggcacctccaaattacagcaggcctcatggtatgggagggcccaacatgcctcccccaggaccctcgggcgtgccccccgggatgccaggccagcctcctggagggcctcccaagccctggcctgaaggacccatggcgaatgctgctgcccccacgagcacccctcagaagctgattcccccgcagccaacgggccgcccttcccccgcgccccctgccgtcccacccgccgcctcgcccgtgatgccaccgcagacccagtcccccgggcagccggcccagcccgcgcccatggtgccactgcaccagaagcagagccgcatcacccccatccagaagccgcggggcctcgaccctgtggagatcctgcaggagcgcgagtacaggctgcaggctcgcatcgcacaccgaattcaggaacttgaaaaccttcccgggtccctggccggggatttgcgaaccaaagcgaccattgagctcaaggccctcaggctgctgaacttccagaggcagctgcgccaggaggtggtggtgtgcatgcggagggacacagcgctggagacagccctcaatgctaaggcctacaagcgcagcaagcgccagtccctgcgcgaggcccgcatcactgagaagctggagaagcagcagaagatcgagcaggagcgcaagcgccggcagaagcaccaggaatacctcaatagcattctccagcatgccaaggatttcaaggaatatcacagatccgtcacaggcaaaatccagaagctgaccaaggcagtggccacgtaccatgccaacacggagcgggagcagaagaaagagaacgagcggatcgagaaggagcgcatgcggaggctcatggctgaagatgaggaggggtaccgcaagctcatcgaccagaagaaggacaagcgcctggcctacctcttgcagcagacagacgagtacgtggctaacctcacggagctggtgcggcagcacaaggctgcccaggtcgccaaggagaaaaagaagaaaaagaaaaagaagaaggcagaaaatgcagaaggacagacgcctgccattgggccggatggcgagcctctggacgagaccagccagatgagcgacctcccggtgaaggtgatccacgtggagagtgggaagatcctcacaggcacagatgcccccaaagccgggcagctggaggcctggctcgagatgaacccggggtatgaagtagctccgaggtctgatagtgaagaaagtggctcagaagaagaggaagaggaggaggaggaagagcagccgcaggcagcacagcctcccaccctgcccgtggaggagaagaagaagattccagatccagacagcgatgacgtctctgaggtggacgcgcggcacatcattgagaatgccaagcaagatgtcgatgatgaatatggcgtgtcccaggcccttgcacgtggcctgcagtcctactatgccgtggcccatgctgtcactgagagagtggacaagcagtcagcgcttatggtcaatggtgtcctcaaacagtaccagatcaaaggtttggagtggctggtgtccctgtacaacaacaacctgaacggcatcctggccgacgagatgggcctggggaagaccatccagaccatcgcgctcatcacgtacctcatggagcacaaacgcatcaatgggcccttcctcatcatcgtgcctctctcaacgctgtccaactgggcgtacgagtttgacaagtgggccccctccgtggtgaaggtgtcttacaagggatccccagcagcaagacgggcctttgtcccccagctccggagtgggaagttcaacgtcttgctgacgacgtacgagtacatcatcaaagacaagcacatcctcgccaagatccgttggaagtacatgattgtggacgaaggtcaccgcatgaagaaccaccactgcaagctgacgcaggtgctcaacacgcactatgtggcaccccgccgcctgctgctgacgggcacaccgctgcagaacaagcttcccgagctctgggcgctgctcaacttcctgctgcccaccatcttcaagagctgcagcaccttcgagcagtggtttaacgcaccctttgccatgaccggggaaaaggtggacctgaatgaggaggaaaccattctcatcatccggcgtctccacaaagtgctgcggcccttcttgctccgacgactcaagaaggaagtcgaggcccagttgcccgaaaaggtggagtacgtcatcaagtgcgacatgtctgcgctgcagcgagtgctctaccgccacatgcaggccaagggcgtgctgctgactgatggctccgagaaggacaagaagggcaaaggcggcaccaagaccctgatgaacaccatcatgcagctgcggaagatctgcaaccacccctacatgttccagcacatcgaggagtccttttccgagcacttggggttcactggcggcattgtccaagggctggacctgtaccgagcctcgggtaaatttgagcttcttgatagaattcttcccaaactccgagcaaccaaccacaaagtgctgctgttctgccaaatgacctccctcatgaccatcatggaagattactttgcgtatcgcggctttaaatacctcaggcttgatggaaccacgaaggcggaggaccggggcatgctgctgaaaaccttcaacgagcccggctctgagtacttcatcttcctgctcagcacccgggctggggggctcggcctgaacctccagtcggcagacactgtgatcatttttgacagcgactggaatcctcaccaggacctgcaagcgcaggaccgagcccaccgcatcgggcagcagaacgaggtgcgtgtgctccgcctctgcaccgtcaacagcgtggaggagaagatcctagctgcagccaagtacaagctcaacgtggaccagaaggtgatccaggccggcatgttcgaccagaagtcctccagccatgagcggcgcgccttcctgcaggccatcctggagcacgaggagcaggatgaggaggaagacgaggtgcccgacgacgagaccgtcaaccagatgatcgcccggcacgaggaggagtttgatctgttcatgcgcatggacctggaccgcaggcgcgaggaggcccgcaaccccaagcggaagccgcgcctcatggaggaggacgagctcccctcgtggatcatcaaggacgacgcggaggtggagcggctgacctgtgaggaggaggaggagaagatgttcggccgtggctcccgccaccgcaaggaggtggactacagcgactcactgacggagaagcagtggctcaagaccctgaaggccatcgaggagggcacgctggaggagatcgaagaggaggtccggcagaagaaatcatcacggaagcgcaagcgagacagcgacgccggctcctccaccccgaccaccagcacccgcagccgcgacaaggacgacgagagcaagaagcagaagaagcgcgggcggccgcctgccgagaaactctcccctaacccacccaacctcaccaagaagatgaagaagattgtggatgccgtgatcaagtacaaggacagcagtggacgtcagctcagcgaggtcttcatccagctgccctcgcgaaaggagctgcccgagtactacgagctcatccgcaagcccgtggacttcaagaagataaaggagcgcattcgcaaccacaagtaccgcagcctcaacgacctagagaaggacgtcatgctcctgtgccagaacgcacagaccttcaacctggagggctccctgatctatgaagactccatcgtcttgcagtcggtcttcaccagcgtgcggcagaaaatcgagaaggaggatgacagtgaaggcgaggagagtgaggaggaggaagagggcgaggaggaaggctccgaatccgaatctcggtccgtcaaagtgaagatcaagcttggccggaaggagaaggcacaggaccggctgaagggcggccggcggcggccgagccgagggtcccgagccaagccggtcgtgagtgacgatgacagtgaggaggaacaagaggaggaccgctcaggaagtggcagcgaagaagactga

SEQ ID NO: 30524 - DNA, 4845 bp, Homo sapiens
  source 1..4845: mol_type = unassigned DNA
atgtccactccagacccacccctgggcggaactcctcggccaggtccttccccgggccctggcccttcccctggagccatgctgggccctagcccgggtccctcgccgggctccgcccacagcatgatggggcccagcccagggccgccctcagcaggacaccccatccccacccaggggcctggagggtaccctcaggacaacatgcaccagatgcacaagcccatggagtccatgcatgagaagggcatgtcggacgacccgcgctacaaccagatgaaaggaatggggatgcggtcagggggccatgctgggatggggcccccgcccagccccatggaccagcactcccaaggttacccctcgcccctgggtggctctgagcatgcctctagtccagttccagccagtggcccgtcttcggggccccagatgtcttccgggccaggaggtgccccgctggatggtgctgacccccaggccttggggcagcagaaccggggcccaaccccatttaaccagaaccagctgcaccagctcagagctcagatcatggcctacaagatgctggccagggggcagcccctccccgaccacctgcagatggcggtgcagggcaagcggccgatgcccgggatgcagcagcagatgccaacgctacctccaccctcggtgtccgcaacaggacccggccctggccctggccctggccccggcccgggtcccggcccggcacctccaaattacagcaggcctcatggtatgggagggcccaacatgcctcccccaggaccctcgggcgtgccccccgggatgccaggccagcctcctggagggcctcccaagccctggcctgaaggacccatggcgaatgctgctgcccccacgagcacccctcagaagctgattcccccgcagccaacgggccgcccttcccccgcgccccctgccgtcccacccgccgcctcgcccgtgatgccaccgcagacccagtcccccgggcagccggcccagcccgcgcccatggtgccactgcaccagaagcagagccgcatcacccccatccagaagccgcggggcctcgaccctgtggagatcctgcaggagcgcgagtacaggctgcaggctcgcatcgcacaccgaattcaggaacttgaaaaccttcccgggtccctggccggggatttgcgaaccaaagcgaccattgagctcaaggccctcaggctgctgaacttccagaggcagctgcgccaggaggtggtggtgtgcatgcggagggacacagcgctggagacagccctcaatgctaaggcctacaagcgcagcaagcgccagtccctgcgcgaggcccgcatcactgagaagctggagaagcagcagaagatcgagcaggagcgcaagcgccggcagaagcaccaggaatacctcaatagcattctccagcatgccaaggatttcaaggaatatcacagatccgtcacaggcaaaatccagaagctgaccaaggcagtggccacgtaccatgccaacacggagcgggagcagaagaaagagaacgagcggatcgagaaggagcgcatgcggaggctcatggctgaagatgaggaggggtaccgcaagctcatcgaccagaagaaggacaagcgcctggcctacctcttgcagcagacagacgagtacgtggctaacctcacggagctggtgcggcagcacaaggctgcccaggtcgccaaggagaaaaagaagaaaaagaaaaagaagaaggcagaaaatgcagaaggacagacgcctgccattgggccggatggcgagcctctggacgagaccagccagatgagcgacctcccggtgaaggtgatccacgtggagagtgggaagatcctcacaggcacagatgcccccaaagccgggcagctggaggcctggctcgagatgaacccggggtatgaagtagctccgaggtctgatagtgaagaaagtggctcagaagaagaggaagaggaggaggaggaagagcagccgcaggcagcacagcctcccaccctgcccgtggaggagaagaagaagattccagatccagacagcgatgacgtctctgaggtggacgcgcggcacatcattgagaatgccaagcaagatgtcgatgatgaatatggcgtgtcccaggcccttgcacgtggcctgcagtcctactatgccgtggcccatgctgtcactgagagagtggacaagcagtcagcgcttatggtcaatggtgtcctcaaacagtaccagatcaaaggtttggagtggctggtgtccctgtacaacaacaacctgaacggcatcctggccgacgagatgggcctggggaagaccatccagaccatcgcgctcatcacgtacctcatggagcacaaacgcatcaatgggcccttcctcatcatcgtgcctctctcaacgctgtccaactgggcgtacgagtttgacaagtgggccccctccgtggtgaaggtgtcttacaagggatccccagcagcaagacgggcctttgtcccccagctccggagtgggaagttcaacgtcttgctgacgacgtacgagtacatcatcaaagacaagcacatcctcgccaagatccgttggaagtacatgattgtggacgaaggtcaccgcatgaagaaccaccactgcaagctgacgcaggtgctcaacacgcactatgtggcaccccgccgcctgctgctgacgggcacaccgctgcagaacaagcttcccgagctctgggcgctgctcaacttcctgctgcccaccatcttcaagagctgcagcaccttcgagcagtggtttaacgcaccctttgccatgaccggggaaaaggtggacctgaatgaggaggaaaccattctcatcatccggcgtctccacaaagtgctgcggcccttcttgctccgacgactcaagaaggaagtcgaggcccagttgcccgaaaaggtggagtacgtcatcaagtgcgacatgtctgcgctgcagcgagtgctctaccgccacatgcaggccaagggcgtgctgctgactgatggctccgagaaggacaagaagggcaaaggcggcaccaagaccctgatgaacaccatcatgcagctgcggaagatctgcaaccacccctacatgttccagcacatcgaggagtccttttccgagcacttggggttcactggcggcattgtccaagggctggacctgtaccgagcctcgggtaaatttgagcttcttgatagaattcttcccaaactccgagcaaccaaccacaaagtgctgctgttctgccaaatgacctccctcatgaccatcatggaagattactttgcgtatcgcggctttaaatacctcaggcttgatggaaccacgaaggcggaggaccggggcatgctgctgaaaaccttcaacgagcccggctctgagtacttcatcttcctgctcagcacccgggctggggggctcggcctgaacctccagtcggcagacactgtgatcatttttgacagcgactggaatcctcaccaggacctgcaagcgcaggaccgagcccaccgcatcgggcagcagaacgaggtgcgtgtgctccgcctctgcaccgtcaacagcgtggaggagaagatcctagctgcagccaagtacaagctcaacgtggaccagaaggtgatccaggccggcatgttcgaccagaagtcctccagccatgagcggcgcgccttcctgcaggccatcctggagcacgaggagcaggatgaggaggaagacgaggtgcccgacgacgagaccgtcaaccagatgatcgcccggcacgaggaggagtttgatctgttcatgcgcatggacctggaccgcaggcgcgaggaggcccgcaaccccaagcggaagccgcgcctcatggaggaggacgagctcccctcgtggatcatcaaggacgacgcggaggtggagcggctgacctgtgaggaggaggaggagaagatgttcggccgtggctcccgccaccgcaaggaggtggactacagcgactcactgacggagaagcagtggctcaaggccatcgaggagggcacgctggaggagatcgaagaggaggtccggcagaagaaatcatcacggaagcgcaagcgagacagcgacgccggctcctccaccccgaccaccagcacccgcagccgcgacaaggacgacgagagcaagaagcagaagaagcgcgggcggccgcctgccgagaaactctcccctaacccacccaacctcaccaagaagatgaagaagattgtggatgccgtgatcaagtacaaggacagcagcagtggacgtcagctcagcgaggtcttcatccagctgccctcgcgaaaggagctgcccgagtactacgagctcatccgcaagcccgtggacttcaagaagataaaggagcgcattcgcaaccacaagtaccgcagcctcaacgacctagagaaggacgtcatgctcctgtgccagaacgcacagaccttcaacctggagggctccctgatctatgaagactccatcgtcttgcagtcggtcttcaccagcgtgcggcagaaaatcgagaaggaggatgacagtgaaggcgaggagagtgaggaggaggaagagggcgaggaggaaggctccgaatccgaatctcggtccgtcaaagtgaagatcaagcttggccggaaggagaaggcacaggaccggctgaagggcggccggcggcggccgagccgagggtcccgagccaagccggtcgtgagtgacgatgacagtgaggaggaacaagaggaggaccgctcaggaagtggcagcgaagaagactga

SEQ ID NO: 30525 - DNA, 7923 bp, Homo sapiens
  source 1..7923: mol_type = unassigned DNA
gcgagtgttgaaagtcggtggcgtaggtcgtcgtcctggatgctggcgagatagatgttatcttccagaggaagaggaggaggcggcgaagcgttttcccagcctcagtctctctttcgttttccttttcccttcccccaaccctccgcccttctctaaatcagccggccttccttgacctcagtgacccgtctggccccgcccaccctcgtcgacgtgattcccgccgtgaggtaagcgccggtggaacctagagccccgcggaagagcagaacgtttgggagtgtgcagctcctgggcccggctcaggcccgtcgcggaggcgcggcgcaggggagcgctcgggtgggagtctcgctcctccaccagtttattgcgacgtagcatccaggcctaggcctccccgtccatccccgccggactcgggcctctggcagcagcgggtgacgcagacggaacatcatgtcgtccgcggccgagcctccgccacccccgcctcccgagagcgcgccttccaagcccgcagcctcgatcgccagcggcgggagcaacagcagcaacaaaggcggccccgaaggcgtcgcggcgcaggcggttgcgtctgcggccagcgctggtcccgcagacgccgagatggaggaaatatttgatgatgcgtcacctggaaagcaaaaggaaatccaagaaccagatcctacctatgaagaaaaaatgcaaactgaccgggcaaatagattcgagtatttattaaagcagacagaactttttgcacatttcattcaacctgctgctcagaagactccaacttcacctttgaagatgaaaccagggcgcccacgaataaaaaaagatgagaagcagaacttactatccgttggcgattaccgacaccgtagaacagagcaagaggaggatgaagagctattaacagaaagctccaaagcaaccaatgtttgcactcgatttgaagactctccatcgtatgtaaaatggggtaaactgagagattatcaggtccgaggattaaactggctcatttctttgtatgagaatggcatcaatggtatccttgcagatgaaatgggcctaggaaagactcttcaaacaatttctcttcttgggtacatgaaacattatagaaacattcctgggcctcatatggttttggttcctaagtctacattacacaactggatgagtgaattcaagagatgggtaccaacacttagatctgtttgtttgataggagataaagaacaaagagctgcttttgtcagagacgttttattaccgggagaatgggatgtatgtgtaacatcttatgaaatgcttattaaagagaagtctgtgttcaaaaaatttaattggagatacttagtaatagatgaagctcacaggatcaaaaatgaaaaatctaagttgtcagaaatagtgagggaattcaagactacaaatagactattattaactggaacacctcttcagaacaacttgcatgagctgtggtcacttcttaactttctgttgccagatgtgtttaattcagcagatgactttgattcctggtttgatacaaacaactgccttggggatcaaaaactagttgagaggcttcatatggttttgcgtccattcctccttcgtcgaattaaggctgatgttgaaaagagtttgcctccaaagaaggaagtaaaaatctatgtgggcctcagcaaaatgcaaagggaatggtatactcggatattaatgaaggatatagatatactcaactcagcaggcaagatggacaaaatgaggttattgaacatcctaatgcagttgagaaaatgttgtaatcatccatatctctttgatggagcagaacctggtccaccttatacaacagatatgcatctagtaaccaacagtggcaaaatggtggttttagacaagctgctccctaagttaaaagaacaaggttcacgagtactaatcttcagtcaaatgacaagggtattggacattttggaagattattgcatgtggagaaattatgagtactgcaggttggatggtcagacaccccatgatgagagacaagactccatcaatgcatacaatgaaccaaacagcacaaagtttgttttcatgttaagcacgcgtgctggtggtcttggcatcaatcttgcgactgctgatgtagtaattttgtatgattctgattggaatccccaagtagatcttcaggctatggaccgagcacatagaattgggcagactaagacagtcagagtgttccgctttataactgataacactgtagaagaaagaatagtagaacgtgctgagatgaaactcagactggattcaatagtcattcaacaagggaggcttgtggatcagaatctgaacaaaattgggaaagatgaaatgcttcaaatgattagacatggagcaacacatgtgtttgcttcaaaggaaagtgagatcactgatgaagatatcgatggtattttggaaagaggtgcaaagaagactgcagagatgaatgaaaagctctccaagatgggcgaaagttcacttagaaactttacaatggatacagagtcaagtgtttataacttcgaaggagaagactatagagaaaaacaaaagattgcattcacagagtggattgaaccacctaaacgagaaagaaaagccaactatgccgttgatgcatatttcagggaagctcttcgtgttagtgaacctaaagcacccaaggctcctcgacctccaaaacaacccaatgttcaggatttccagttctttcctccacgtttatttgaattactggaaaaagaaattctgttttacagaaaaactattgggtacaaggtacctcgaaatcctgagctgcctaatgcagcacaggcacaaaaagaagaacagcttaaaattgatgaagctgaatcccttaatgatgaagagttagaggaaaaagagaagcttctaacacagggatttaccaattggaataagagagattttaaccagtttatcaaagctaatgagaagtggggtcgtgatgatattgaaaatatagcaagagaagtagaaggcaaaactccagaagaagtcattgaatattcagctgtgttttgggaaaggtgcaacgagctccaggacatagagaagattatggctcagattgaaaggggagaggcgagaattcaaagaagaataagcatcaagaaagcacttgacacaaagattggacggtacaaagcaccttttcatcagctgagaatatcatatggtactaacaaaggaaaaaactatactgaagaagaagatcgttttctgatttgtatgcttcacaaacttggatttgacaaagaaaatgtttatgatgaattgcgacagtgtattcgcaactctcctcagttcagatttgactggtttcttaagtccagaactgcaatggagctccagaggagatgtaataccttaattactttgattgaaagagaaaacatggaactagaagaaaaggagaaggcagagaaaaagaaacgaggaccaaagccttcaacacagaaacgtaaaatggatggcgcacctgatggtcgaggaagaaaaaagaagctgaaactatgaatatgtttttgtttcataatcactaactttaaaccagtagttctttaatttacgggtcttcataagatgtactgtacaatgctcaattgttatgtcatttaaagacatcaggttcatctgtttactgagctagaaacatagtatgtagtttcacttttttaaatgcaacagctgtgctgaaatttttttatcattaacacttgaagtaataaaataggcttcatttattactaagtgtttcatttgatttatttttctattgtagttccatttgtgaagattgtgactttttgtttattagctataatttctacacttgtaaggcttaaaaacaagttaaaaagaaaattgcaaataacatttgtccctttcagtcttcacctagttgtgtaattattttaattcactttgcctttgcagaaatttgggtattttctttgtagtgctattgagtctcatctggaaagattatataaattgcattctccttgcttatgtgggtagaatgggaaaagaaggcaagacaaagtatacttaaattctatgcatatttctgttatgctttctgttttttttagttgattctgaaatgaatatgccctattcttttgaaagaatggccttttagttgtatagccaaagacatttagtattttccggttccttaaggtattactgtaccattttgtaaaaggaatattattattattatttttaattatttggtaaatattttgtcatatgaccttctgaagcagccacaacttagataatgtcagaactaaggtgattttttttttttaattttgaaagcccagccaaaatgaggtgtgaatttgtcatactgttacattgaaattggtaacaaaatatatcccctcccatttggacttttagggtaaatgaaaattttattgtattttaaagtagtttctaagtgttagcaagactgactataattccagtttctgttttctatggacagacctgataaactggagaccctaaagcaggaatacccaaattatagtgtcaggattttagctgtaccagaggcctttatgtgctacacataatttgtataaaattttatatgtgcagattgggtacataaacagttctccatttttctaagggaatgcaataaatgtagcatcgtgaataaatataacttttataatccgtaaagtggtcttttctttccatttctttaattgttttctcaatttttattcactttttcctttaggacacatttcccttaattggatatctttcccttaaatttctattagtagttgttttcatctgcccacatgtaattgaagatttaaaaaaaaaattttgatacctgcagtattactaatactgcttaatttcttgaaatgtggaattgctgctgttaatgtcaagcaaaacgcagtatttatggcaaattgtaaagtaatttgaatttagtgctacctcaaaattaactttttaaatactatgttagattcttaacagttaaaggtctaatacatgcatgaggaatggttacttatgaaaggaaaaagaatttgtaagagttatcacctcagtttggaagaaattgaaaaaatgtaaggctgaagaaaacttacggaggtcacaaaagtgatgttttcaagaggaggagaaactgggagggagatacacagtggaaatgcaaaatgaatcaagtatagtggtagccctgagagcttagggactcaaatggaaactgtgtgaagggaaactcacttgaaaaaaaagcatgaaccagctaggccctgccaccactgtgtttggccaagttcacaaatctgttttaacctgtcacttccctgtcacttctctggctttcctctcccgctaagcttttgtttcctggcagtaattaaaatcttctgtcagtgccacagctactactgctactggaactgccttaaccactactgctactggaactgccttagccaccttggtatcgtggtttggcaaagtattggcctctaccaccatagggcccagagcttctgcctccaaagtttcctcccttcatgggtccaaaatttgaagactgattgttgtcattgccaaaatcattgtagcttttaccacctccaaaattgcttcaatcattaccaaatctattatagcaatccccactgccaccatatccatcaccaccaccatggctgccaccaaagccaccacgatcacagaacttgatgactgtatttgtgactaattgtataatagtttctgttctgtggaaagtaaagcattccaacacagggtttcagtgtagattgttttgttttgtacccatgctgttgattgctaaatgttttaataatctgatcatgatactgaataaatgtctttttttttttttaacaacaaagcatgaaagattgcttaattgtacatctgacaaagtgctggaggctattataaagtgtaattattactacttttaagagacagggtcttgctctgtcacccaggctggagtgcagtggtgcaatcacagctcactgcaacctcaaacttcagggctcaagtgatcctcccacctcagcttcccaagtagctaggactacagataccacgcccagctaagtttttttagtttttgtagagatagggccttgctatgttgcccagtccggtctcaaacgccgacttcaggcaatcctcttgcgtcaacctctcaaagtgctgggattacatgtgtaagcctacattccaaagtgctgggatcatagttgtgagcctacaccacacctggcctacattttgtttttcataaagttgagagaagcaaatcctaagcatagagtacaagttgagcatccctaatcaaaaaatctaaaatcagaaatgctccataatttgaatgctcattagggcatttctgatttttggattagggatgctgaactgataagtataatgcaagtattctaaagtctggaaaatgctaaaaacacttctggttccaggcatttcagataaggattgctccatctgccctttgagtatttaatatatgccgattgtttgaactaatctggatttaattatataaatgattatataaatgatctttggcttagtacctttcttaatctcgatcttaaaaagcattgtaaaacacccctgtggtttttcagaaaaattctgagtaaaaaataaatttcatcttgttctatccctttgaatctaaaaaacaaatctttttgaaaggatgtgctactatatttcaaaccagtagttttggagtagaacattgctaaaaaaatgggtactaaggagggtaatttaaacaaagtagattaatgacacaaggtggattgatgaactcataaatccaaatgaatggaatgctagaagacatgtattaacggagtagctgttaccaaaatatatacatattttgtatatgtacatagctgttaccaaaatgtatctttgcctgttggaatctgatgtcaagatcaaaggtgagggcatccctcagatgacagataatgggcaaaatacattcttggtgtggagcagtgctgcagaattaacttcgctgtgtacatcccagaatcgttttggatctgttaaggtttttattagaatgattaaataggcttttgcagcattaactttacagtagttaccagaaaagactatgctacaagaaccaaaattgaagtaagaagaaaaagactgaaatgatatgattctaaatgaaaaaaatgaagaagtggaatagtttctccacaggcataagaggcaaagcattgtttcagaagtggactggcacctcacctgagatactcaagactggcaacatgggtctacattctttgttaccacagattcccttgtgtccggagagattccctagctctaatgacagcttttttggggggtaatgaggctatgagaagattgaggatctaggtacttgcctttaactctacagcatacaaggtgtgtggctcttatctctaggacaccaatatttaatgttgcatatcatgtatctccagtacaagaagaaagtttatcagaatttagttaatgttggaaactttgtaatataaacaatgtaaacactacattgacaaaaatattttattaatacaaagaatatgcatatagtttgcttactacagaaattcttgtttttgatgtagacaacccaaaggagtttttatgtatatagattgtgaataaattgggaaaagaaatagagataagtagagattatttcacttcattaaacttttgaagtcctaa

SEQ ID NO: 30526 - DNA, 3475 bp, Homo sapiens
  source 1..3475: mol_type = unassigned DNA
gtgttgaaagtcggtggcgtaggtcgtcgtcctggatgctggcgagatagatgttatcttccagaggaagaggaggaggcggcgaagcgttttcccagcctcagtctctctttcgttttccttttcccttcccccgagcctccgccacccccgcctcccgagagccggcgggagcaacagcagcaacaaaggcggccccgaaggcgtcgcggcgcaggcggttgcgtctgcggccagcgctggtcccgcagacgccgagatggaggaaatatttgatgatgcgtcacctggaaagcaaaaggaaatccaagaaccagatcctacctatgaagaaaaaatgcaaactgaccgggcaaatagattcgagtatttattaaagcagacagaactttttgcacatttcattcaacctgctgctcagaagactccaacttcacctttgaagatgaaaccagggcgcccacgaataaaaaaagatgagaagcagaacttactatccgttggcgattaccgacaccgtagaacagagcaagaggaggatgaagagctattaacagaaagctccaaagcaaccaatgtttgcactcgatttgaagactctccatcgtatgtaaaatggggtaaactgagagattatcaggtccgaggattaaactggctcatttctttgtatgagaatggcatcaatggtatccttgcagatgaaatgggcctaggaaagactcttcaaacaatttctcttcttgggtacatgaaacattatagaaacattcctgggcctcatatggttttggttcctaagtctacattacacaactggatgagtgaattcaagagatgggtaccaacacttagatctgtttgtttgataggagataaagaacaaagagctgcttttgtcagagacgttttattaccgggagaatgggatgtatgtgtaacatcttatgaaatgcttattaaagagaagtctgtgttcaaaaaatttaattggagatacttagtaatagatgaagctcacaggatcaaaaatgaaaaatctaagttgtcagaaatagtgagggaattcaagactacaaatagactattattaactggaacacctcttcagaacaacttgcatgagctgtggtcacttcttaactttctgttgccagatgtgtttaattcagcagatgactttgattcctggtttgatacaaacaactgccttggggatcaaaaactagttgagaggcttcatatggttttgcgtccattcctccttcgtcgaattaaggctgatgttgaaaagagtttgcctccaaagaaggaagtaaaaatctatgtgggcctcagcaaaatgcaaagggaatggtatactcggatattaatgaaggatatagatatactcaactcagcaggcaagatggacaaaatgaggttattgaacatcctaatgcagttgagaaaatgttgtaatcatccatatctctttgatggagcagaacctggtccaccttatacaacagatatgcatctagtaaccaacagtggcaaaatggtggttttagacaagctgctccctaagttaaaagaacaaggttcacgagtactaatcttcagtcaaatgacaagggtattggacattttggaagattattgcatgtggagaaattatgagtactgcaggttggatggtcagacaccccatgatgagagacaagactccatcaatgcatacaatgaaccaaacagcacaaagtttgttttcatgttaagcacgcgtgctggtggtcttggcatcaatcttgcgactgctgatgtagtaattttgtatgattctgattggaatccccaagtagatcttcaggctatggaccgagcacatagaattgggcagactaagacagtcagagtgttccgctttataactgataacactgtagaagaaagaatagtagaacgtgctgagatgaaactcagactggattcaatagtcattcaacaagggaggcttgtggatcagaatctgaacaaaattgggaaagatgaaatgcttcaaatgattagacatggagcaacacatgtgtttgcttcaaaggaaagtgagatcactgatgaagatatcgatggtattttggaaagaggtgcaaagaagactgcagagatgaatgaaaagctctccaagatgggcgaaagttcacttagaaactttacaatggatacagagtcaagtgtttataacttcgaaggagaagactatagagaaaaacaaaagattgcattcacagagtggattgaaccacctaaacgagaaagaaaagccaactatgccgttgatgcatatttcagggaagctcttcgtgttagtgaacctaaagcacccaaggctcctcgacctccaaaacaacccaatgttcaggatttccagttctttcctccacgtttatttgaattactggaaaaagaaattctgttttacagaaaaactattgggtacaaggtacctcgaaatcctgagctgcctaatgcagcacaggcacaaaaagaagaacagcttaaaattgatgaagctgaatcccttaatgatgaagagttagaggaaaaagagaagcttctaacacagggatttaccaattggaataagagagattttaaccagtttatcaaagctaatgagaagtggggtcgtgatgatattgaaaatatagcaagagaagtagaaggcaaaactccagaagaagtcattgaatattcagctgtgttttgggaaaggtgcaacgagctccaggacatagagaagattatggctcagattgaaaggggagaggcgagaattcaaagaagaataagcatcaagaaagcacttgacacaaagattggacggtacaaagcaccttttcatcagctgagaatatcatatggtactaacaaaggaaaaaactatactgaagaagaagatcgttttctgatttgtatgcttcacaaacttggatttgacaaagaaaatgtttatgatgaattgcgacagtgtattcgcaactctcctcagttcagatttgactggtttcttaagtccagaactgcaatggagctccagaggagatgtaataccttaattactttgattgaaagagaaaacatggaactagaagaaaaggagaaggcagagaaaaagaaacgaggaccaaagccttcaacacagaaacgtaaaatggatggcgcacctgatggtcgaggaagaaaaaagaagctgaaactatgaatatgtttttgtttcataatcactaactttaaaccagtagttctttaatttacgggtcttcataagatgtactgtacaatgctcaattgttatgtcatttaaagacatcaggttcatctgtttactgagctagaaacatagtatgtagtttcacttttttaaatgcaacagctgtgctgaaatttttttatcattaacacttgaagtaataaaataggcttcatttat

SEQ ID NO: 30527 - DNA, 3557 bp, Homo sapiens
  source 1..3557: mol_type = unassigned DNA
cgagtgttgaaagtcggtggcgtaggtcgtcgtcctggatgctggcgagatagatgttatcttccagaggaagaggaggaggcggcgaagcgttttcccagcctcagtctctctttcgttttccttttcccttcccccaaccctccgcccttctctaaatcagccggccttccttgacctcagtgacccgtctggccccgcccaccctcgtcgacgtgattcccgccgtgaggtaagcgccggtggaacctagagccccgcggaagagcagaacgtttgggagtgtgcagctcctgggcccggctcaggcccgtcgcggaggcgcggcgcaggggagcgctcgggtgggagtctcgctcctccaccagtttattgcgacgtagcatccaggcctaggcctccccgtccatccccgctggtcccgcagacgccgagatggaggaaatatttgatgatgcgtcacctggaaagcaaaaggaaatccaagaaccagatcctacctatgaagaaaaaatgcaaactgaccgggcaaatagattcgagtatttattaaagcagacagaactttttgcacatttcattcaacctgctgctcagaagactccaacttcacctttgaagatgaaaccagggcgcccacgaataaaaaaagatgagaagcagaacttactatccgttggcgattaccgacaccgtagaacagagcaagaggaggatgaagagctattaacagaaagctccaaagcaaccaatgtttgcactcgatttgaagactctccatcgtatgtaaaatggggtaaactgagagattatcaggtccgaggattaaactggctcatttctttgtatgagaatggcatcaatggtatccttgcagatgaaatgggcctaggaaagactcttcaaacaatttctcttcttgggtacatgaaacattatagaaacattcctgggcctcatatggttttggttcctaagtctacattacacaactggatgagtgaattcaagagatgggtaccaacacttagatctgtttgtttgataggagataaagaacaaagagctgcttttgtcagagacgttttattaccgggagaatgggatgtatgtgtaacatcttatgaaatgcttattaaagagaagtctgtgttcaaaaaatttaattggagatacttagtaatagatgaagctcacaggatcaaaaatgaaaaatctaagttgtcagaaatagtgagggaattcaagactacaaatagactattattaactggaacacctcttcagaacaacttgcatgagctgtggtcacttcttaactttctgttgccagatgtgtttaattcagcagatgactttgattcctggtttgatacaaacaactgccttggggatcaaaaactagttgagaggcttcatatggttttgcgtccattcctccttcgtcgaattaaggctgatgttgaaaagagtttgcctccaaagaaggaagtaaaaatctatgtgggcctcagcaaaatgcaaagggaatggtatactcggatattaatgaaggatatagatatactcaactcagcaggcaagatggacaaaatgaggttattgaacatcctaatgcagttgagaaaatgttgtaatcatccatatctctttgatggagcagaacctggtccaccttatacaacagatatgcatctagtaaccaacagtggcaaaatggtggttttagacaagctgctccctaagttaaaagaacaaggttcacgagtactaatcttcagtcaaatgacaagggtattggacattttggaagattattgcatgtggagaaattatgagtactgcaggttggatggtcagacaccccatgatgagagacaagactccatcaatgcatacaatgaaccaaacagcacaaagtttgttttcatgttaagcacgcgtgctggtggtcttggcatcaatcttgcgactgctgatgtagtaattttgtatgattctgattggaatccccaagtagatcttcaggctatggaccgagcacatagaattgggcagactaagacagtcagagtgttccgctttataactgataacactgtagaagaaagaatagtagaacgtgctgagatgaaactcagactggattcaatagtcattcaacaagggaggcttgtggatcagaatctgaacaaaattgggaaagatgaaatgcttcaaatgattagacatggagcaacacatgtgtttgcttcaaaggaaagtgagatcactgatgaagatatcgatggtattttggaaagaggtgcaaagaagactgcagagatgaatgaaaagctctccaagatgggcgaaagttcacttagaaactttacaatggatacagagtcaagtgtttataacttcgaaggagaagactatagagaaaaacaaaagattgcattcacagagtggattgaaccacctaaacgagaaagaaaagccaactatgccgttgatgcatatttcagggaagctcttcgtgttagtgaacctaaagcacccaaggctcctcgacctccaaaacaacccaatgttcaggatttccagttctttcctccacgtttatttgaattactggaaaaagaaattctgttttacagaaaaactattgggtacaaggtacctcgaaatcctgagctgcctaatgcagcacaggcacaaaaagaagaacagcttaaaattgatgaagctgaatcccttaatgatgaagagttagaggaaaaagagaagcttctaacacagggatttaccaattggaataagagagattttaaccagtttatcaaagctaatgagaagtggggtcgtgatgatattgaaaatatagcaagagaagtagaaggcaaaactccagaagaagtcattgaatattcagctgtgttttgggaaaggtgcaacgagctccaggacatagagaagattatggctcagattgaaaggggagaggcgagaattcaaagaagaataagcatcaagaaagcacttgacacaaagattggacggtacaaagcaccttttcatcagctgagaatatcatatggtactaacaaaggaaaaaactatactgaagaagaagatcgttttctgatttgtatgcttcacaaacttggatttgacaaagaaaatgtttatgatgaattgcgacagtgtattcgcaactctcctcagttcagatttgactggtttcttaagtccagaactgcaatggagctccagaggagatgtaataccttaattactttgattgaaagagaaaacatggaactagaagaaaaggagaaggcagagaaaaagaaacgaggaccaaagccttcaacacagaaacgtaaaatggatggcgcacctgatggtcgaggaagaaaaaagaagctgaaactatgaatatgtttttgtttcataatcactaactttaaaccagtagttctttaatttacgggtcttcataagatgtactgtacaatgctcaattgttatgtcatttaaagacatcaggttcatctgtttactgagctaga

SEQ ID NO: 30528 - DNA, 3271 bp, Homo sapiens
  source 1..3271: mol_type = unassigned DNA
atcattcttacttttggaagcgaaactgcggccgcgttgcctgctgggaaatgtagttcagcggtggcctagcccttcaggcctggccgctacaataaggctggcgaactcgcagcgcttgaatacccgtggcctaaccgtccactcggaagaccggtcccgctcgggaggctctgcagtcgcgcctggggtcagggccgggggcgaatgtggctcgcgttctaggcctccctgggttggaaaaagactatgttagcaagtgtcacgccatgcttttgccaactttccaattaaaggttgacattcctgcataagcatttctctgtgaaaatgtccttgcctcttacagaggagcagaggaaaaagattgaagagaatcgacaaaaggctctggcccgcagagctgagaagttattggcagaacagcatcagaggactagctcgggcacctccattgctggcaacccattccaggccaagcaaggcccatcccaaaatttcccaagggagtcttgtaagccagtgagccatggtgtcattttcaagcaacagaatctcagtagctcatctaatgctgaccaaagacctcatgattcccacagttttcaggcaaagggaatatggaaaaagccagaagaaatgcccacagcctgcccaggccacagtccacgtagtcaaatggctctcactggaatctctcctcccttggcacaaagtcctccagaggtccctaaacaacagctcttgagttatgagttaggtcaaggtcatgctcaggcttcacctgagatcaggttcacaccctttgctaacccaactcataagcctctggccaaaccaaagagttcccaagagacaccagctcattcctctggacagcctcccagggatgctaagttagaggccaagacagcaaaagcctccccttcggggcagaacatttcttacatccattctagctcagagagtgtaacgcccaggacagaaggaagactccagcagaagtcagggtcctcagtccaaaaaggagtgaactctcagaagggaaagtgcgtaaggaacggcgatcgtttccaggtgttgattgggtacaatgcggaactcattgcagtgtttaagaccctgcccagcaagaattatgatcctgacaccaagacgtggaacttcagcatgaatgactatagtgccctgatgaaagcagcccagagcctccccacggtcaacctgcagcctctggaatgggcctatggcagcagcgagtcaccctccaccagcagtgagggacaggccggccttccatcagctccatccctttcatttgtcaaagggcgatgcatgctcatctccagggcctacttcgaggcagacatcagttattcacaggaccttattgcgctttttaaacagatggattccagaagatatgatgtcaagaccaggaagtggagctttctcttggaagagcacagtaaactaattgcaaaggtgcgctgcctcccacaagttcagctggaccctctgcccacgactctcaccctggcgtttgcttctcagctcaagaagacatctctcagtctcacgccagatgtcccagaggcagacctttctgaagtggaccccaagctcgtgtctaatctgatgccctttcagagagctggagtcaattttgccatagccaaaggaggccgcctgctgctcgctgacgacatgggcctggggaagaccatccaagccatctgcatcgcagccttttaccggaaggagtggccgctcctggtggtggtgccatcctccgtgcgcttcacctgggagcaggccttccttcggtggctgccatctctgagcccagattgcatcaacgtcgtggtgactgggaaggaccgcctgacagctggcctgatcaacattgtcagctttgaccttcttagcaagttggaaaaacagctaaaaaccccttttaaagttgtcatcattgatgaatctcacttcctcaaaaacagtaggactgcccgctgtcgagcagctatgccggtcctaaaggttgccaagagggtgatcctgttgtcgggcacaccagccatgtcccggcccgcagagctctacacgcagatcatcgcagtcaagccaactttcttcccccagtttcatgcctttggacttcgctactgtgatgccaaacggatgccttgggggtgggactactcaggttcctccaacctgggagagctgaagctcctgctggaggaagcagtcatgctgcggcgcctcaagtccgacgtcctttcccagctgcctgccaagcagcgcaagatagtggtgattgccccaggacggatcaatgccaggaccagagctgccctggatgctgcagccaaggaaatgaccaccaaggacaaaactaaacagcagcagaaagatgccctcattctcttcttcaacagaacagctgaagctaaaatcccatctgtcattgaatatatcttggacctactggaaagtggaagagagaagtttttagtatttgcacaccataaggtggtcctggacgcaattacgcaagagcttgagagaaagcacgtgcagcacatccgcatcgatggctccacctcatcagctgagcgggaggacctgtgccagcagttccaactgtcggagaggcatgctgtggccgtgctgtccatcaccgctgccaatatgggcctcaccttctcctcggctgacctggtggtgtttgctgagctgttttggaacccaggggtgctgatccaggctgaggaccgcgtgcaccgcattggacagaccagctccgtgggcattcactacctcgtggcaaagggcacagctgatgactacctttggcccctgattcaagagaagattaaagttctggcagaagccgggctttctgagaccaatttttcagaaatgacagaatccactgattacctctacaaggacccaaagcagcagaagatctacgacctattccagaagtcctttgagaaagaaggaagtgatatggagctcctggaagcagcagagtcctttgacccaggaagtgcttcaggaacatctggaagtagttcccagaacatgggagacaccctggatgaaagctcattgacagccagtccacagaagaaaaggagatttgaattttttgataactgggacagctttacgtctcccctgtaaaaggggcaaaaagaaaaaaataaaaagcattttaaaatcatggaattgaaataaaataatgtattttgttttaaaa

SEQ ID NO: 30529 - DNA, 3056 bp, Homo sapiens
  source 1..3056: mol_type = unassigned DNA
aagtggagatcgtaggggtgggagtggggcgtggcgcccgcttaccttgaggctgggttggaaaaagactatgttagcaagtgtcacgccatgcttttgccaactttccaattaaaggttgacattcctgcataagcatttctctgtgaaaatgtccttgcctcttacagaggagcagaggaaaaagattgaagagaatcgacaaaaggctctggcccgcagagctgagaagttattggcagaacagcatcagaggactagctcgggcacctccattgctggcaacccattccaggccaagcaaggcccatcccaaaatttcccaagggagtcttgtaagccagtgagccatggtgtcattttcaagcaacagaatctcagtagctcatctaatgctgaccaaagacctcatgattcccacagttttcaggcaaagggaatatggaaaaagccagaagaaatgcccacagcctgcccaggccacagtccacgtagtcaaatggctctcactggaatctctcctcccttggcacaaagtcctccagaggtccctaaacaacagctcttgagttatgagttaggtcaaggtcatgctcaggcttcacctgagatcaggttcacaccctttgctaacccaactcataagcctctggccaaaccaaagagttcccaagagacaccagctcattcctctggacagcctcccagggatgctaagttagaggccaagacagcaaaagcctccccttcggggcagaacatttcttacatccattctagctcagagagtgtaacgcccaggacagaaggaagactccagcagaagtcagggtcctcagtccaaaaaggagtgaactctcagaagggaaagtgcgtaaggaacggcgatcgtttccaggtgttgattgggtacaatgcggaactcattgcagtgtttaagaccctgcccagcaagaattatgatcctgacaccaagacgtggaacttcagcatgaatgactatagtgccctgatgaaagcagcccagagcctccccacggtcaacctgcagcctctggaatgggcctatggcagcagcgagtcaccctccaccagcagtgagggacaggccggccttccatcagctccatccctttcatttgtcaaagggcgatgcatgctcatctccagggcctacttcgaggcagacatcagttattcacaggaccttattgcgctttttaaacagatggattccagaagatatgatgtcaagaccaggaagtggagctttctcttggaagagcacagtaaactaattgcaaaggtgcgctgcctcccacaagttcagctggaccctctgcccacgactctcaccctggcgtttgcttctcagctcaagaagacatctctcagtctcacgccagatgtcccagaggcagacctttctgaagtggaccccaagctcgtgtctaatctgatgccctttcagagagctggagtcaattttgccatagccaaaggaggccgcctgctgctcgctgacgacatgggcctggggaagaccatccaagccatctgcatcgcagccttttaccggaaggagtggccgctcctggtggtggtgccatcctccgtgcgcttcacctgggagcaggccttccttcggtggctgccatctctgagcccagattgcatcaacgtcgtggtgactgggaaggaccgcctgacagctggcctgatcaacattgtcagctttgaccttcttagcaagttggaaaaacagctaaaaaccccttttaaagttgtcatcattgatgaatctcacttcctcaaaaacagtaggactgcccgctgtcgagcagctatgccggtcctaaaggttgccaagagggtgatcctgttgtcgggcacaccagccatgtcccggcccgcagagctctacacgcagatcatcgcagtcaagccaactttcttcccccagtttcatgcctttggacttcgctactgtgatgccaaacggatgccttgggggtgggactactcaggttcctccaacctgggagagctgaagctcctgctggaggaagcagtcatgctgcggcgcctcaagtccgacgtcctttcccagctgcctgccaagcagcgcaagatagtggtgattgccccaggacggatcaatgccaggaccagagctgccctggatgctgcagccaaggaaatgaccaccaaggacaaaactaaacagcagcagaaagatgccctcattctcttcttcaacagaacagctgaagctaaaatcccatctgtcattgaatatatcttggacctactggaaagtggaagagagaagtttttagtatttgcacaccataaggtggtcctggacgcaattacgcaagagcttgagagaaagcacgtgcagcacatccgcatcgatggctccacctcatcagctgagcgggaggacctgtgccagcagttccaactgtcggagaggcatgctgtggccgtgctgtccatcaccgctgccaatatgggcctcaccttctcctcggctgacctggtggtgtttgctgagctgttttggaacccaggggtgctgatccaggctgaggaccgcgtgcaccgcattggacagaccagctccgtgggcattcactacctcgtggcaaagggcacagctgatgactacctttggcccctgattcaagagaagattaaagttctggcagaagccgggctttctgagaccaatttttcagaaatgacagaatccactgattacctctacaaggacccaaagcagcagaagatctacgacctattccagaagtcctttgagaaagaaggaagtgatatggagctcctggaagcagcagagtcctttgacccaggaagtgcttcaggaacatctggaagtagttcccagaacatgggagacaccctggatgaaagctcattgacagccagtccacagaagaaaaggagatttgaattttttgataactgggacagctttacgtctcccctgtaaaaggggcaaaaagaaaaaaataaaaagcattttaaaatca

SEQ ID NO: 30530 - DNA, 310 bp, Homo sapiens
  source 1..310: mol_type = unassigned DNA
ggaagaccggtcccgctcgggaggctctgcagtcgcgcctggggtcagggccgggggcgaatgtggctcgcgttctaggcctccctgggtgagaaagtggtagactggcaggaaggcggcggaggcggacgagaccaatgccagcctggaggaggaagttggaaaaagactatgttagcaagtgtcacgccatgcttttgccaactttccaattaaaggttgacattcctgcataagcatttctctgtgaaaatgtccttgcctcttacagaggagcagaggaaaaagattgaagagaatcgacaaaagg

SEQ ID NO: 30531 - DNA, 722 bp, Homo sapiens
  source 1..722: mol_type = unassigned DNA
atcattcttacttttggaagcgaaactgcggccgcgttgcctgctgggaaatgtagttcagcggtggcctagcccttcaggcctggccgctacaataaggctggcgaactcgcagcgcttgaatacccgtggcctaaccgtccactcggaagaccggtcccgctcgggaggctctgcagtcgcgcctggggttggaaaaagactatgttagcaagtgtcacgccatgcttttgccaactttccaattaaaggttgacattcctgcataagcatttctctgtgaaaatgtccttgcctcttacagaggagcagaggaaaaagattgaagagaatcgacaaaaggctctggcccgcagagctgagaagttattggcagaacagcatcagaggactagctcgggcacctccattgctggcaacccattccaggccaagcaaggcccatcccaaaatttcccaagggagtcttgtaagccagtgagccatggtgtcattttcaagcaacagaatctcagtagctcatctaatgctgaccaaagacctcatgattcccacagttttcaggcaaagggaatatggaaaaagccagaagaaatgcccacagcctgcccaggccacagtccacgtagtcaaatggctctcactggaatctctcctcccttggcacaaagtcctccagaggtccctaaacaacagctcttgagttatgagttaggtcaagg

SEQ ID NO: 30532 - DNA, 544 bp, Homo sapiens
  source 1..544: mol_type = unassigned DNA
agtggggcgtggcgcccgcttaccttgaggctgggtgaggctcgccccgaaatgcggggcgtggggggcggggggcagaggtccctgcctagaggggaagaggggcgtccatgtggcggaatggatttatggtttggggctgatcagtgggtcttatggccgagtctctctggttggaaaaagactatgttagcaagtgtcacgccatgcttttgccaactttccaattaaaggttgacattcctgcataagcatttctctgtgaaaatgtccttgcctcttacagaggagcagaggaaaaagattgaagagaatcgacaaaaggctctggcccgcagagctgagaagttattggcagaacagcatcagaggactagctcgggcacctccattgctggcaacccattccaggccaagcaaggcccatcccaaaatttcccaagggagtcttgtaagccagtgagccatggtgtcattttcaagcaacagaatctcagtagctcatctaatgctgaccaaagacctcatgattcccacagttttc

SEQ ID NO: 30533 - DNA, 711 bp, Homo sapiens
  source 1..711: mol_type = unassigned DNA
aaggctggcgaactcgcagcgcttgaatacccgtggcctaaccgtccactcggaagaccggtcccgctcgggaggctctgcagtcgcgcctggggtcagggccgggggcgaatgtggctcgcgttctaggcctccctgggtgagaaagtggtagactggcaggaaggcggcggaggcggacgagaccaatgccagcctggaggaggaagtgggccaatgggaagggttggaaaaagactatgttagcaagtgtcacgccatgcttttgccaactttccaattaaaggttgacattcctgcataagcatttctctgtgaaaatgtccttgcctcttacagaggagcagaggaaaaagattgaagagaatcgacaaaaggctctggcccgcagagctgagaagttattggcagaacagcatcagaggactagctcgggcacctccattgctggcaacccattccaggccaagcaaggcccatcccaaaatttcccaagggagtcttgtaagccagtgagccatggtgtcattttcaagcaacagaatctcagtagctcatctaatgctgaccaaagacctcatgattcccacagttttcaggcaaagggaatatggaaaaagccagaagaaatgcccacagcctgcccaggccacagtccacgtagtcaaatggctctcactggaatctctcctcccttggcacaaagtcctc

SEQ ID NO: 30534 - DNA, 6375 bp, Homo sapiens
  source 1..6375: mol_type = unassigned DNA
ggctgggcggggccgggaagcggcagtggcggctacgcgcgcgggggtgcgcgcgggaacgaccgggaaacaccgcgagggccggggtgggccaggctgtggggacgacgggctgcgacgatggccgcagcggcgggcggcggcgggccggggacagcggtaggcgccacgggctcggggattgcggcggcagccgcaggcctagctgtttatcgacggaaggatgggggcccggccaccaagttttgggagagcccggagacggtgtcccagctggattcggtgcgggtctggctgggcaagcactacaagaagtatgttcatgcggatgctcctaccaataaaacactggctgggctggtggtgcagcttcttcagttccaggaagatgcctttgggaagcatgtcaccaacccggccttcaccaaactccctgcaaagtgtttcatggatttcaaagctggaggcgccttatgtcacattcttggggctgcttacaagtataaaaatgaacagggatggcggaggtttgacctacagaacccatctcgaatggatcgtaatgtggaaatgtttatgaacattgaaaaaacattggtgcagaacaattgtttgaccagacccaacatctacctcattccagacattgatctgaagttggctaacaaattgaaagatatcatcaaacgacatcagggaacatttacggatgagaagtcaaaagcttcccaccacatttacccatattcttcctcacaagacgatgaagaatggttgagaccggtgatgagaaaagagaagcaagtgttagtgcattggggcttttacccagacagctatgatacttgggtccatagtaatgatgttgatgctgaaattgaagatccaccaattccagaaaaaccatggaaggttcatgtgaaatggattttggacactgatattttcaatgaatggatgaatgaggaggattatgaggtggatgaaaataggaagcctgtgagttttcgtcagcggatttcaaccaagaatgaagagccagtcagaagtccagaaagaagagatagaaaagcatcagctaatgctcgaaagaggaaacattcgccttcgcctccccctccgacaccaacagaatcacggaagaagagtgggaagaaaggccaagctagcctttatgggaagcgcagaagtcagaaagaggaagatgagcaagaagatctaaccaaggatatggaagacccaacacctgtacccaatatagaagaagtagtacttcccaaaaatgtgaacctaaagaaagatagtgaaaatacacctgttaaaggaggaactgtagcggatctagatgagcaggatgaagaaacagtcacagcaggaggaaaggaagatgaagatcctgccaaaggtgatcagagtcgatcagttgaccttggggaagataatgtgacagagcagaccaatcacattattattcctagttatgcatcatggtttgattataactgtattcatgtgattgaacggcgtgctcttcctgagttcttcaatggaaaaaacaaatccaagactccagaaatatacttggcatatcgaaattttatgattgacacgtatcgtctaaacccccaagagtatttaactagcactgcttgtcggaggaacttgactggagatgtgtgtgctgtgatgagggtccatgcctttttagagcagtggggactcgttaattaccaagttgacccggaaagtagacccatggcaatgggacctcctcctactcctcattttaatgtattagctgataccccctctgggcttgtgcctctgcatcttcgatcacctcaggttcctgctgctcaacagatgctaaattttcctgagaaaaacaaggaaaaaccagttgatttgcagaactttggtctccgtactgacatttactccaagaaaacattagcaaagagtaaaggtgctagtgctggaagagaatggactgaacaggagacccttctactcctggaggccctggagatgtacaaggatgattggaacaaagtgtcggaacatgttggaagtcgtactcaggatgaatgcatcctccactttttgagacttcccattgaggacccataccttgagaattcagatgcttcccttgggcctttggcctaccagcctgtccccttcagtcagtcaggaaatccagttatgagtactgttgcttttttggcatctgtggtggaccctcgcgtggcatctgctgcagcaaaagcggctttggaggagttttctcgggtccgggaggaggtaccactggaattggttgaagctcatgtcaagaaagtacaagaagcagcacgagcctctgggaaagtggatcccacctacggtctggagagcagctgcattgcaggcacagggcccgatgagccagagaagcttgaaggagctgaagaggaaaaaatggaagccgaccctgatggtcagcagcctgaaaaggcagaaaataaagtggaaaatgaaacggatgaaggtgataaagcacaagatggagaaaatgaaaaaaatagtgaaaaggaacaggatagtgaagtgagtgaggataccaaatcagaagaaaaggagactgaagagaacaaagaactcactgatacatgtaaagaaagagaaagtgatactgggaagaagaaagtagaacatgaaatttccgaaggaaatgttgccacagccgcagcagctgctcttgcctcagcggctaccaaagccaagcacctggctgcagtggaagaaagaaagatcaagtccctggtagctctcttggttgagacacaaatgaagaaactagagatcaaacttcgacattttgaagagctggaaactatcatggacagagagaaagaagctctagaacaacagaggcagcagttgcttactgaacgccaaaacttccacatggaacagctgaagtatgctgaattacgagcacgacagcaaatggaacagcagcagcatggccagaaccctcaacaggcacaccagcactcaggaggacctggcctggccccacttggagcagcagggcaccctggcatgatgcctcatcaacagccccctccctaccctctgatgcaccaccagatgccaccacctcatccaccccagccaggtcagataccaggcccaggttccatgatgcccgggcagcacatgccaggccgcatgattcccactgttgcagccaacatccacccctctgggagtggccctacccctcctggcatgccaccaatgccaggaaacatcttaggaccccgggtacccctgacagcacctaacggcatgtatccccctccaccacagcagcagccaccgccaccaccacctgcagatggggtccctccgcctcctgctcctggcccgccagcctcagctgctccttagcctggaagatgcagggaacctccacgcccaccaccatgagctggagtggggatgacaagacttgtgttcctcaactttcttgggtttctttcaggatttttcttctcacagctccaagcacgtgtcccgtgcctccccactcctcttaccacccctctctctgacactttttgtgttgggtcctcagccaacactcaaggggaaacctgtagtgacagtgtgccctggtcatccttaaaataacctgcatctcccctgtcctggtgtgggagtaagctgacagtttctctgcaggtcctgtcaactttagcatgctatgtctttaccatttttgctctcttgcagttttttgctttgtcttatgcttctatggataatgctatataatcattatctttttatctttctgttattattgttttaaaggagagcatcctaagttaataggaaccaaaaaataatgatgggcagaagggggggaatagccacaggggacaaaccttaaggcattataagtgaccttatttctgcttttctgagctaagaatggtgctgatggtaaagtttgagacttttgccacacacaaatttgtgaaaattaaacgagatgtggaaggagaacctcagtgattttattccctagtgaggcctctgagggcctccacactgcctggcagaacataccactgaactagtatgtgctagaggagggcacaaacatccgctccttccctaggcctgctggctctggttttctatgcagatgattcattggattgggggtgagtgttttgtttttctgggggcagtgtgagctttgagggttggaatattgggaggcattccttagtttcctcaactagcctggaaagttaggagtctagggtaattacccccaatgagtctagcctactattcactgctttgtgtgcatttttttctccctctttaaaaaaccctttaaaagaaaaaaaaaagtagatagtgctaaatattttagctcatgaaacttggttaggatggctgggggtacaagtccccaaactacctcttgttacagtagccagggagtggaatttcgtcaaccggtacttttaaggttaggatgggacgggaaaagtgaagcaggatattagctccttataccttctcccttccatttctgagatctcacattccatctatcacagggttttcaaagagatgctgagggtaacaaggaactcacttggcagtcagagcatcatgctttgaggtttggggtgctcaggctgggagggtagaatgccattccagaggacaagccacaaaaatgccttaatttgagctcgtatttacccctgctgataagtgacttgagagttcccggttttttcctcttgtccttccctcccttctgtccttccatgtgtggggaaagggtgtttttggtagagcttggtttccaaagcgcctggctttctcacttcacattctcaagtggcagtttcattatttagaatgcaaggtggacatcttttggatatctttttctatatattttctaaagctttacatatgagagggtatagggaggtgtttataaaacacttgagaacttttttccttaatatcagaaagcaaaaaaataaaaccacaattgagatttgcctttcaaaccctcaggtttgcctctaaccaggtgtccctggtcaccatcagagtactggaatacgggaaccgaggagaccttggtccttttgtttttgttctggactcttgggagtggaaatgagaatgagtttattcctactggagcttagttccaatgcatttggctccagaaagaccccagtgccttttgacaatggccagggttttacctacttcctgccagtctttcccaaaggaaactcattccaaatacttcttttttcccctggagtccgagaaggaaaatggaattctggttcatactgtggtcccttgtaacctcaggtctttaatgtgatcactttcaaatttaaaagatccaggtggaaatatttttactatagtaataattctacaaaatacctgaattcttaacactgttatatttcagtataagtggtggctttttcttttcatgtctttgatctggttttattcctgtaattcagccacctgattttgtgaggggggggaataatatgtggtttttgtacaaacatgtttctcagtgtgttgttattttggaaaaaatgaggggagggagtttggcaagaatggagaaaatgaatgaagaaggcctaatctctctctttttcagtgaataaatggaacaccatttctggattctagtcccattctctgcattcatacaccagtttcttcatatatcctatgaagaacctaaacatttggccccacctggtcttggtttgatcagcagttaaaattctgtgactcgggcttccttcccgactgcccaccttcatgatgtgtaaggaacatacattttgagggtacctcacccactgttcatttgcatggtcaaagtgaaaatgagtggaagttctccaaaaatgatggccaacatcctggcacctccaggtgtgagaaatagctttgcttggtgaatgggataatgtttgtcaggatgcagtttagacagtcccaagttggaggcaggccttgagggcagaagattctgtgaaccttgggggacagcttttgggtactcacagatataaaccctgtgcagaaaaaaagaagtgattgttttcaggatgcttataaatcgagtgaagcaaaagaagaggattctgtgtctgccatgagatgaacgccctgctcttcacgaaggtgtgcctctaataaagagagccaaagccagctgggtctcaccagattcctatactttctcaaggatgttgggggaggttaatcctttatcgaaactaaagactggtttat

SEQ ID NO: 30535 - DNA, 4076 bp, Homo sapiens
  source 1..4076: mol_type = unassigned DNA
gcggcgggaggcgggcggaggaggaggcggaggaggcgggagctgagctgagtggggcgggcggcggcggggcccgagccggagaagatggcggtgcggaagaaggacggcggccccaacgtgaagtactacgaggccgcggacaccgtgacccagttcgacaacgtgcggctgtggctcggcaagaactacaagaagtatatacaagctgaaccacccaccaacaagtccctgtctagcctggttgtacagttgctacaatttcaggaagaagtttttggcaaacatgtcagcaatgcaccgctcactaaactgccgatcaaatgtttcctagatttcaaagcgggaggctccttgtgccacattcttgcagctgcctacaaattcaagagtgaccagggatggcggcgttacgatttccagaatccatcacgcatggaccgcaatgtggaaatgtttatgaccattgagaagtccttggtgcagaataattgcctgtctcgacctaacatttttctgtgcccagaaattgagcccaaactactagggaaattaaaggacattatcaagagacaccagggaacagtcactgaggataagaacaatgcctcccatgttgtgtatcctgtcccggggaatctagaagaagaggaatgggtacgaccagtcatgaagagggataagcaggttcttctgcactggggctactatcctgacagttacgacacgtggatcccagcgagtgaaattgaggcatctgtggaagatgctccaactcctgagaaacctaggaaggttcatgcaaagtggatcctggacaccgacaccttcaatgaatggatgaatgaggaagactatgaagtaaatgatgacaaaaaccctgtctcccgccgaaagaagatttcagccaagacactgacagatgaggtgaacagcccagattcagatcgacgggacaagaaggggggaaactataagaagaggaagcgctccccctctccttcaccaaccccagaagcaaagaagaaaaatgctaagaaaggtccctcaacaccttacactaagtcaaagcgtggccacagagaagaggagcaagaagacctgacaaaggacatggacgagccctcaccagtccccaatgtagaagaggtgacacttcccaaaacagtcaacacaaagaaagactcagagtcggccccagtcaaaggcggcaccatgaccgacctggatgaacaggaagatgaaagcatggagacgacgggcaaggatgaggatgagaacagtacggggaacaagggagagcagaccaagaatccagacctgcatgaggacaatgtgactgaacagacccaccacatcatcattcccagctacgctgcctggtttgactacaatagtgttcatgccattgagcggagggctctccccgagttcttcaacggcaagaacaagtccaagactccagagatctacctggcctatcgaaactttatgattgacacttaccgactgaacccccaagagtatcttacctctaccgcctgccgccgaaacctagcgggtgatgtctgtgccatcatgagggtccatgccttcctagaacagtggggtcttattaactaccaggtggatgctgagagtcgaccaaccccaatggggcctccgcctacctctcacttccatgtcttggctgacacaccatcagggctggtgcctctgcagcccaagacacctcagcagacctctgcttcccaacaaatgctcaactttcctgacaaaggcaaagagaaaccaacagacatgcaaaactttgggctgcgcacagacatgtacacaaaaaagaatgttccctccaagagcaaggctgcagccagtgccactcgtgagtggacagaacaggaaaccctgcttctcctggaggcactggaaatgtacaaagatgactggaacaaagtgtccgagcatgtgggaagccgcacacaggacgagtgcatcttgcattttcttcgtcttcccattgaagacccatacctggaggactcagaggcctccctaggccccctggcctaccaacccatccccttcagtcagtcgggcaaccctgttatgagcactgttgccttcctggcctctgtcgtcgatccccgagtcgcctctgctgctgcaaagtcagccctagaggagttctccaaaatgaaggaagaggtacccacggccttggtggaggcccatgttcgaaaagtggaagaagcagccaaagtaacaggcaaggcggaccctgccttcggtctggaaagcagtggcattgcaggaaccacctctgatgagcctgagcggattgaggagagcgggaatgacgaggctcgggtggaaggccaggccacagatgagaagaaggagcccaaggaaccccgagaaggagggggtgctatagaggaggaagcaaaagagaaaaccagcgaggctcccaagaaggatgaggagaaagggaaagaaggcgacagtgagaaggagtccgagaagagtgatggagacccaatagtcgatcctgagaaggagaaggagccaaaggaagggcaggaggaagtgctgaaggaagtggtggagtctgagggggaaaggaagacaaaggtggagcgggacattggcgagggcaacctctccaccgctgctgccgccgccctggccgccgccgcagtgaaagctaagcacttggctgctgttgaggaaaggaagatcaaatctttggtggccctgctggtggagacccagatgaaaaagttggagatcaaacttcggcactttgaggagctggagactatcatggaccgggagcgagaagcactggagtatcagaggcagcagctcctggccgacagacaagccttccacatggagcagctgaagtatgcggagatgagggctcggcagcagcacttccaacagatgcaccaacagcagcagcagccaccaccagccctgcccccaggctcccagcctatccccccaacaggggctgctgggccacccgcagtccatggcttggctgtggctccagcctctgtagtccctgctcctgctggcagtggggcccctccaggaagtttgggcccttctgaacagattgggcaggcagggtcaactgcagggccacagcagcagcaaccagctggagccccccagcctggggcagtcccaccaggggttcccccccctggaccccatggcccctcaccgttccccaaccaacaaactcctccctcaatgatgccaggggcagtgccaggcagcgggcacccaggcgtggcgggtaatgctcctttgggtttgccttttggcatgccgcctcctcctcctcctcctgctccatccatcatcccatttggtagtctagctgactccatcagtattaacctccccgctcctcctaacctgcatgggcatcaccaccatctcccgttcgccccgggcactctccccccacctaacctgcctgtgtccatggcgaaccctctacatcctaacctgccggcgaccaccaccatgccatcttccttgcctctcgggccggggctcggatccgccgcagcccaaagccctgccattgtggcagctgttcagggcaacctcctgcccagtgccagcccactgccagacccaggcacccccctgcctccagaccccacagccccgagcccaggcacggtcacccctgtgccacctccacagtgaggagccagccagacatctctccccctcaccccctgtggacatcacggttccaggaacagcccttcccccaccactgggaccctccccagcctggagagttcatcactacgtaaggaaagctccttccgcccctccaaagccctcaccatgcctaacagaggcatgcatttttatatcagattattcaaggacttctgtttaaaagatgtttataatgtctgggagagaggataggatgggaatgctgccctaaaggaagggctggtgaaaggtgtttatacaaggttctattaaccacttctaagggtacacctccctccaaactactgcattttctatggatt

SEQ ID NO: 30536 - DNA, 3839 bp, Homo sapiens
  source 1..3839: mol_type = unassigned DNA
gcggcgggaggcgggcggaggaggaggcggaggaggcgggagctgagctgagtggggcgggcggcggcggggcccgagccggagaagatggcggtgcggaagaaggacggcggccccaacgtgaagtactacgaggccgcggacaccgtgacccagttcgacaacgtgcggctgtggctcggcaagaactacaagaagtatatacaagctgaaccacccaccaacaagtccctgtctagcctggttgtacagttgctacaatttcaggaagaagtttttggcaaacatgtcagcaatgcaccgctcactaaactgccgatcaaatgtttcctagatttcaaagcgggaggctccttgtgccacattcttgcagctgcctacaaattcaagagtgaccagggatggcggcgttacgatttccagaatccatcacgcatggaccgcaatgtggaaatgtttatgaccattgagaagtccttggtgcagaataattgcctgtctcgacctaacatttttctgtgcccagaaattgagcccaaactactagggaaattaaaggacattatcaagagacaccagggaacagtcactgaggataagaacaatgcctcccatgttgtgtatcctgtcccggggaatctagaagaagaggaatgggtacgaccagtcatgaagagggataagcaggttcttctgcactggggctactatcctgacagttacgacacgtggatcccagcgagtgaaattgaggcatctgtggaagatgctccaactcctgagaaacctaggaaggttcatgcaaagtggatcctggacaccgacaccttcaatgaatggatgaatgaggaagactatgaagtaaatgatgacaaaaaccctgtctcccgccgaaagaagatttcagccaagacactgacagatgaggtgaacagcccagattcagatcgacgggacaagaaggggggaaactataagaagaggaagcgctccccctctccttcaccaaccccagaagcaaagaagaaaaatgctaagaaaggtccctcaacaccttacactaagtcaaagcgtggccacagagaagaggagcaagaagacctgacaaaggacatggacgagccctcaccagtccccaatgtagaagaggtgacacttcccaaaacagtcaacacaaagaaagactcagagtcggccccagtcaaaggcggcaccatgaccgacctggatgaacaggaagatgaaagcatggagacgacgggcaaggatgaggatgagaacagtacggggaacaagggagagcagaccaagaatccagacctgcatgaggacaatgtgactgaacagacccaccacatcatcattcccagctacgctgcctggtttgactacaatagtgttcatgccattgagcggagggctctccccgagttcttcaacggcaagaacaagtccaagactccagagatctacctggcctatcgaaactttatgattgacacttaccgactgaacccccaagagtatcttacctctaccgcctgccgccgaaacctagcgggtgatgtctgtgccatcatgagggtccatgccttcctagaacagtggggtcttattaactaccaggtggatgctgagagtcgaccaaccccaatggggcctccgcctacctctcacttccatgtcttggctgacacaccatcagggctggtgcctctgcagcccaagacacctcagggccgccaggttgatgctgataccaaggctgggcgaaagggcaaagagctggatgacctggtgccagagacggctaagggcaagccagagctgcagacctctgcttcccaacaaatgctcaactttcctgacaaaggcaaagagaaaccaacagacatgcaaaactttgggctgcgcacagacatgtacacaaaaaagaatgttccctccaagagcaaggctgcagccagtgccactcgtgagtggacagaacaggaaaccctgcttctcctggaggcactggaaatgtacaaagatgactggaacaaagtgtccgagcatgtgggaagccgcacacaggacgagtgcatcttgcattttcttcgtcttcccattgaagacccatacctggaggactcagaggcctccctaggccccctggcctaccaacccatccccttcagtcagtcgggcaaccctgttatgagcactgttgccttcctggcctctgtcgtcgatccccgagtcgcctctgctgctgcaaagtcagccctagaggagttctccaaaatgaaggaagaggtacccacggccttggtggaggcccatgttcgaaaagtggaagaagcagccaaagtaacaggcaaggcggaccctgccttcggtctggaaagcagtggcattgcaggaaccacctctgatgagcctgagcggattgaggagagcgggaatgacgaggctcgggtggaaggccaggccacagatgagaagaaggagcccaaggaaccccgagaaggagggggtgctatagaggaggaagcaaaagagaaaaccagcgaggctcccaagaaggatgaggagaaagggaaagaaggcgacagtgagaaggagtccgagaagagtgatggagacccaatagtcgatcctgagaaggagaaggagccaaaggaagggcaggaggaagtgctgaaggaagtggtggagtctgagggggaaaggaagacaaaggtggagcgggacattggcgagggcaacctctccaccgctgctgccgccgccctggccgccgccgcagtgaaagctaagcacttggctgctgttgaggaaaggaagatcaaatctttggtggccctgctggtggagacccagatgaaaaagttggagatcaaacttcggcactttgaggagctggagactatcatggaccgggagcgagaagcactggagtatcagaggcagcagctcctggccgacagacaagccttccacatggagcagctgaagtatgcggagatgagggctcggcagcagcacttccaacagatgcaccaacagcagcagcagccaccaccagccctgcccccaggctcccagcctatccccccaacaggggctgctgggccacccgcagtccatggcttggctgtggctccagcctctgtagtccctgctcctgctggcagtggggcccctccaggaagtttgggcccttctgaacagattgggcaggcagggtcaactgcagggccacagcagcagcaaccagctggagccccccagcctggggcagtcccaccaggggttcccccccctggaccccatggcccctcaccgttccccaaccaacaaactcctccctcaatgatgccaggggcagtgccaggcagcgggcacccaggcgtggcggacccaggcacccccctgcctccagaccccacagccccgagcccaggcacggtcacccctgtgccacctccacagtgaggagccagccagacatctctccccctcaccccctgtggacatcacggttccaggaacagcccttcccccaccactgggaccctccccagcctggagagttcatcactacgtaaggaaagctccttccgcccctccaaagccctcaccatgcctaacagaggcatgcatttttatatcagattattcaaggacttctgtttaaaagatgtttataatgtctgggagagaggataggatgggaatgctgccctaaaggaagggctggtgaaaggtgtttatacaaggttctattaaccacttctaagggtacacctccctccaaactactgcattttctatggattaaaaaaaaaaaaaaa

SEQ ID NO: 30537 - DNA, 4271 bp, Homo sapiens
  source 1..4271: mol_type = unassigned DNA
gcggccgcggcggcgggaggcggcgggaggcgggcggaggaggaggcggaggaggcgggagctgagctgagtggggcgggcggcggcggggcccgagccggagaagatggcggtgcggaagaaggacggcggccccaacgtgaagtactacgaggccgcggacaccgtgacccagttcgacaacgtgcggctgtggctcggcaagaactacaagaagtatatacaagctgaaccacccaccaacaagtccctgtctagcctggttgtacagttgctacaatttcaggaagaagtttttggcaaacatgtcagcaatgcaccgctcactaaactgccgatcaaatgtttcctagatttcaaagcgggaggctccttgtgccacattcttgcagctgcctacaaattcaagagtgaccagggatggcggcgttacgatttccagaatccatcacgcatggaccgcaatgtggaaatgtttatgaccattgagaagtccttggtgcagaataattgcctgtctcgacctaacatttttctgtgcccagaaattgagcccaaactactagggaaattaaaggacattatcaagagacaccagggaacagtcactgaggataagaacaatgcctcccatgttgtgtatcctgtcccggggaatctagaagaagaggaatgggtacgaccagtcatgaagagggataagcaggttcttctgcactggggctactatcctgacagttacgacacgtggatcccagcgagtgaaattgaggcatctgtggaagatgctccaactcctgagaaacctaggaaggttcatgcaaagtggatcctggacaccgacaccttcaatgaatggatgaatgaggaagactatgaagtaaatgatgacaaaaaccctgtctcccgccgaaagaagatttcagccaagacactgacagatgaggtgaacagcccagattcagatcgacgggacaagaaggggggaaactataagaagaggaagcgctccccctctccttcaccaaccccagaagcaaagaagaaaaatgctaagaaaggtccctcaacaccttacactaagtcaaagcgtggccacagagaagaggagcaagaagacctgacaaaggacatggacgagccctcaccagtccccaatgtagaagaggtgacacttcccaaaacagtcaacacaaagaaagactcagagtcggccccagtcaaaggcggcaccatgaccgacctggatgaacaggaagatgaaagcatggagacgacgggcaaggatgaggatgagaacagtacggggaacaagggagagcagaccaagaatccagacctgcatgaggacaatgtgactgaacagacccaccacatcatcattcccagctacgctgcctggtttgactacaatagtgttcatgccattgagcggagggctctccccgagttcttcaacggcaagaacaagtccaagactccagagatctacctggcctatcgaaactttatgattgacacttaccgactgaacccccaagagtatcttacctctaccgcctgccgccgaaacctagcgggtgatgtctgtgccatcatgagggtccatgccttcctagaacagtggggtcttattaactaccaggtggatgctgagagtcgaccaaccccaatggggcctccgcctacctctcacttccatgtcttggctgacacaccatcagggctggtgcctctgcagcccaagacacctcagggccgccaggttgatgctgataccaaggctgggcgaaagggcaaagagctggatgacctggtgccagagacggctaagggcaagccagagctgcagacctctgcttcccaacaaatgctcaactttcctgacaaaggcaaagagaaaccaacagacatgcaaaactttgggctgcgcacagacatgtacacaaaaaagaatgttccctccaagagcaaggctgcagccagtgccactcgtgagtggacagaacaggaaaccctgcttctcctggaggcactggaaatgtacaaagatgactggaacaaagtgtccgagcatgtgggaagccgcacacaggacgagtgcatcttgcattttcttcgtcttcccattgaagacccatacctggaggactcagaggcctccctaggccccctggcctaccaacccatccccttcagtcagtcgggcaaccctgttatgagcactgttgccttcctggcctctgtcgtcgatccccgagtcgcctctgctgctgcaaagtcagccctagaggagttctccaaaatgaaggaagaggtacccacggccttggtggaggcccatgttcgaaaagtggaagaagcagccaaagtaacaggcaaggcggaccctgccttcggtctggaaagcagtggcattgcaggaaccacctctgatgagcctgagcggattgaggagagcgggaatgacgaggctcgggtggaaggccaggccacagatgagaagaaggagcccaaggaaccccgagaaggagggggtgctatagaggaggaagcaaaagagaaaaccagcgaggctcccaagaaggatgaggagaaagggaaagaaggcgacagtgagaaggagtccgagaagagtgatggagacccaatagtcgatcctgagaaggagaaggagccaaaggaagggcaggaggaagtgctgaaggaagtggtggagtctgagggggaaaggaagacaaaggtggagcgggacattggcgagggcaacctctccaccgctgctgccgccgccctggccgccgccgcagtgaaagctaagcacttggctgctgttgaggaaaggaagatcaaatctttggtggccctgctggtggagacccagatgaaaaagttggagatcaaacttcggcactttgaggagctggagactatcatggaccgggagcgagaagcactggagtatcagaggcagcagctcctggccgacagacaagccttccacatggagcagctgaagtatgcggagatgagggctcggcagcagcacttccaacagatgcaccaacagcagcagcagccaccaccagccctgcccccaggctcccagcctatccccccaacaggggctgctgggccacccgcagtccatggcttggctgtggctccagcctctgtagtccctgctcctgctggcagtggggcccctccaggaagtttgggcccttctgaacagattgggcaggcagggtcaactgcagggccacagcagcagcaaccagctggagccccccagcctggggcagtcccaccaggggttcccccccctggaccccatggcccctcaccgttccccaaccaacaaactcctccctcaatgatgccaggggcagtgccaggcagcgggcacccaggcgtggcggcccaaagccctgccattgtggcagctgttcagggcaacctcctgcccagtgccagcccactgccagacccaggcacccccctgcctccagaccccacagccccgagcccaggcacggtcacccctgtgccacctccacagtgaggagccagccagacatctctccccctcaccccctgtggacatcacggttccaggaacagcccttcccccaccactgggaccctccccagcctggagagttcatcactacgtaaggaaagctccttccgcccctccaaagccctcaccatgcctaacagaggcatgcatttttatatcagattattcaaggacttctgtttaaaagatgtttataatgtctgggagagaggataggatgggaatgctgccctaaaggaagggctggtgaaaggtgtttatacaaggttctattaaccacttctaagggtacacctccctccaaactactgcattttctatggattaaaaaaaaaaaaaaaaagtagattttaaaaagccacattggagctcccttctacccactaaaaaataaccaatttttacattttttgagggggagtgagttttaggaaaggggaattaagattccagggagagctctggggatagaacagggcgcagattccatctctccccaagcccctttttagtgactaagtcaaggccccaactcccctcccccaccctacgctgagcttattcgagttcattcgtactaataatccctcctgcggcttcctcattgttgctgttttaggccaccccagctcagccaatgattcctttccctctgaatgtcagttttgtttttaaaagtcacttgctt

SEQ ID NO: 30538 - DNA, 3237 bp, Homo sapiens
  source 1..3237: mol_type = unassigned DNA
agcacgccttttccgctagtcgccccgctctatcccatagtctcgctgccctgagcctcccgtgccggccggccggccgggggaacaggcgggcgctcggggggcgctcggggggcggggggagttccggttccggttctttgtgcggctgcatcggcggctccgggaagatggcggcccgggcgggtttccagtctgtggctccaagcggcggcgccggagcctcaggaggggcgggcgcggctgctgccttgggcccgggcggaactccggggcctcctgtgcgaatgggcccggctccgggtcaagggctgtaccgctccccgatgcccggagcggcctatccgagaccaggtatgttgccaggcagccgaatgacacctcagggaccttccatgggaccccctggctatggggggaacccttcagtccgacctggcctggcccagtcagggatggatcagtcccgcaagagacctgcccctcagcagatccagcaggtccagcagcaggcggtccaaaatcgaaaccacaatgcaaagaaaaagaagatggctgacaaaattctacctcaaaggattcgtgaactggtaccagaatcccaggcctatatggatctcttggcttttgaaaggaaactggaccagactatcatgaggaaacggctagatatccaagaggccttgaaacgtcccatcaagcaaaaacggaagctgcgaattttcatttctaacactttcaatccggctaagtcagatgccgaggatggggaagggacggtggcttcctgggagcttcgggtagaaggacggctcctggaggattcagccttgtccaaatatgatgccactaaacaaaagaggaagttctcttccttttttaagtccttggtgattgaactggacaaagacctgtatgggccagacaaccatctggtagaatggcacaggaccgccactacccaggagaccgatggctttcaggtgaagcggccgggagacgtgaatgtacggtgtactgtcctactgatgctggattaccagcctccccagtttaaattagacccccgcctagctcgactcctgggcatccatacccagactcgtccagtgatcatccaagcactgtggcaatatattaagacacataagctccaggaccctcacgagcgggagtttgtcatctgtgacaagtacctgcagcagatctttgagtctcaacgtatgaagttttcagagatccctcagcggctccatgccttgcttatgccaccagaacctatcatcattaatcatgtcatcagtgttgacccgaatgatcagaaaaagacagcttgttatgacattgatgttgaagtggatgacaccttgaagacccagatgaattcttttctgctgtccactgccagccaacaggagattgctactctagacaacaagacaatgactgatgtggtgggtaacccagaggaggagcgccgagctgagttctacttccagccctgggctcaggaggctgtgtgccgatacttctactccaaggtgcagcagagacgacaagaattagagcaagccctgggaatccggaatacatagggcctctcccacagccctgattcgactgcaccaattcttgatttgggccctgtgctgcctgcctcatagtatctgccttggtcttgcttggggcgttccaggggatgctgttggttcaaggacaacaccagaatgaagagggtctcacaagacacctgttatcctcttctttcaccctatctcttcccacccccagcttccctttgccccacaaagttcccatgtgcctgtaccctcccctggtctacataggacctctagatagtgttagagagagaacatgtagtggtaatgagtgcttggaatggattgggcctcaggccaggtggtcttcaaggggaccagctaactgatcctgcccttcagagacccaggagttgggagctttcgctccttctccaagactcaggcctgtgggcactctataagctagttgatcttggctctcctgataacagaatccaatttccttccttccctccacaggtttggaacaaactctcccttcacttgttgccctgtagcactacagaaaccctggttcttgggctccactgagccccaggtcagtccccagccctctgggttggcctgctgtcagtgcttctctcactccttagttggggtccacatcagtattggagttttgttctttattgctccctcccagacactccctgtggctgccctttgtgattccctcagatctgccctaatcccgggcatttgggtgggggaatcttgcctttccctttcagagccccagggatctcatctggggaactgtcattgccagcagaggctgttccttcctgctgtttggagatgtgactcattcattcactcactccaccctgcctctgcatcccttaatggagaaacgggcctaaaaccaaacgggtaaaaagccctgggccatccctgtcttcctgtcccttgtctgcccagttgacacctactggtgacttctagggcactgaggagtgaaagcgcctagggctggagaatagcgctgagttgggtttgtgactcttccctctccctgcctcacaggattgtgactccccagcccctgccctcaaagcttcagacccctcaggtagcagcaggaccttgtgatcttggccccttggatctgagatggtttttgcatctttccaggagagcctcacattcttcttccaggttgtatcacccccgagttagcatatcccaggctcgcagactcaacacagcaagggtgggagacagctgggcacaaagggggaattccgttcagcatgggctctaaacccacagaactgacaaagcccctgcttccccaccccctcctcaggctcctgcgagcacacccccacccccaaatccctccctgttctacactggggacagcagaattttctccccgtcttccccttcctgccattttccctcccttgaaaggttgacactggacaaccttggggcagctgagccctggccgcctcctggctggaaccatgagaaggaagctcagtacttcccacagtgtccctgttgataactgtttttattaactgaattgtttttttcatggaccaaacttttttttgtactgtccccttattgatgttacccagttttaataaaagaatcttctgaa

SEQ ID NO: 30539 - DNA, 3658 bp, Homo sapiens
  source 1..3658: mol_type = unassigned DNA
ttggaaagttaacgccatgcgccaagatgaagctattactccaagcccctcttcatcagagggctcgagttggggttgagactggggctgaggctgtggtccgtccccctttccaggtccttgtcttcctcccgtcggcctgggggcgcccgctcacgcggcctctctattgcagagctcttctctatggttttccctcccggaccgtgaaggcgggagggcgtggccagcacgccttttccgctagtcgccccgctctatcccatagtctcgctgccctgagcctcccgtgccggccggccggccgggggaacaggcgggcgctcggggggcgctcggggggcggggggagttccggttccggttctttgtgcggctgcatcggcggctccgggaagatggcggcccgggcgggtttccagtctgtggctccaagcggcggcgccggagcctcaggaggggcgggcgcggctgctgccttgggcccgggcggaactccggggcctcctgtgcgaatgggcccggctccgggtcaagggctgtaccgctccccgatgcccggagcggcctatccgagaccaggtatgttgccaggcagccgaatgacacctcagggaccttccatgggaccccctggctatggggggaacccttcagtccgacctggcctggcccagtcagggatggatcagtcccgcaagagacctgcccctcagcagatccagcaggtccagcagcaggcggtccaaaatcgaaaccacaatgcaaagaaaaagaagatggctgacaaaattctacctcaaaggattcgtgaactggtaccagaatcccaggcctatatggatctcttggcttttgaaaggaaactggaccagactatcatgaggaaacggctagatatccaagaggccttgaaacgtcccatcaagcaaaaacggaagctgcgaattttcatttctaacactttcaatccggctaagtcagatgccgaggatggggaagggacggtggcttcctgggagcttcgggtagaaggacggctcctggaggattcagccttgtccaaatatgatgccactaaacaaaagaggaagttctcttccttttttaagtccttggtgattgaactggacaaagacctgtatgggccagacaaccatctggtagaatggcacaggaccgccactacccaggagaccgatggctttcaggtgaagcggccgggagacgtgaatgtacggtgtactgtcctactgatgctggattaccagcctccccagtttaaattagacccccgcctagctcgactcctgggcatccatacccagactcgtccagtgatcatccaagcactgtggcaatatattaagacacataagctccaggaccctcacgagcgggagtttgtcatctgtgacaagtacctgcagcagatctttgagtctcaacgtatgaagttttcagagatccctcagcggctccatgccttgcttatgccaccagaacctatcatcattaatcatgtcatcagtgttgacccgaatgatcagaaaaagacagcttgttatgacattgatgttgaagtggatgacaccttgaagacccagatgaattcttttctgctgtccactgccagccaacaggagattgctactctagacaacaagatccatgagacaatagaaaccatcaaccagctgaagactcagcgggagttcatgctgagctttgccagagaccctcagggtttcatcaatgactggcttcagtcccagtgcagggacctcaagacaatgactgatgtggtgggtaacccagaggaggagcgccgagctgagttctacttccagccctgggctcaggaggctgtgtgccgatacttctactccaaggtgcagcagagacgacaagaattagagcaagccctgggaatccggaatacatagggcctctcccacagccctgattcgactgcaccaattcttgatttgggccctgtgctgcctgcctcatagtatctgccttggtcttgcttggggcgttccaggggatgctgttggttcaaggacaacaccagaatgaagagggtctcacaagacacctgttatcctcttctttcaccctatctcttcccacccccagcttccctttgccccacaaagttcccatgtgcctgtaccctcccctggtctacataggacctctagatagtgttagagagagaacatgtagtggtaatgagtgcttggaatggattgggcctcaggccaggtggtcttcaaggggaccagctaactgatcctgcccttcagagacccaggagttgggagctttcgctccttctccaagactcaggcctgtgggcactctataagctagttgatcttggctctcctgataacagaatccaatttccttccttccctccacaggtttggaacaaactctcccttcacttgttgccctgtagcactacagaaaccctggttcttgggctccactgagccccaggtcagtccccagccctctgggttggcctgctgtcagtgcttctctcactccttagttggggtccacatcagtattggagttttgttctttattgctccctcccagacactccctgtggctgccctttgtgattccctcagatctgccctaatcccgggcatttgggtgggggaatcttgcctttccctttcagagccccagggatctcatctggggaactgtcattgccagcagaggctgttccttcctgctgtttggagatgtgactcattcattcactcactccaccctgcctctgcatcccttaatggagaaacgggcctaaaaccaaacgggtaaaaagccctgggccatccctgtcttcctgtcccttgtctgcccagttgacacctactggtgacttctagggcactgaggagtgaaagcgcctagggctggagaatagcgctgagttgggtttgtgactcttccctctccctgcctcacaggattgtgactccccagcccctgccctcaaagcttcagacccctcaggtagcagcaggaccttgtgatcttggccccttggatctgagatggtttttgcatctttccaggagagcctcacattcttcttccaggttgtatcacccccgagttagcatatcccaggctcgcagactcaacacagcaagggtgggagacagctgggcacaaagggggaattccgttcagcatgggctctaaacccacagaactgacaaagcccctgcttccccaccccctcctcaggctcctgcgagcacacccccacccccaaatccctccctgttctacactggggacagcagaattttctccccgtcttccccttcctgccattttccctcccttgaaaggttgacactggacaaccttggggcagctgagccctggccgcctcctggctggaaccatgagaaggaagctcagtacttcccacagtgtccctgttgataactgtttttattaactgaattgtttttttcatggaccaaacttttttttgtactgtccccttattgatgttacccagttttaataaaagaatcttctgaaggatgggtcctcctacctactgtgagagagctcttccctgagctcttcttccttcaataccattagccac

SEQ ID NO: 30540 - DNA, 1757 bp, Homo sapiens
  source 1..1757: mol_type = unassigned DNA
tttgtgcggctgcatcggcggctccgggaagatggcggcccgggcgggtttccagtctgtggctccaagcggcggcgccggagcctcaggaggggctgtaccgctccccgatgcccggagcggcctatccgagaccaggtatgttgccaggcagccgaatgacacctcagggaccttccatgggaccccctggctatggggggaacccttcagtccgacctggcctggcccagtcagggatggatcagtcccgcaagagacctgcccctcagcagatccagcaggtccagcagcaggcggtccaaaatcgaaaccacaatgcaaagaaaaagaagatggctgacaaaattctacctcaaaggattcgtgaactggtaccagaatcccaggcctatatggatctcttggcttttgaaaggaaactggaccagactatcatgaggaaacggctagatatccaagaggccttgaaacgtcccatcaagtcagccttgtccaaatatgatgccactaaacaaaagaggaagttctcttccttttaagtccttggtgattgaactggacaaagacctgtatgggccagacaaccatctggtagaatggcacaggaccgccactacccaggagaccgatggctttcaggtgaagcggccgggagacgtgaatgtacggtgtactgtcctactgatgctggattaccagcctccccagtttaaattagacccccgcctagctcgactcctgggcatccatacccagactcgtccagtgatcatccaagcactgtggcaatatattaagacacataagctccaggaccctcacgagcgggagtttgtcatctgtgacaagtacctgcagcagatctttgagtctcaacgtatgaagttttcagagatccctcagcggctccatgccttgcttatgccaccagaacctatcatcattaatcatgtcatcagtgttgacccgaatgatcagaaaaagacagcttgttatgacattgatgttgaagtggatgacaccttgaagacccagatgaattcttttctgctgtccactgccagccaacaggagattgctactctagacaacaagatccatgagacaatagaaaccatcaaccagctgaagactcagcgggagttcatgctgagctttgccagagaccctcagggtttcatcaatgactggcttcagtcccagtgcagggacctcaagacaatgactgatgtggtgggtaacccagaggaggagcgccgagctgagttctacttccagccctgggctcaggaggctgtgtgccgatacttctactccaaggtgcagcagagacgacaagaattagagcaagccctgggaatccggaatacatagggcctctcccacagccctgattcgactgcaccaattcttgatttgggccctgtgctgcctgcctcatagtatctgccttggtcttgcttggggcgttccaggggatgctgttggttcaaggacaacaccagaatgaagagggtctcacaagacacctgttatcctcttctttcaccctatctcttcccacccccagcttccctttgccccacaaagttcccatgtgcctgtaccctcccctggtctacataggacctctagatagtgttagagagagaacatgtagtggtaatgagtgcttggaatggattgggcctcaggccaggtggtcttcaaggggaccagctaactgatcctgcccttcagagacccaggagttg

SEQ ID NO: 30541 - DNA, 2279 bp, Homo sapiens
  source 1..2279: mol_type = unassigned DNA
atgctgcccggaccggcgctccggggaccgggtccggcgcagtaccagcgacctggcatgtcaccagggaaccggatgcccatggctcttgcaggtgggaccccctgctggctccccatttggtgcagcagctccgcttcgacctggcatgccacccaccatgatggatccattccgaaaacgcctgcttgtgccccacagcctcccatgcctgcccagcgccgggggttaaagaggaggaagatggcagataaggttctacctcagcgaatccgggagcttgttccagagtctcaggcgtacatggatctcttggcttttgagcggaagctggaccagaccattgctcgcaagcggatggagatccaggaggccatcaaaaagcctctgacacaaaagcgaaagcttcggatctacatttccaatacgttcagtcccagcaaggcggaaggcgatagtgcaggaactgcagggacccctgggggaaccccagcaggggacaaggtggcttcctgggaactccgagtggaaggaaaactgctggatgatcctagcaaacagaagaggaagttttcttcattctttaagagcctcgtcattgagctggacaaggagctgtacgggcctgacaatcacctggtggagtggcaccggatgcccaccacccaggagacagatggcttccaagtaaaacggcctggagacctcaacgtcaagtgcaccctcctgctcatgctggatcatcagcctccccagtacaaattggacccccgattggcaaggctgctgggagtgcacacgcagacgagggccgccatcatgcaggccctgtggctttacatcaagcacaaccagctgcaggatgggcacgagcgggagtacatcaactgcaaccgttacttccgccagatcttcagttgtggccgactccgtttctccgagattcccatgaagctggcagggttgctgcagcatccagaccccattgtcatcaaccatgtcattagtgtcgaccctaacgaccagaagaagacagcctgttacgacatcgatgtggaggtggacgacccactgaaggcccaaatgagcaattttctggcctctaccaccaatcagcaggagatcgcctcccttgatgtcaagatccatgagaccattgagtccatcaaccagctgaagacccagagagatttcatgctcagttttagcaccgacccccaggacttcatccaggaatggctccgttcccagcgccgagacctcaagatcatcactgatgtgattggaaatcctgaggaggagagacgagctgctttctaccaccagccctgggcccaggaagcagtaggcaggcacatctttgccaaggtgcagcagcgaaggcaggaactggaacaggtgctgggaattcgcctgacctaactgctcagggatctttcttcccagccctggagcctggagggagaccaccctctgggtccttgctggggccgcagacacgtaggctggggtgaggagtgtctgctgtcaccctctactctccagctttagtcttataaatgtagtgataggattccttgttgcttggtccccaaagccttatactttttgcattggctttaattgggttcagcagatgcctcctctgcccccctgcaggcaggcccaagtaggactgctggaggctgtgctttgacattgtaagacatttccgaaccaaaggctgctgggtttgcatgtttacagactccccctggggcgagggtcagagctggctctggggagctgggctaggaagaggaggtgcagcccagactcttcctagcctttctaaaccaaagttctttgccattcctacaagcccagccttgctgctggttttttcctttcctttgggtatttgcactattttgggagcaagttttctatgtgggagccactttttttgtacaggggtaagttgggggttttcagggagcctgttaggtgcctccttcttttctttcctcaatctatgcaagcggctctggccgccatcatctcctgggatgccagagggctgcctctccagcggcttgggccggggaggggacactccagttctctagcatggcctgaggtatggggtatgtgcatgtggaggccagggtaaggtgaatggggaggctgggaggactggtgttgccctttggagcttggtgaggagggtgggcctagggcttggcgagtgccacatctggcaggtttggaaatttccaaataaatccttttgtctattg

SEQ ID NO: 30542 - DNA, 1935 bp, Homo sapiens
  source 1..1935: mol_type = unassigned DNA
agtgtgtgcaaggcagagctgccaaacaggccttgcaggcagcagccatggggaggcgggtgggggtggaggtgactcccagatgggctccacagaaatgtcagggagcaaggcctcagcgacctggcatgtcaccagggaaccggatgcccatggctggcttgcaggtgggaccccctgctggctccccatttggtgcagcagctccgcttcgacctggcatgccacccaccatgatggatccattccgaaaacgcctgcttgtgccccaggcgcagcctcccatgcctgcccagcgccgggggttaaagaggaggaagatggcagataaggttctacctcagcgaatccgggagcttgttccagagtctcaggcgtacatggatctcttggcttttgagcggaagctggaccagaccattgctcgcaagcggatggagatccaggaggccatcaaaaagcctctgacacaaaagcgaaagcttcggatctacatttccaatacgttcagtcccagcaaggcggaaggcgatagtgcaggaactgcagggacccctgggggaaccccagcaggggacaaggtggcttcctgggaactccgagtggaaggaaaactgctggatgatcctagcaaacagaagaggaagttttcttcattctttaagagcctcgtcattgagctggacaaggagctgtacgggcctgacaatcacctggtggagtggcaccggatgcccaccacccaggagacagatggcttccaagtaaaacggcctggagacctcaacgtcaagtgcaccctcctgctcatgctggatcatcagcctccccagtacaaattggacccccgattggcaaggctgctgggagtgcacacgcagacgagggccgccatcatgcaggccctgtggctttacatcaagcacaaccagctgcaggatgggcacgagcgggagtacatcaactgcaaccgttacttccgccagatcttcagttgtggccgactccgtttctccgagattcccatgaagctggcagggttgctgcagcatccagaccccattgtcatcaaccatgtcattagtgtcgaccctaacgaccagaagaagacagcctgttacgacatcgatgtggaggtggacgacccactgaaggcccaaatgagcaattttctggcctctaccaccaatcagcaggagatcgcctcccttgatgtcaagatccatgagaccattgagtccatcaaccagctgaagacccagagagatttcatgctcagttttagcaccgacccccaggacttcatccaggaatggctccgttcccagcgccgagacctcaagatcatcactgatgtgattggaaatcctgaggaggagagacgagctgctttctaccaccagccctgggcccaggaagcagtaggcaggcacatctttgccaaggtgcagcagcgaaggcaggaactggaacaggtgctgggaattcgcctgacctaactgctcagggatctttcttcccagccctggagcctggagggagaccaccctctgggtccttgctggggccgcagacacgtaggctggggtgaggagtgtctgctgtcaccctctactctccagctttagtcttataaatgtagtgataggattccttgttgcttggtccccaaagccttatactttttgcattggctttaattgggttcagcagatgcctcctctgcccccctgcaggcaggcccaagtaggactgctggaggctgtgctttgacattgtaagacatttccgaaccaaaggctgctgggtttgcatgtttacagactccccctggggcgagggtcagagctggctctggggagctgggctaggaagaggaggtgcagcccagactcttcctagcctttctaaaccaaagttctttgccattcctac

SEQ ID NO: 30543 - DNA, 2770 bp, Homo sapiens
  source 1..2770: mol_type = unassigned DNA
gttgggcggggcagggagttcgtagccgcctctgggtaactcgactcgggcggccaaacctccggaggccggggacggaaggcgggcccgcagcagatcctggatccggaatctcccgggcaggagcggaatctgtcccgaaccgggtctgtgaggaactcgcgaacttggattaggaaatcccggagcccggatcgacaaatcccggaacccggaattaagatcgccaagtcccggatcgcggagcacagagcacggagtggactcgacgcggagcccggagtccggatcgcggcaccgcgggacgggacggagcgatgtcgggccgaggcgcgggcgggttcccgctgcccccgctaagccctggcggcggcgccgtggctgcggccctgggagcgccgcctccccccgcgggacccggcatgctgcccggaccggcgctccggggaccgggtccggcaggaggcgtggggggccccggggccgccgccttccgccccatgggccccgcgggccccgcggcgcagtaccagcgacctggcatgtcaccagggaaccggatgcccatggctggcttgcaggtgggaccccctgctggctccccatttggtgcagcagctccgcttcgacctggcatgccacccaccatgatggatccattccgaaaacgcctgcttgtgccccaggcgcagcctcccatgcctgcccagcgccgggggttaaagaggaggaagatggcagataaggttctacctcagcgaatccgggagcttgttccagagtctcaggcgtacatggatctcttggcttttgagcggaagctggaccagaccattgctcgcaagcggatggagatccaggaggccatcaaaaagcctctgacacaaaagcgaaagcttcggatctacatttccaatacgttcagtcccagcaaggcggaaggcgatagtgcaggaactgcagggacccctgggggaaccccagcaggggacaaggtggcttcctgggaactccgagtggaaggaaaactgctggatgatcctagcaaacagaagaggaagttttcttcattctttaagagcctcgtcattgagctggacaaggagctgtacgggcctgacaatcacctggtggagtggcaccggatgcccaccacccaggagacagatggcttccaagtaaaacggcctggagacctcaacgtcaagtgcaccctcctgctcatgctggatcatcagcctccccagtacaaattggacccccgattggcaaggctgctgggagtgcacacgcagacgagggccgccatcatgcaggccctgtggctttacatcaagcacaaccagctgcaggatgggcacgagcgggagtacatcaactgcaaccgttacttccgccagatcttcagttgtggccgactccgtttctccgagattcccatgaagctggcagggttgctgcagcatccagaccccattgtcatcaaccatgtcattagtgtcgaccctaacgaccagaagaagacagcctgttacgacatcgatgtggaggtggacgacccactgaaggcccaaatgagcaattttctggcctctaccaccaatcagcaggagatcgcctcccttgatgtcaagatccatgagaccattgagtccatcaaccagctgaagacccagagagatttcatgctcagttttagcaccgacccccaggacttcatccaggaatggctccgttcccagcgccgagacctcaagatcatcactgatgtgattggaaatcctgaggaggagagacgagctgctttctaccaccagccctgggcccaggaagcagtaggcaggcacatctttgccaaggtgcagcagcgaaggcaggaactggaacaggtgctgggaattcgcctgacctaactgctcagggatctttcttcccagccctggagcctggagggagaccaccctctgggtccttgctggggccgcagacacgtaggctggggtgaggagtgtctgctgtcaccctctactctccagctttagtcttataaatgtagtgataggattccttgttgcttggtccccaaagccttatactttttgcattggctttaattgggttcagcagatgcctcctctgcccccctgcaggcaggcccaagtaggactgctggaggctgtgctttgacattgtaagacatttccgaaccaaaggctgctgggtttgcatgtttacagactccccctggggcgagggtcagagctggctctggggagctgggctaggaagaggaggtgcagcccagactcttcctagcctttctaaaccaaagttctttgccattcctacaagcccagccttgctgctggttttttcctttcctttgggtatttgcactattttgggagcaagttttctatgtgggagccactttttttgtacaggggtaagttgggggttttcagggagcctgttaggtgcctccttcttttctttcctcaatctatgcaagcggctctggccgccatcatctcctgggatgccagagggctgcctctccagcggcttgggccggggaggggacactccagttctctagcatggcctgaggtatggggtatgtgcatgtggaggccagggtaaggtgaatggggaggctgggaggactggtgttgccctttggagcttggtgaggagggtgggcctagggcttggcgagtgccacatctggcaggtttggaaatttccaaataaatccttttgtctattg

SEQ ID NO: 30544 - DNA, 2228 bp, Homo sapiens
  source 1..2228: mol_type = unassigned DNA
cgtagccgcctctgggtaactcgactcgggcggccaaacctccggaggccggggacggaaggcgggcccgcagcagatcctggatccggaatctcccgggcaggagcggaatctgtcccgaaccgggtctgtgaggaactcgcgaacttggattaggaaatcccggagcccggatcgacaaatcccggaacccggaattaagatcgccaagtcccggatcgcggagcacagagcacggagtggactcgacgcggagcccggagtccggatcgcggcaccgcgggacgggacggagcgatgtcgggccgaggcgcgggcgggttcccgctgcccccgctaagccctggcggcggcgccgccttccgccccatgggccccgcgggccccgcggcgcagtaccagcgacctggcatgtcaccagggaaccggatgcccatggctggcttgcaggtgggaccccctgctggctccccatttggtgcagcagctccgcttcgacctggcatgccacccaccatgatggatccattccgaaaacgcctgcttgtgccccaggcgcagcctcccatgcctgcccagcgccgggggttaaagaggaggaagatggcagataaggttctacctcagcgaatccgggagcttgttccagagtctcaggcgtacatggatctcttggcttttgagcggaagctggaccagaccattgctcgcaagcggatggagatccaggaggccatcaaaaagcctctgacacaaaagcgaaagcttcggatctacatttccaatacgttcagtcccagcaaggcggaaggcgatagtgcaggaactgcagggacccctgggggaaccccagcaggggacaaggtggcttcctgggaactccgagtggaaggaaaactgctggatgatcctagcaaacagaagaggaagttttcttcattctttaagagcctcgtcattgagctggacaaggagctgtacgggcctgacaatcacctggtggagtggcaccggatgcccaccacccaggagacagatggcttccaagtaaaacggcctggagacctcaacgtcaagtgcaccctcctgctcatgctggatcatcagcctccccagtacaaattggacccccgattggcaaggctgctgggagtgcacacgcagacgagggccgccatcatgcaggccctgtggctttacatcaagcacaaccagctgcaggatgggcacgagcgggagtacatcaactgcaaccgttacttccgccagatcttcagttgtggccgactccgtttctccgagattcccatgaagctggcagggttgctgcagcatccagaccccattgtcatcaaccatgtcattagtgtcgaccctaacgaccagaagaagacagcctgttacgacatcgatgtggaggtggacgacccactgaaggcccaaatgagcaattttctggcctctaccaccaatcagcaggagatcgcctcccttgatgtcaagatccatgagaccattgagtccatcaaccagctgaagacccagagagatttcatgctcagttttagcaccgacccccaggacttcatccaggaatggctccgttcccagcgccgagacctcaagatcatcactgatgtgattggaaatcctgaggaggagagacgagctgctttctaccaccagccctgggcccaggaagcagtaggcaggcacatctttgccaaggtgcagcagcgaaggcaggaactggaacaggtgctgggaattcgcctgacctaactgctcagggatctttcttcccagccctggagcctggagggagaccaccctctgggtccttgctggggccgcagacacgtaggctggggtgaggagtgtctgctgtcaccctctactctccagctttagtcttataaatgtagtgataggattccttgttgcttggtccccaaagccttatactttttgcattggctttaattgggttcagcagatgcctcctctgcccccctgcaggcaggcccaagtaggactgctggaggctgtgctttgacattgtaagacatttccgaaccaaaggctgctgggtttgcatgtttacagactccccctggggcgagggtcagagctggctctggggagctgggctaggaagaggaggtgcagcccagactcttcctagcctttctaaaccaaagttctttgccattcctacaagcccagcc

SEQ ID NO: 30545 - DNA, 1993 bp, Homo sapiens
  source 1..1993: mol_type = unassigned DNA
cgcgggcctcggcggcttcgggctgcagcactgctgcccagcgcccgcggccgggctggtcggcgcgcctcgccgcttatctgcgctgtttggacagcgggcttggaaaggcaggcggccccgtccccgccgagtcaacaggcagaccccgggccgccggactatttctgtcttatcagtgcaggaatgcggcagccgcggcggcggcggcggcggcgggcgggcggcggcggcgtgggccgtgggccgtcagggcagccctgaaggggccccctccccactccgctcgagtagaagtgtgagagagcccagcaggactcagaggggagagttggaggaaaaaaaaaggcagaaaagggaaagaaagaggaagagagagagagagtgagaggagccgctgagcccaccccgatggccgcggacgaagttgccggaggggcgcgcaaagccacgaaaagcaaactttttgagtttctggtccatggggtgcgccccgggatgccgtctggagcccggatgccccaccagggggcgcccatgggccccccgggctccccgtacatgggcagccccgccgtgcgacccggcctggcccccgcgggcatggagcccgcccgcaagcgagcagcgcccccgcccgggcagagccaggcacagagccagggccagccggtgcccaccgcccccgcgcggagccgcagtgccaagaggaggaagatggctgacaaaatcctccctcaaaggattcgggagctggtccccgagtcccaggcttacatggacctcttggcatttgagaggaaactggatcaaaccatcatgcggaagcgggtggacatccaggaggctctgaagaggcccatgaagcaaaagcggaagctgcgactctatatctccaacacttttaaccctgcgaagcctgatgctgaggattccgacggcagcattgcctcctgggagctacgggtggaggggaagctcctggatgatcccagcaaacagaagcggaagttctcttctttcttcaagagtttggtcatcgagctggacaaagatctttatggccctgacaaccacctcgttgagtggcatcggacacccacgacccaggagacggacggcttccaggtgaaacggcctggggacctgagtgtgcgctgcacgctgctcctcatgctggactaccagcctccccagttcaaactggatccccgcctagcccggctgctggggctgcacacacagagccgctcagccattgtccaggccctgtggcagtatgtgaagaccaacaggctgcaggactcccatgacaaggaatacatcaatggggacaagtatttccagcagatttttgattgtccccggctgaagttttctgagattccccagcgcctcacagccctgctattgccccctgacccaattgtcatcaaccatgtcatcagcgtggacccttcagaccagaagaagacggcgtgctatgacattgacgtggaggtggaggagccattaaaggggcagatgagcagcttcctcctatccacggccaaccagcaggagatcagtgctctggacagtaagatccatgagacgattgagtccataaaccagctcaagatccagagggacttcatgctaagcttctccagagaccccaaaggctatgtccaagacctgctccgctcccagagccgggacctcaaggtgatgacagatgtagccggcaaccctgaagaggagcgccgggctgagttctaccaccagccctggtcccaggaggccgtcagtcgctacttctactgcaagatccagcagcgcaggcaggagctggagcagtcgctggttgtgcgcaacacctaggagcccaaaaataagcagcacgacggaactttcagccgtgtcccgggccccagcattttgccccgggctccagcatcactcctctgccaccttggggtgtggggctggattaaaagtcattcatctgaca

SEQ ID NO: 30546 - DNA, 2216 bp, Homo sapiens
  source 1..2216: mol_type = unassigned DNA
actcccaagccccacctctgtcacccacaccccgctcctacagcactgctctcttcttagctcccatgccccaccgtctgctcagggacttcatttcataagttgggtcctgacccaacgagctggaggccttcctgctcttccagcaaggaaggaagcagggcaggacaggacagagcaggcactagcagggaccaggagggaggcgcctaggccagctggtagtcatggagcaggctgactacctgcctgccacctctggagtccctccatgcccctgggctccagggccatcccagttaccatcctgacctgccctctggcctttgcctccaatgcccagctctctccctccaaccattgccacacccccaaaactggcctctccagtcagggcttgggctctgcctggggtccctgctctgtctttcaagttctttgtcccgcaggaccctggggccggtctctgtctgcttcccacacatactgctcccacctgcgccctgccttgtgccaccccagccccagctggcccatgctggttgcctccatcctaggcccttttttctgcacagtgtcctggcttcctcagacctccactccggggagtttggcttcttcgcagcttcccgaggcctccttgaatctacgctggggctcagggtctgacctctcctttcagatcctcagaatggcccttggtgctgcaggcgcggtgggctccgggcccaggcaccgagggggcactggatgactctccaggtgcaggaccctgccatctatgactccaggtcttcagcacccacccaccgtggtacagcgccccgggatgccgtctggagcccggatgccccaccagggggcgcccatgggccccccgggctccccgtacatgggcagccccgccgcccccgcgcggagccgcagtgccaagaggaggaagatggctgacaaaatcctccctcaaaggattcgggagctggtccccgagtcccaggcttacatggacctcttggcatttgagaggaaactggatcaaaccatcatgcggaagcgggtggacatccaggaggctctgaagaggcccatgaagcaaaagcggaagctgcgactctatatctccaacacttttaaccctgcgaagcctgatgctgaggattccgacggcagcattgcctcctgggagctacgggtggaggggaagctcctggatgatcccagcaaacagaagcggaagttctcttctttcttcaagagtttggtcatcgagctggacaaagatctttatggccctgacaaccacctcgttgagtggcatcggacacccacgacccaggagacggacggcttccaggtgaaacggcctggggacctgagtgtgcgctgcacgctgctcctcatgctggactaccagcctccccagttcaaactggatccccgcctagcccggctgctggggctgcacacacagagccgctcagccattgtccaggccctgtggcagtatgtgaagaccaacaggctgcaggactcccatgacaaggaatacatcaatggggacaagtatttccagcagatttttgattgtccccggctgaagttttctgagattccccagcgcctcacagccctgctattgccccctgacccaattgtcatcaaccatgtcatcagcgtggacccttcagaccagaagaagacggcgtgctatgacattgacgtggaggtggaggagccattaaaggggcagatgagcagcttcctcctatccacggccaaccagcaggagatcagtgctctggacagtaagatccatgagacgattgagtccataaaccagctcaagatccagagggacttcatgctaagcttctccagagaccccaaaggctatgtccaagacctgctccgctcccagagccgggacctcaaggtgatgacagatgtagccggcaaccctgaagaggagcgccgggctgagttctaccaccagccctggtcccaggaggccgtcagtcgctacttctactgcaagatccagcagcgcaggcaggagctggagcagtcgctggttgtgcgcaacacctaggagcccaaaaataagcagcacgacggaactttcagccgtgtcccgggccccagcattttgccccgggctccagcatcactcctctgccaccttggggtgtggggctggattaaaagtcattcatctg

SEQ ID NO: 30547 - DNA, 1669 bp, Homo sapiens
  source 1..1669: mol_type = unassigned DNA
ctggcatcttcctcccctcctcctttccagatcctcagaatggcccttggtgctgcaggcgcggtgggctccgggcccaggcaccgagggggcactggatgactctccaggtgcaggaccctgccatctatgactccaggtcttcagcacccacccaccgtggtacagcgccccgggatgccgtctggagcccggatgccccaccagggggcgcccatgggccccccgggctccccgtacatgggcagccccgccgtgcgacccggcctggcccccgcgggcatggagcccgcccgcaagcgagcagcgcccccgcccgggcagagccaggcacagagccagggccagccggtgcccaccgcccccgcgcggagccgcagtgccaagaggaggaagatggctgacaaaatcctccctcaaaggattcgggagctggtccccgagtcccaggcttacatggacctcttggcatttgagaggaaactggatcaaaccatcatgcggaagcgggtggacatccaggaggctctgaagaggcccatgaagcaaaagcggaagctgcgactctatatctccaacacttttaaccctgcgaagcctgatgctgaggattccgacggcagcattgcctcctgggagctacgggtggaggggaagctcctggatgatcccagcaaacagaagcggaagttctcttctttcttcaagagtttggtcatcgagctggacaaagatctttatggccctgacaaccacctcgttgagtggcatcggacacccacgacccaggagacggacggcttccaggtgaaacggcctggggacctgagtgtgcgctgcacgctgctcctcatgctggactaccagcctccccagttcaaactggatccccgcctagcccggctgctggggctgcacacacagagccgctcagccattgtccaggccctgtggcagtatgtgaagaccaacaggctgcaggactcccatgacaaggaatacatcaatggggacaagtatttccagcagatttttgattgtccccggctgaagttttctgagattccccagcgcctcacagccctgctattgccccctgacccaattgtcatcaaccatgtcatcagcgtggacccttcagaccagaagaagacggcgtgctatgacattgacgtggaggtggaggagccattaaaggggcagatgagcagcttcctcctatccacggccaaccagcaggagatcagtgctctggacagtaagatccatgagacgattgagtccataaaccagctcaagatccagagggacttcatgctaagcttctccagagaccccaaaggctatgtccaagacctgctccgctcccagagccgggacctcaaggtgatgacagatgtagccggcaaccctgaagaggagcgccgggctgagttctaccaccagccctggtcccaggaggccgtcagtcgctacttctactgcaagatccagcagcgcaggcaggagctggagcagtcgctggttgtgcgcaacacctaggagcccaaaaataagcagcacgacggaactttcagccgtgtcccgggccccagcattttgccccgggctccagcatcactcctctgccaccttggggtgtggggctggattaaaagtcattcatctg

SEQ ID NO: 30548 - DNA, 2018 bp, Homo sapiens
  source 1..2018: mol_type = unassigned DNA
gtgcgcgcccacgtgcatgcgcgtgtgtggtcctagtgtaggtgatgtctgcggccacacaggatgctgactgcgtgtgtgactcgtgggcgtgcagatgcaagcacaggcctacgacacatctgtgtacaggctgaagatcacaacgggtctggccagggcccgccgagggcctccgagctggcgagcacaccgacggctggatggggcgacgcttcctgctccggtccctaactcattattaagctcctcgctctttgcagacgctccctgcgcctcccccgctccgggctgcagcggcgcaggcgccgggccgagccgagcgccgagcagggagcgggcggccgcgctccgggccggggtcccgggggagcagatcctcagaatggcccttggtgctgcaggcgcggtgggctccgggcccaggcaccgagggggcactggatgactctccaggtgcaggaccctgccatctatgactccaggtcttcagcacccacccaccgtggtacagcgccccgggatgccgtctggagcccggatgccccaccagggggcgcccatgggccccccgggctccccgtacatgggcagccccgccgtgcgacccggcctggcccccgcgggcatggagcccgcccgcaagcgagcagcgcccccgcccgggcagagccaggcacagagccagggccagccggtgcccaccgcccccgcgcggagccgcagtgccaagaggaggaagatggctgacaaaatcctccctcaaaggattcgggagctggtccccgagtcccaggcttacatggacctcttggcatttgagaggaaactggatcaaaccatcatgcggaagcgggtggacatccaggaggctctgaagaggcccatgaagcaaaagcggaagctgcgactctatatctccaacacttttaaccctgcgaagcctgatgctgaggattccgacggcagcattgcctcctgggagctacgggtggaggggaagctcctggatgatcccagcaaacagaagcggaagttctcttctttcttcaagagtttggtcatcgagctggacaaagatctttatggccctgacaaccacctcgttgagtggcatcggacacccacgacccaggagacggacggcttccaggtgaaacggcctggggacctgagtgtgcgctgcacgctgctcctcatgctggactaccagcctccccagttcaaactggatccccgcctagcccggctgctggggctgcacacacagagccgctcagccattgtccaggccctgtggcagtatgtgaagaccaacaggctgcaggactcccatgacaaggaatacatcaatggggacaagtatttccagcagatttttgattgtccccggctgaagttttctgagattccccagcgcctcacagccctgctattgccccctgacccaattgtcatcaaccatgtcatcagcgtggacccttcagaccagaagaagacggcgtgctatgacattgacgtggaggtggaggagccattaaaggggcagatgagcagcttcctcctatccacggccaaccagcaggagatcagtgctctggacagtaagatccatgagacgattgagtccataaaccagctcaagatccagagggacttcatgctaagcttctccagagaccccaaaggctatgtccaagacctgctccgctcccagagccgggacctcaaggtgatgacagatgtagccggcaaccctgaagaggagcgccgggctgagttctaccaccagccctggtcccaggaggccgtcagtcgctacttctactgcaagatccagcagcgcaggcaggagctggagcagtcgctggttgtgcgcaacacctaggagcccaaaaataagcagcacgacggaactttcagccgtgtcccgggccccagcattttgccccgggctccagcatcactcctctgccaccttggggtgtggggctggattaaaagtcattcatctgaca

SEQ ID NO: 30549 - DNA, 613 bp, Homo sapiens
  source 1..613: mol_type = unassigned DNA
aaatgcttggcaggctccctgcccgctggctgcttagggaggtgctcccacttcccccgccgttgcctgagctctctagggctccttcactctgcagatcctcagaatggcccttggtgctgcaggcgcggtgggctccgggcccaggcaccgagggggcactggatgactctccaggtgcaggaccctgccatctatgactccaggtcttcagcacccacccaccgtggtacagcgccccgggatgccgtctggagcccggatgccccaccagggggcgcccatgggccccccgggctccccgtacatgggcagccccgccgtgcgacccggcctggcccccgcgggcatggagcccgcccgcaagcgagcagcgcccccgcccgggcagagccaggcacagagccagggccagccggtgcccaccgcccccgcgcggagccgcagtgccaagaggaggaagatggctgacaaaatcctccctcaaaggattcgggagctggtccccgagtcccaggcttacatggacctcttggcatttgagaggaaactggatcaaaccatcatgcggaagcgggtggacatccaggaggctctgaagaggcccatgaag

SEQ ID NO: 30550 - DNA, 4912 bp, Homo sapiens
  source 1..4912: mol_type = unassigned DNA
gggaacgtgcctgcgcgtgcttggatagttcatttaaagcccccatccctgcaaggtggtgctttctaccaatatgaatcttttcaacctggaccgttttcgctttgagaaaaggaataagattgaggaagcgcccgaagcaacccctcaaccttcccagcctggcccttcttcaccaatttctcttagtgctgaagaggagaatgctgaaggggaagttagcagggcaaacactcctgattcagatataactgaaaaaacagaagattctagtgttccagaaactccagataatgaaagaaaagcaagtatatcatatttcaaaaatcaaagaggaatacagtatattgatttgtcttctgatagtgaagatgtcgtttccccaaattgctccaatacagttcaagagaaaacattcaacaaagatacagtgattatagtttctgagccatctgaagatgaagagtcccaaggccttcctaccatggcacgtagaaatgatgatatttcagaactggaagacctttcggaattggaagaccttaaagatgctaaacttcagactttgaaggaactttttccacaaagaagtgacaatgatttacttaagttgattgaatcaacaagcactatggatggagcaattgctgctgccttgctgatgtttggtgatgcaggtggtgggcccaggaaaagaaaattatcttcttcttcagagccatatgaggaagatgaatttaatgatgatcaatctataaaaaagacaagactggatcatggagaggaatcaaatgagtctgcagaatctagcagtaattgggaaaagcaggaaagtattgtactgaaattgcaaaaggaatttcccaattttgataaacaggaacttagagaagtactcaaggaacatgaatggatgtacacagaagctttagaatctctaaaagtgtttgcagaagaccaagatatgcaatatgtatcacaaagtgaggttccaaatggaaaagaagtttcttcaagaagtcaaaattaccctaaaaatgcaactaaaacaaaactaaaacagaaattttcaatgaaagcacaaaatggctttaacaagaaacgtaaaaaaaatgtttttaatccaaagagagttgttgaagactctgaatatgattcaggttctgatgtcggtagttcactagatgaggactatagtagtggtgaagaagtgatggaggatggctataaaggtaaaattcttcacttccttcaagatgcttcaattggtgaacttactttgattcctcagtgttctcagaaaaaggctcagaagataacagaactccggccctttaatagttgggaggctctgttcacaaagatgtccaaaactaatggcttatcagaagatttgatatggcactgtaaaacactgatccaagaaagagatgtagttataaggcttatgaacaaatgtgaagacatttcaaataaattgaccaaacaagttaccatgcttactggaaatggaggtggatggaacatagaacaaccttccattctaaaccaaagtttgtcactcaagccctatcagaaggttggtttgaattggctggcattggtacataaacatggacttaatggcattttggcagatgaaatgggcctaggaaaaactattcaagccattgcatttctggcatacctctatcaggagggtaataatggtcctcatttgatcgttgttccagcttcaactatagataactggttaagggaagttaatttatggtgccctactttgaaggtcctctgttactatggttctcaagaagaacgtaaacaaattagatttaacattcatagtagatatgaagattacaatgtaattgtgaccacatataactgtgcgatcagcagttctgatgaccgtagtctgtttcgacggctgaaacttaattacgcaatttttgatgagggccatatgctgaagaatatgggctccattcgctaccagcaccttatgacaattaatgcaaataaccgtttgctgctcacaggcacacctgtacagaacaatctgttagaactcatgtcgctgttgaattttgttatgccacacatgtttagtagtagcaccagtgaaatacgaagaatgttttcctctaagacaaaatcagcagatgagcaaagcatatatgaaaaggagagaatagcacatgcaaaacaaattataaagccatttattctcagaagagtaaaagaagaggttctcaagcagttaccccccaagaaagatcgaattgagttgtgtgcaatgtcggagaagcaggagcaactctatttgggtcttttcaacagattgaaaaaatctatcaataacttggaaaaaaacacagaaatgtgcaatgtcatgatgcagttgaggaaaatggccaatcatcctttattacatcgccaatattacacagctgaaaaactcaaggaaatgtctcagcttatgctaaaggaacctacacattgtgaggctaaccctgacctgatctttgaagatatggaagttatgacagacttcgaactacatgtactttgtaaacagtaccgacacattaataactttcagttagacatggacttgattttagattctggaaaatttcgagttttaggatgcatcttgtctgaattgaaacagaagggtgatagagttgtgttatttagccaatttaccatgatgctggatatcttagaggttctattaaaacatcatcagcataggtacctcagattagatggaaagactcagatttctgaaaggattcatctaattgatgagtttaataccgatatggatatctttgtgtttctgctatcaacaaaagctggtggattaggaataaatctgacttcagcaaatgttgttatacttcacgatattgactgtaatccttataatgacaaacaagcagaagatagatgccatagagtaggccagactaaagaagtactagttataaaactaataagccaagggacgattgaagaatccatgctaaaaattaaccaacagaaattgaaactagaacaggatatgactacagtagatgaaggtgatgaagggagtatgccagcagatatagccacattactaaaaacatcaatgggcctgtgaaataagaactgtgaactctcaattgatgaggaaatatcaacttggtgcactcaaggacatttacattatgatgaccatggggtttatgaacatttataactttttataatttccatattacatttctcatagtatggacaactttttgccactaactgaattctccaaatactcacacgtgaaatttcaaaaaagaagccacaaatatgtagttctgaagatgttgaataatcattttacaaagcagttttctgaatggggattagttggtgattgtttgtaacaaatatgctaatgctttagaaatgtcagtatttttgtaattatttctacctccaaatatatatatattgtctttcactggataatgtgtgtagatttttacatgtgccttatttgacaatgcttatgtcttgtttttgcttgtctcatttgaagttcttttttattatgttaaagaatgcagctgtatagattatatagctttcattttattgctatttgaagcagatgttcaccaatgtcagcaagaactcaacctgaatttaaaggtggcattccatatactaacatcccccaggtcctctcaagtacttctgctgaaacaaatttatttggctaggcactaagttgttttccagtgaatagtaactaaagaagcccctaccttgctccatggattaattccttctgttcattttccaactgcactaattgtgcatattactctgcctaatcttgtgcatgttttcattgatttccctctcccggcttttgcttctcttgaaactgttgcccagtcacttctgctccaattctcttcctctctaaatagtagtttattactgccacatctccatgcatcagcaaaatgttggtgacatttttctagcctggcagaacagattacttaaagctatttcatttcaaagcagactgaatgtgacttcatctaaaggcagcattaggtactgcatggaaataggtcattaacttgaaactcttatcaaaatatattttaccagtttccagaatttccagtacaggaccgcctgaagagagagccattgttcaattccaattcagtgtgagtgacaaagtgaaatttagaagtgaagttgtctatttgatatttaactctttattaaatctttctttaaatttctgcctgtcagtctatattgctgtttttattatacatcagtttctttgtataacttgtgagttccatgtgttttgtttttattatgtaaatatcattataaataaacttatttataaatcaaagatttgttaatttttggaaatcatgcttttcaaagcatcctaacttgctaagatgctaggtagtacgaccctctggatttggaaggcaaataaaactcttacagtgattatttagatattaaagactgagaactcacggcttaaccccagtcttgatggtatattgaacagactgaatatattttaccattacagggctaaaaggagtcttcatgtgttaatactacctccttgtacatcactatacccaaatcagttattcaaattgttaggaattttaccttttaaaatctcataatggatatctcatgttttctgtattaatgtattttcaatgataggctgtttctttttttgttgttattgttgttgttgttatatccatacttttatctctaatgaaatgtagttgggttcttcctgtaatgcgctattatgtcttgggcttaataaaaatatttgtgatcataa

SEQ ID NO: 30551 - DNA, 5017 bp, Homo sapiens
  source 1..5017: mol_type = unassigned DNA
attacgcgctcttaaggtttctccgtggtgttttggaaggtcccggcacggctaccgtcgccccacgctaggaaattttttttttattttcaacctttgttacatagcactgaggctacaagatcatagttcatttaaagcccccatccctgcaaggtggtgctttctaccaatatgaatcttttcaacctggaccgttttcgctttgagaaaaggaataagattgaggaagcgcccgaagcaacccctcaaccttcccagcctggcccttcttcaccaatttctcttagtgctgaagaggagaatgctgaaggggaagttagcagggcaaacactcctgattcagatataactgaaaaaacagaagattctagtgttccagaaactccagataatgaaagaaaagcaagtatatcatatttcaaaaatcaaagaggaatacagtatattgatttgtcttctgatagtgaagatgtcgtttccccaaattgctccaatacagttcaagagaaaacattcaacaaagatacagtgattatagtttctgagccatctgaagatgaagagtcccaaggccttcctaccatggcacgtagaaatgatgatatttcagaactggaagacctttcggaattggaagaccttaaagatgctaaacttcagactttgaaggaactttttccacaaagaagtgacaatgatttacttaagttgattgaatcaacaagcactatggatggagcaattgctgctgccttgctgatgtttggtgatgcaggtggtgggcccaggaaaagaaaattatcttcttcttcagagccatatgaggaagatgaatttaatgatgatcaatctataaaaaagacaagactggatcatggagaggaatcaaatgagtctgcagaatctagcagtaattgggaaaagcaggaaagtattgtactgaaattgcaaaaggaatttcccaattttgataaacaggaacttagagaagtactcaaggaacatgaatggatgtacacagaagctttagaatctctaaaagtgtttgcagaagaccaagatatgcaatatgtatcacaaagtgaggttccaaatggaaaagaagtttcttcaagaagtcaaaattaccctaaaaatgcaactaaaacaaaactaaaacagaaattttcaatgaaagcacaaaatggctttaacaagaaacgtaaaaaaaatgtttttaatccaaagagagttgttgaagactctgaatatgattcaggttctgatgtcggtagttcactagatgaggactatagtagtggtgaagaagtgatggaggatggctataaaggtaaaattcttcacttccttcaagatgcttcaattggtgaacttactttgattcctcagtgttctcagaaaaaggctcagaagataacagaactccggccctttaatagttgggaggctctgttcacaaagatgtccaaaactaatggcttatcagaagatttgatatggcactgtaaaacactgatccaagaaagagatgtagttataaggcttatgaacaaatgtgaagacatttcaaataaattgaccaaacaagttaccatgcttactggaaatggaggtggatggaacatagaacaaccttccattctaaaccaaagtttgtcactcaagccctatcagaaggttggtttgaattggctggcattggtacataaacatggacttaatggcattttggcagatgaaatgggcctaggaaaaactattcaagccattgcatttctggcatacctctatcaggagggtaataatggtcctcatttgatcgttgttccagcttcaactatagataactggttaagggaagttaatttatggtgccctactttgaaggtcctctgttactatggttctcaagaagaacgtaaacaaattagatttaacattcatagtagatatgaagattacaatgtaattgtgaccacatataactgtgcgatcagcagttctgatgaccgtagtctgtttcgacggctgaaacttaattacgcaatttttgatgagggccatatgctgaagaatatgggctccattcgctaccagcaccttatgacaattaatgcaaataaccgtttgctgctcacaggcacacctgtacagaacaatctgttagaactcatgtcgctgttgaattttgttatgccacacatgtttagtagtagcaccagtgaaatacgaagaatgttttcctctaagacaaaatcagcagatgagcaaagcatatatgaaaaggagagaatagcacatgcaaaacaaattataaagccatttattctcagaagagtaaaagaagaggttctcaagcagttaccccccaagaaagatcgaattgagttgtgtgcaatgtcggagaagcaggagcaactctatttgggtcttttcaacagattgaaaaaatctatcaataacttggtcacagaaaaaaacacagaaatgtgcaatgtcatgatgcagttgaggaaaatggccaatcatcctttattacatcgccaatattacacagctgaaaaactcaaggaaatgtctcagcttatgctaaaggaacctacacattgtgaggctaaccctgacctgatctttgaagatatggaagttatgacagacttcgaactacatgtactttgtaaacagtaccgacacattaataactttcagttagacatggacttgattttagattctggaaaatttcgagttttaggatgcatcttgtctgaattgaaacagaagggtgatagagttgtgttatttagccaatttaccatgatgctggatatcttagaggttctattaaaacatcatcagcataggtacctcagattagatggaaagactcagatttctgaaaggattcatctaattgatgagtttaataccgatatggatatctttgtgtttctgctatcaacaaaagctggtggattaggaataaatctgacttcagcaaatgttgttatacttcacgatattgactgtaatccttataatgacaaacaagcagaagatagatgccatagagtaggccagactaaagaagtactagttataaaactaataagccaagggacgattgaagaatccatgctaaaaattaaccaacagaaattgaaactagaacaggatatgactacagtagatgaaggtgatgaagggagtatgccagcagatatagccacattactaaaaacatcaatgggcctgtgaaataagaactgtgaactctcaattgatgaggaaatatcaacttggtgcactcaaggacatttacattatgatgaccatggggtttatgaacatttataactttttataatttccatattacatttctcatagtatggacaactttttgccactaactgaattctccaaatactcacacgtgaaatttcaaaaaagaagccacaaatatgtagttctgaagatgttgaataatcattttacaaagcagttttctgaatggggattagttggtgattgtttgtaacaaatatgctaatgctttagaaatgtcagtatttttgtaattatttctacctccaaatatatatatattgtctttcactggataatgtgtgtagatttttacatgtgccttatttgacaatgcttatgtcttgtttttgcttgtctcatttgaagttcttttttattatgttaaagaatgcagctgtatagattatatagctttcattttattgctatttgaagcagatgttcaccaatgtcagcaagaactcaacctgaatttaaaggtggcattccatatactaacatcccccaggtcctctcaagtacttctgctgaaacaaatttatttggctaggcactaagttgttttccagtgaatagtaactaaagaagcccctaccttgctccatggattaattccttctgttcattttccaactgcactaattgtgcatattactctgcctaatcttgtgcatgttttcattgatttccctctcccggcttttgcttctcttgaaactgttgcccagtcacttctgctccaattctcttcctctctaaatagtagtttattactgccacatctccatgcatcagcaaaatgttggtgacatttttctagcctggcagaacagattacttaaagctatttcatttcaaagcagactgaatgtgacttcatctaaaggcagcattaggtactgcatggaaataggtcattaacttgaaactcttatcaaaatatattttaccagtttccagaatttccagtacaggaccgcctgaagagagagccattgttcaattccaattcagtgtgagtgacaaagtgaaatttagaagtgaagttgtctatttgatatttaactctttattaaatctttctttaaatttctgcctgtcagtctatattgctgtttttattatacatcagtttctttgtataacttgtgagttccatgtgttttgtttttattatgtaaatatcattataaataaacttatttataaatcaaagatttgttaatttttggaaatcatgcttttcaaagcatcctaacttgctaagatgctaggtagtacgaccctctggatttggaaggcaaataaaactcttacagtgattatttagatattaaagactgagaactcacggcttaaccccagtcttgatggtatattgaacagactgaatatattttaccattacagggctaaaaggagtcttcatgtgttaatactacctccttgtacatcactatacccaaatcagttattcaaattgttaggaattttaccttttaaaatctcataatggatatctcatgttttctgtattaatgtattttcaatgataggctgtttctttttttgttgttattgttgttgttgttatatccatacttttatctctaatgaaatgtagttgggttcttcctgtaatgcgctattatgtcttgggcttaataaaaatatttgtgatcat

SEQ ID NO: 30552 - DNA, 4649 bp, Homo sapiens
  source 1..4649: mol_type = unassigned DNA
ctctcagctgggatcgcgccgcgtcaacttccgggcggatgcccgccagcacggcctccgccgctccccttctttggcccctttgtgtccccgcagtgtcgaggcgcgggccctggcaggtcctttctcgaggcagggggcacggtagcacagggagcttctctttgtgggcgggcgcgaggcccgctagggggttatactggggaacgtgcctgcgcgtgcttggatagttcatttaaagcccccatccctgcaaggtggtgctttctaccaatatgaatcttttcaacctggaccgttttcgctttgagaaaaggaataagattgaggaagcgcccgaagcaacccctcaaccttcccagcctggcccttcttcaccaatttctcttagtgctgaagaggagaatgctgaaggggaagttagcagggcaaacactcctgattcagatataactgaaaaaacagaagattctagtgttccagaaactccagataatgaaagaaaagcaagtatatcatatttcaaaaatcaaagaggaatacagtatattgatttgtcttctgatagtgaagatgtcgtttccccaaattgctccaatacagttcaagagaaaacattcaacaaagatacagtgattatagtttctgagccatctgaagatgaagagtcccaaggccttcctaccatggcacgtagaaatgatgatatttcagaactggaagacctttcggaattggaagaccttaaagatgctaaacttcagactttgaaggaactttttccacaaagaagtgacaatgatttacttaagttgattgaatcaacaagcactatggatggagcaattgctgctgccttgctgatgtttggtgatgcaggtggtgggcccaggaaaagaaaattatcttcttcttcagagccatatgaggaagatgaatttaatgatgatcaatctataaaaaagacaagactggatcatggagaggaatcaaatgagtctgcagaatctagcagtaattgggaaaagcaggaaagtattgtactgaaattgcaaaaggaatttcccaattttgataaacaggaacttagagaagtactcaaggaacatgaatggatgtacacagaagctttagaatctctaaaagtgtttgcagaagaccaagatatgcaatatgtatcacaaagtgaggttccaaatggaaaagaagtttcttcaagaagtcaaaattaccctaaaaatgcaactaaaacaaaactaaaacagaaattttcaatgaaagcacaaaatggctttaacaagaaacgtaaaaaaaatgtttttaatccaaagagagttgttgaagactctgaatatgattcaggttctgatgtcggtagttcactagatgaggactatagtagtggtgaagaagtgatggaggatggctataaaggtaaaattcttcacttccttcaagatgcttcaattggtgaacttactttgattcctcagtgttctcagaaaaaggctcagaagataacagaactccggccctttaatagttgggaggctctgttcacaaagatgtccaaaactaatggcttatcagaagatttgatatggcactgtaaaacactgatccaagaaagagatgtagttataaggcttatgaacaaatgtgaagacatttcaaataaattgaccaaacaagttaccatgcttactggaaatggaggtggatggaacatagaacaaccttccattctaaaccaaagtttgtcactcaagccctatcagaaggttggtttgaattggctggcattggtacataaacatggacttaatggcattttggcagatgaaatgggcctaggaaaaactattcaagccattgcatttctggcatacctctatcaggagggtaataatggtcctcatttgatcgttgttccagcttcaactatagataactggttaagggaagttaatttatggtgccctactttgaaggtcctctgttactatggttctcaagaagaacgtaaacaaattagatttaacattcatagtagatatgaagattacaatgtaattgtgaccacatataactgtgcgatcagcagttctgatgaccgtagtctgtttcgacggctgaaacttaattacgcaatttttgatgagggccatatgctgaagaatatgggctccattcgctaccagcaccttatgacaattaatgcaaataaccgtttgctgctcacaggcacacctgtacagaacaatctgttagaactcatgtcgctgttgaattttgttatgccacacatgtttagtagtagcaccagtgaaatacgaagaatgttttcctctaagacaaaatcagcagatgagcaaagcatatatgaaaaggagagaatagcacatgcaaaacaaattataaagccatttattctcagaagagtaaaagaagaggttctcaagcagttaccccccaagaaagatcgaattgagttgtgtgcaatgtcggagaagcaggagcaactctatttgggtcttttcaacagattgaaaaaatctatcaataacttggtcacagaaaaaaacacagaaatgtgcaatgtcatgatgcagttgaggaaaatggccaatcatcctttattacatcgccaatattacacagctgaaaaactcaaggaaatgtctcagcttatgctaaaggaacctacacattgtgaggctaaccctgacctgatctttgaagatatggaagttatgacagacttcgaactacatgtactttgtaaacagtaccgacacattaataactttcagttagacatggacttgattttagattctggaaaatttcgagttttaggatgcatcttgtctgaattgaaacagaagggtgatagagttgtgttatttagccaatttaccatgatgctggatatcttagaggttctattaaaacatcatcagcataggtacctcagattagatggaaagactcagatttctgaaaggattcatctaattgatgagtttaataccgatatggatatctttgtgtttctgctatcaacaaaagctggtggattaggaataaatctgacttcagcaaatgttgttatacttcacgatattgactgtaatccttataatgacaaacaagcagaagatagatgccatagagtaggccagactaaagaagtactagttataaaactaataagccaagggacgattgaagaatccatgctaaaaattaaccaacagaaattgaaactagaacaggatatgactacagtagatgaaggtgatgaagggagtatgccagcagatatagccacattactaaaaacatcaatgggcctgtgaaataagaactgtgaactctcaattgatgaggaaatatcaacttggtgcactcaaggacatttacattatgatgaccatggggtttatgaacatttataactttttataatttccatattacatttctcatagtatggacaactttttgccactaactgaattctccaaatactcacacgtgaaatttcaaaaaagaagccacaaatatgtagttctgaagatgttgaataatcattttacaaagcagttttctgaatggggattagttggtgattgtttgtaacaaatatgctaatgctttagaaatgtcagtatttttgtaattatttctacctccaaatatatatatattgtctttcactggataatgtgtgtagatttttacatgtgccttatttgacaatgcttatgtcttgtttttgcttgtctcatttgaagttcttttttattatgttaaagaatgcagctgtatagattatatagctttcattttattgctatttgaagcagatgttcaccaatgtcagcaagaactcaacctgaatttaaaggtggcattccatatactaacatcccccaggtcctctcaagtacttctgctgaaacaaatttatttggctaggcactaagttgttttccagtgaatagtaactaaagaagcccctaccttgctccatggattaattccttctgttcattttccaactgcactaattgtgcatattactctgcctaatcttgtgcatgttttcattgatttccctctcccggcttttgcttctcttgaaactgttgcccagtcacttctgctccaattctcttcctctctaaatagtagtttattactgccacatctccatgcatcagcaaaatgttggtgacatttttctagcctggcagaacagattacttaaagctatttcatttcaaagcagactgaatgtgacttcatctaaaggcagcattaggtactgcatggaaataggtcattaacttgaaactcttatcaaaatatattttaccagtttccagaatttccagtacaggaccgcctgaagagagagccattgttcaattccaattcagtgtgagtgacaaagtgaaatttagaagtgaagttgtctatttgatatttaactctttattaaatctttctttaaatttctgcctgtcagtctatattgctgtttttattatacatcagtttctttgtataacttgtgagttccatgtgttttgtttttattatgtaaatatcattataaataaacttatttataaatcaaa

SEQ ID NO: 30553 - DNA, 1209 bp, Homo sapiens
  source 1..1209: mol_type = unassigned DNA
gcgtcaacttccgggcggatgcccgccagcacggcctccgccgctccccttctttggcccctttgtgtccccgcagtgtcgaggcgcgggccctggcaggtcctttctcgaggcagggggcacggtagcacagggagcttctctttgtgggcgggcgcgaggcccgctagggggttatactggggaacgtgcctgcgcgtgcttggatagttcatttaaagcccccatccctgcaaggtggtgctttctaccaatatgaatcttttcaacctggaccgttttcgctttgagaaaaggaataagattgaggaagcgcccgaagcaacccctcaaccttcccagcctggcccttcttcaccaatttctcttagtgctgaagaggagaatgctgaaggggaagttagcagggcaaacactcctgattcagatataactgaaaaaacagaagattctagtgttccagaaactccagataatgaaagaaaagcaagtatatcatatttcaaaaatcaaagaggaatacagtatattgatttgtcttctgatagtgaagatgtcgtttccccaaattgctccaatacagttcaagagaaaacattcaacaaagatacagtgattatagtttctgagccatctgaagatgaagagtcccaaggccttcctaccatggcacgtagaaatgatgatatttcagaactggaagacctttcggaattggaagaccttaaagatgctaaacttcagactttgaaggaactttttccacaaagaagtgacaatgatttacttaagttgattgaatcaacaagcactatggatggagcaattgctgctgccttgctgatgtttggtgatgcaggtggtgggcccaggaaaagaaaattatcttcttcttcagagccatatgaggaagatgaatttaatgatgatcaatctataaaaaagacaagactggatcatggagaggaatcaaatgagtctgcagaatctagcagtaattgggaaaagcaggaaagtattgtactgaaattgcaaaaggaatttcccaattttgataaacaggaacttagagaagtactcaaggaacatgaatggatgtacacagaagctttagaatctctaaaagtgtttgcagaagaccaagatatgcaatatgtatcacaaagtgaggttccaaatggaaaaaaaaaggctcagaagaagaagaaa

SEQ ID NO: 30554 - DNA, 1345 bp, Homo sapiens
  source 1..1345: mol_type = unassigned DNA
ggaagtgggaagagagaaaggttgtgatggcggctatagctgcatccgaggtgctggtggacagcgcggaggaggggtccctcgctgcggcggcggagctggccgctcagaagcgcgaacagagactgcgcaaattccgggagctgcacctgatgcggaatgaagctcgtaaattaaatcaccaggaagttgtggaagaagataaaagactaaaattacctgcaaattgggaagccaaaaaagctcgtttggagtgggaactaaaggaagaggaaaagaaaaaggaatgtgcggcaagaggagaagactatgagaaagtgaagttgctggagatcagtgcagaagatgcagaaagatgggagaggaaaaagaagaggaaaaaccctgatctgggattttcagattatgctgctgcccagttacgccagtatcatcggttgaccaagcagatcaaacctgacatggaaacatatgagagactgagagaaaaacatggagaagagtttttcccaacatccaatagtcttcttcatggaacacatgtgccttccacagaggaaattgacaggatggtcatagatctggaaaaacagattgaaaaacgagacaaatatagccggagacgtccttataatgatgatgcagatatcgactacattaatgaaaggaatgccaaattcaacaagaaagctgaaagattctatgggaaatacacagctgaaattaaacagaatttggaaagaggaacagctgtctaatcccttcaagaactgtttatagaagcttgagaatggggtaaaaatttctgctagcaaaatcaagttctttttgaaattttatcagtaatccagaatttagtagtccatgccttctcactcagcatttagaaataaaaatgtggtttcttaaacgtatatcctttcatgtatatttccacatttttgtgcttggatataagatgtatttcttgtagtgaagttgttttgtaatctactttgtatacattctaattatattatttttctatgtattttaaatgtatatggctgtttaatctttgaagcattttgggcttaagattgccagcagcacacatcagatgcagtcattgttgctatcagtgtggaatttgatagagtctagactcgggccacttggagttgtgtactccaaagctaaggacagtgatgaggaagatggcagtggccaccggaggactggagcagtccctcctcatggcggcctgtgaccaaggtcggggaggagtggagctatccttccatgatctgatcatgtacagttccctttttaaaaagcaataaatgcttgggattagaatttctaa

SEQ ID NO: 30555 - DNA, 926 bp, Homo sapiens
  source 1..926: mol_type = unassigned DNA
ggaagagagaaaggttgtgatggcggctatagctgcatccgaggtgctggtggacagcgcggaggaggggtccctcgctgcggcggcggagctggccgctcagaagcgcgaacagagactgcgcaaattccgggagctgcacctgatgcgggaatgtgcggcaagaggagaagactatgagaaagtgaagttgctggagatcagtgcagaagatgcagaaagatgggagaggaaaaagaagaggaaaaaccctgatctgggattttcagattatgctgctgcccagttacgccagtatcatcggttgaccaagcagatcaaacctgacatggaaacatatgagagactgagagaaaaacatggagaagagtttttcccaacatccaatagtcttcttcatggaacacatgtgccttccacagaggaaattgacaggatggtcatagatctggaaaaacagattgaaaaacgagacaaatatagccggagacgtccttataatgatgatgcagatatcgactacattaatgaaaggaatgccaaattcaacaagaaagctgaaagattctatgggaaatacacagctgaaattaaacagaatttggaaagaggaacagctgtctaatcccttcaagaactgtttatagaagcttgagaatggggtaaaaatttctgctagcaaaatcaagttctttttgaaattttatcagtaatccagaatttagtagtccatgccttctcactcagcatttagaaataaaaatgtggtttcttaaacgtatatcctttcatgtatatttccacatttttgtgcttggatataagatgtatttcttgtagtgaagttgttttgtaatctactttgtatacattctaattatattatttttctatgtattttaaatgtatatggctgtttaatcttt

SEQ ID NO: 30556 - DNA, 2522 bp, Homo sapiens
  source 1..2522: mol_type = unassigned DNA
agacactggccgcgggccaccatctggacgcgatcccccgctagggcctccctggtctgggccaaagttggtggccaccttcgcgcgggctgcgccctccttctcttccctgccctcctcccccggggcccgcgcccgctgcctccagcacgcgcgtcggcaggctcggcaagcgaagaggagcggctcgccccagggcgcccctcgcccagcctgccggccaggcgagcgcgacgagagtctccccgcaccccttcctctcccgggggccgagagggttgggctccgccccggcgccgcagctcccgactccccgccgctcgggctgccgccgctgccccgcgcccggcgctcggggcagccgggggcgcaggcggagagcgcagggcggggagaggcgtggggagcagagcggcgctgaggggagggcagaggaggagagagcctggcagcggaggagcagaggcgggcgccgcaccgccccgcacgctcgctcgctcgggagagtcgcgggcggccgcttgggcgcacttgccgggtcaccttgtcccggaggagaaatggcttccctgaggcaagtgtaacctacattcccagcccaccagcctgacgcccagccagggagagagtaccatggatggcatcattgaacagaagagcatgctggtgcacagtaaaatcagtgatgctggcaagaggaatggtttaattaacaccagaaacttgatggccgagagcagagatggtctggtgtctgtttacccagcgccccagtaccagagccaccgggtgggggccagcacagtgccggccagcctggacagcagcaggagtgagccgatgcagcagctgctggaccccaacaccctgcagcagtcagtggagtcccgctaccggcccaacatcatcctctattcagagggcgtgctgcgctcctggggggacggtgtggccgccgactgctgcgagaccaccttcatcgaggaccggtcgcccaccaaagacagcctcgagtacccggatgggaagttcattgacctctcagctgatgacataaaaatccacaccctgtcctacgatgtggaggaggaggaggagttccaggagctggagagcgactactcaagcgacacagagagtgaggacaatttcctcatgatgcccccgcgggaccacctgggcctcagtgtcttctccatgctctgctgcttctggcctctgggcatcgcagccttctacttgtcccatgagaccaacaaagccgtggccaagggggacttgcaccaggccagcaccagctcccggcgggccctattcctggcagtgctgtccatcaccattgggactggcgtctatgtgggcgtggccgtggccctcatcgcctacctctccaagaacaaccacctgtgagcttcctgcgaatggagggggagcacccggggccaggtctgtgtggacgtggaggaagcaggcataccgcatgatgctgtacagtacaaatgattgccaaatgatgccacgaagccctgggatttcctacccatggatttattttgtttttatcctttaatttcatgttcacagcactgtgtagagcaccagacagacgggcactgctaatccttccaaaggaaagctccaaagatcccagcccgcaaggctgtctctggatggattctggtggatgaatggcaacgcggctctctgcagcctgccagtgcccagagtgccaccgcattagcaatatacaaacagtccaaaaaagtgtttattttttatggaatacggtgcaataggcagaggacaagggacacatcactcttctgtctgtggccctgctggagtcctttgtgccccccggagtccacacgccttccctgcaagacgagaatggggctgggaagaaagaggcaacaccacggctggcaggagccccgctgcactgctctgcagacccattggcctgaccctgagaagcagagccagcaaagcccgggacctgcccctctttctttcccttcacaccaccccagcctcaggatgtcaagccacctccggaacgtgtctacactccacagctaccccgcagcaatacgcactcttgggacctcgctgatctaggatggggaggcaggccaccgcccctcccaagactcctcaagaaagagccccgcggttgctccggaaactcgaggcactgcagctatgggcactgcctcagcctaaagacacaggggcgcctcccaatcaccgcgctggcggatgctcaccccgtcataagcagaaactagtgatcctggaaatgagatgggccttactctgtcgactaaatgaatagctattttcttgtcattttttaaagtgcaactcttgcttcatgctgcttaagttaccagatgaatgctgagaaataagtaatcacagacattttaataccatttcattgctgttttacgagtgttcattacttaacaaaaaattatcttttagctttttcgcttaagacttttctttctgatgaa

SEQ ID NO: 30557 - DNA, 2607 bp, Homo sapiens
  source 1..2607: mol_type = unassigned DNA
ggcggcggcgggctgcgggcgggagctgtccgcggtgctgaagcggcggctgctcagggacgcggggacgagagcaggggagccctcctgggagttccaccgcgaccgcgaggcgggggcgccgtcgctcaccggcccatgccgagcccccgagccccgcggaggaggcgggaccgtccgcggcgggacaggctctgaggactgctcagctggcccaggcccccctccccagcagctgccccagaaccatggagagtctgagtgaactacagaacccgctgctgcccaggagccctgcccatctccatggcccctatccctacccggagaccccacccagctggtcctgccaggaaaagctctactcctacctcctaggtggcgctgggcctgccggagcccaccagctcctggacccagggtccctgcagctggccgtggaggcctggtaccggcccagctgcctcctggggagagacaaggtcaaggagcccagggcaggcagctgtgagacaagcttcacagaggacagggagccccaggaggggcctccagagcagcccacaggacctggccaagctgcagagaatgtcaccatccagactgtgtcctatggggtacaagaggagctgcgggaccaggaggatgaccaggaggaagaggagagcgatgccacttcaacggagagtgaaagtgaagacaacttcctcacgctgcctcccagggaccacctgggacttactctcttctccatgctctgctgcttctggccactgggcattgctgccttctacttctcccaggggaccagcaaggccatctccaaaggggacttccgcctggccagcaccacctcccgccgggccctcttcctagccacactcgccatcgccgtgggggccggtctctacgtggctgtggtggtggctctggcagcttacatgtcccagaacggtcatggctagtagccagtagggcctgcatcctgactcccctgcccacctgaggaagcagtggggcttggagttgcagaccctatggaaaggcccggcccctgaagatgatcccgtgagagtggcttgctgagggggagacccccattccacagcctgcagagctcagccttcacttctgcttgcccgctgctcccagccccagagcagggcccggggcgccactctctaacccaggctacagacgggaaacagaaggcagggctgcccaccaggccatcccagcagggcctagctccatccattctgcccattccctagaggatctcctgccctacagccagcccaccacctaccctgccaacctccccacagagaaagagcaggaggttacagggagaaaagggggtgcccagagcacaaggggacccgtcccaatcctttcagcccacagggatcttcacctggggacagcctgagcttcccccaactccactgtctggccccatcatgcccagacctcagcaggccaagaaggaaatacgtggaggcaagggggcctcttgctgtctctgattctagagggtgcttatctctgcatgggcttgtgaggcactgtagattctagatagggaagaggagcctcggtatgtaaactctgaaccaagggcaggttcttggagcttcttcatgcgggtgcaaaaggcagttgcaatgacagagaatagagggtcctgaaatattgctgtactacatgactcttcctactctccccccactccccgcccctatcatccttttctgggctttgcctgggggtccgtgagctggtgccatcacaagtagactagacccagagagtgccctcagctcaccagccactgagcgcacggccctaggtccagccctacagaaaacgcagcaaggagagaccctagggagtagtgagtatagatgagggaagggactcagggaaggaatggcctgctgagtagtcagcggtgcttaggaaggcttcctggaggaggtatcccttgagcaagtcctaggatgaatagaattcatctaagggatttggtcacataactctttgtatttgtaggcagggatgtggcaggaaccttccatgggaagcttccaggctgtttggattctgcctggaacatctgggctggagccaaactacagccattcctaagggttctgccaactcaaggaggaacgtcacacctgtctctcaaagaccaatgatgttttcccatctctgaatgctagggggtcagtggtgggtacctggttacccctggggcatcttcactgatatctctgctcagtgccagtctcaacaccctcagccactagggcacatccagaattttagagacatctccaggtaggcggggggcagcaccaatgtgggcaggcctgtctggactcaagctacaggcccctgctgtgcatgatgtgggaacctggtcattcccatgccccatccagagcccagggctgtggctccaccactgagcatcccttgtcccactgtcctcccctgcctcgggcactgcccagccctccactcctgcatcacagcagttttaaggtcccattattgtactgatttatccttgtaataaatgtttctgtaacacctggt

SEQ ID NO: 30558 - DNA, 2420 bp, Homo sapiens
  source 1..2420: mol_type = unassigned DNA
gacaggctctgaggactgctcagctggcccaggcccccctccccagcagctgccccagaaccatggagagtctgagtgaactacagaacccgctgctgcccaggagccctgcccatctccatggcccctatccctacccggagaccccacccagctggtcctgccaggaaaagctctactcctacctcctaggtggcgctgggcctgccggagcccaccagctcctggacccagggtccctgcagctggccgtggaggcctggtaccggcccagctgcctcctggggagagacaaggtcaaggagcccagggcaggcagctgtgagacaagcttcacagaggacagggagccccaggaggggcctccagagcagcccacaggacctggccaagctgcagagaatgtcaccatccagactgtgtcctatggggtacaagaggagctgcgggaccaggaggatgaccaggaggaagaggagagcgatgccacttcaacggagagtgaaagtgaagacaacttcctcacgctgcctcccagggaccacctgggacttactctcttctccatgctctgctgcttctggccactgggcattgctgccttctacttctcccaggggaccagcaaggccatctccaaaggggacttccgcctggccagcaccacctcccgccgggccctcttcctagccacactcgccatcgccgtgggggccggtctctacgtggctgtggtggtggctctggcagcttacatgtcccagaacggtcatggctagtagccagtagggcctgcatcctgactcccctgcccacctgaggaagcagtggggcttggagttgcagaccctatggaaaggcccggcccctgaagatgatcccgtgagagtggcttgctgagggggagacccccattccacagcctgcagagctcagccttcacttctgcttgcccgctgctcccagccccagagcagggcccggggcgccactctctaacccaggctacagacgggaaacagaaggcagggctgcccaccaggccatcccagcagggcctagctccatccattctgcccattccctagaggatctcctgccctacagccagcccaccacctaccctgccaacctccccacagagaaagagcaggaggttacagggagaaaagggggtgcccagagcacaaggggacccgtcccaatcctttcagcccacagggatcttcacctggggacagcctgagcttcccccaactccactgtctggccccatcatgcccagacctcagcaggccaagaaggaaatacgtggaggcaagggggcctcttgctgtctctgattctagagggtgcttatctctgcatgggcttgtgaggcactgtagattctagatagggaagaggagcctcggtatgtaaactctgaaccaagggcaggttcttggagcttcttcatgcgggtgcaaaaggcagttgcaatgacagagaatagagggtcctgaaatattgctgtactacatgactcttcctactctccccccactccccgcccctatcatccttttctgggctttgcctgggggtccgtgagctggtgccatcacaagtagactagacccagagagtgccctcagctcaccagccactgagcgcacggccctaggtccagccctacagaaaacgcagcaaggagagaccctagggagtagtgagtatagatgagggaagggactcagggaaggaatggcctgctgagtagtcagcggtgcttaggaaggcttcctggaggaggtatcccttgagcaagtcctaggatgaatagaattcatctaagggatttggtcacataactctttgtatttgtaggcagggatgtggcaggaaccttccatgggaagcttccaggctgtttggattctgcctggaacatctgggctggagccaaactacagccattcctaagggttctgccaactcaaggaggaacgtcacacctgtctctcaaagaccaatgatgttttcccatctctgaatgctagggggtcagtggtgggtacctggttacccctggggcatcttcactgatatctctgctcagtgccagtctcaacaccctcagccactagggcacatccagaattttagagacatctccaggtaggcggggggcagcaccaatgtgggcaggcctgtctggactcaagctacaggcccctgctgtgcatgatgtgggaacctggtcattcccatgccccatccagagcccagggctgtggctccaccactgagcatcccttgtcccactgtcctcccctgcctcgggcactgcccagccctccactcctgcatcacagcagttttaaggtcccattattgtactgatttatccttgtaataaatgtttctgtaacacctgg

SEQ ID NO: 30559 - DNA, 488 bp, Homo sapiens
  source 1..488: mol_type = unassigned DNA
ggcggcggcgggctgcgggcgggagctgtccgcggtgctgaagcggcggctgctcagggacgcggggacgagagcaggggagccctcctgggagttccaccgcgaccgcgaggcgggggcgccgtcgctcaccggcccatgccgagcccccgagccccgcggaggaggcgggaccgtccgcggcgggacaggctctgaggactgctcagctggcccaggcccccctccccagcagctgccccagaaccatggagagtctgagtgaactacagaacccgctgctgcccaggagccctgcccatctccatggcccctatccctacccggagaccccacccagctggtcctgccaggaaaagctctactcctacctcctaggtggcgctgggcctgccggagcccaccagctcctggacccagggtccctgcagctggccgtggaggcctggtaccggcccagctgcctcctggggagagacaaggtcaag

SEQ ID NO: 30560 - DNA, 3203 bp, Homo sapiens
  source 1..3203: mol_type = unassigned DNA
tgcggtgggcagcggaggagtcgtgtcgtgcctgagagcgcagctgtgctcctgggcaccgcgcagtccgcccccgcggctcctggccagaccacccctaggaccccctgccccaagtcgcagccatgaactacctgcggcgccgcctgtcggacagcaactttatggccaatctgccaaatgggtacatgacagacctgcagcgtccgcagccgcccccaccgccgcccggtgcccacagccccggagccacgcccggtcccgggaccgccactgccgagaggtcctccggggtcgccccagcggcctctccggccgcccctagccccgggtcctcggggggcggtggcttcttctcgtcgctgtccaacgcggtcaagcagaccacggcggcggcagctgccaccttcagcgagcaggtgggcggcggctctgggggcgcaggccgcgggggagccgcctccagggtgctgctggtcatcgacgagccgcacaccgactgggcaaaatacttcaaagggaaaaagatccatggagaaattgacattaaagtagaacaggccgaattctctgatctcaaccttgtggcccatgccaatggtggattctctgtggatatggaagttcttcggaatggggtgaaggtcgtgcggtctctgaagccggattttgtgctgatccgccagcacgccttcagcatggcacgcaacggagactaccgcagtttggtcattgggctgcagtatgctggaatccccagtgttaactccttgcattctgtctacaacttctgtgacaagccctgggtgtttgcccagatggttcgactgcataagaaactggggacagaagaattccctctaattgatcagaccttctaccccaatcacaaagaaatgctcagcagtacaacgtaccccgtggttgtgaagatggggcacgcacactctgggatgggcaaggtcaaggttgacaaccagcatgacttccaggacatcgcaagtgtcgtggcactgaccaagacgtatgccactgccgagcccttcatcgatgccaaatatgacgtgcgtgtccagaagattgggcagaactacaaggcctacatgaggacgtcagtgtcagggaactggaagaccaatactggctctgcgatgctggagcaaattgccatgtctgacagatacaagctgtgggtggacacgtgctcagagatttttgggggactggacatctgcgcagtggaagcgctacatggcaaggacggaagggatcacatcattgaggtggtgggttcctccatgccgctcattggtgaccaccaggatgaagacaaacagctcatcgtagagctcgtggtcaacaagatggctcaggccctgccccggcagcgacagcgggatgcctcccctggcaggggctcccatggccagactccgtccccaggggccctgcccttgggccgccagacctcccagcagcccgcagggcccccggctcagcagcgacccccaccacagggcggccctccacagccgggtccaggcccccagcgccagggacccccattgcagcagcgcccgcccccgcagggccagcagcacctttcaggccttggacccccagctggcagccccctgccccagcgccttccaagtcccacctcagcgccccagcagcccgcgtcccaggccgcgccgccgacccagggtcaaggccgccaatcccggccagtggcgggaggccccggggcgcctccagcagcccgcccgcccgcctctccgtctccccagcgccaggcgggccccccacaggctacccgtcagacatccgtctctggcccggctccgccaaaggcctctggggccccaccgggcgggcagcagcgccagggcccgccccagaaacccccaggcccagccggccccacacgccaggccagccaggcgggtcccgtgccccgcactgggccacccaccacgcagcagcctcggcccagcggcccgggccccgctggacgtcccaaaccacagctggcccagaaacccagccaggacgtgccgccacccgccaccgccgctgcagggggacctccgcacccccagctcaacaaatcccagtctctgaccaatgccttcaaccttccagagccagccccgcccaggcccagccttagccaggacgaggtgaaagctgagaccatccgcagcctgaggaagtctttcgccagcctcttctccgactgataccccactctgagaaccccaaaatccctgggcaacccttctctgggccctgaatccatttctcacttttggagtctccaaatcccttgagaacccatctcccggttctccaagattccacctctcattcctcaagatccccgagtaccttgagaaacctgactcctcctggccctaaatccggttctcacatgtggaatccccaagtccttttagaaccccactcgtggtcacttcaggatctacttctgttttagaacctccacattcctgaagacctccgcccctggtttccccagagggcgttttccttcctggaagtgcccaaataccaggcaacccattgcagaatcccttcctggagccctgaagttcctggaaaaccctatttttggtcccaaatctctccagcacacctatttcccatcataattttccaaatcctcaagaaacccctactgttgagccccttcccatggatcttccatccctctgaagatccacatcttcaaatgccacccaacacctagccccacaaggatttcccttcaccagctcccctcaacctcattcaataccttgggagcccctcccacttccaggacccctcggttcccccagggaccccctccccagtttcctgcctctgacagctgtctttaaatatgcaaactccacccatcttcccagaatcctttgcacacggaaggccagtggtctccgcttccccacctttgctgtggtgtctgtgtctgtgactgacgtggcctccttttgtgccgtgcttggcatatgtggtcctcgttcatcgtgccgcctgtggtgatgcgtgcagtgacgctgtttatgtggtccgcacctccccctgaccttcactccttgcctggactcaccccacccctcagcggctctgaaccccaagagaagagtcgggaaacaaaataaacaagcaaaggccca

SEQ ID NO: 30561 - DNA, 3165 bp, Homo sapiens
  source 1..3165: mol_type = unassigned DNA
tgcggtgggcagcggaggagtcgtgtcgtgcctgagagcgcagctgtgctcctgggcaccgcgcagtccgcccccgcggctcctggccagaccacccctaggaccccctgccccaagtcgcagccatgaactacctgcggcgccgcctgtcggacagcaactttatggccaatctgccaaatgggtacatgacagacctgcagcgtccgcagccgcccccaccgccgcccggtgcccacagccccggagccacgcccggtcccgggaccgccactgccgagaggtcctccggggtcgccccagcggcctctccggccgcccctagccccgggtcctcggggggcggtggcttcttctcgtcgctgtccaacgcggtcaagcagaccacggcggcggcagctgccaccttcagcgagcaggtgggcggcggctctgggggcgcaggccgcgggggagccgcctccagggtgctgctggtcatcgacgagccgcacaccgactgggcaaaatacttcaaagggaaaaagatccatggagaaattgacattaaagtagaacaggccgaattctctgatctcaaccttgtggcccatgccaatggtggattctctgtggatatggaagttcttcggaatggggtgaaggtcgtgcggtctctgaagccggattttgtgctgatccgccagcacgccttcagcatggcacgcaacggagactaccgcagtttggtcattgggctgcagtatgctggaatccccagtgttaactccttgcattctgtctacaacttctgtgacaagccctgggtgtttgcccagatggttcgactgcataagaaactggggacagaagaattccctctaattgatcagaccttctaccccaatcacaaagaaatgctcagcagtacaacgtaccccgtggttgtgaagatggggcacgcacactctgggatgggcaaggtcaaggttgacaaccagcatgacttccaggacatcgcaagtgtcgtggcactgaccaagacgtatgccactgccgagcccttcatcgatgccaaatatgacgtgcgtgtccagaagattgggcagaactacaaggcctacatgaggacgtcagtgtcagggaactggaagaccaatactggctctgcgatgctggagcaaattgccatgtctgacagatacaagctgtgggtggacacgtgctcagagatttttgggggactggacatctgcgcagtggaagcgctacatggcaaggacggaagggatcacatcattgaggtggtgggttcctccatgccgctcattggtgaccaccaggatgaagacaaacagctcatcgtagagctcgtggtcaacaagatggctcaggccctgccccggcagcgacagcgggatgcctcccctggcaggggctcccatggccagactccgtccccaggggccctgcccttgggccgccagacctcccagcagcccgcagggcccccggctcagcagcgacccccaccacagggcggccctccacagccgggtccaggcccccagcgccagggacccccattgcagcagcgcccgcccccgcagggccagcagcacctttcaggccttggacccccagctggcagccccctgccccagcgccttccaagtcccacctcagcgccccagcagcccgcgtcccaggccgcgccgccgacccagggtcaaggccgccaatcccggccagtggcgggaggccccggggcgcctccagcagcccgcccgcccgcctctccgtctccccagcgccaggcgggccccccacaggctacccgtcagacatccgtctctggcccggctccgccaaaggcctctggggccccaccgggcgggcagcagcgccagggcccgccccagaaacccccaggcccagccggccccacacgccaggccagccaggcgggtcccgtgccccgcactgggccacccaccacgcagcagcctcggcccagcggcccgggccccgctggacgtcccaaaccacagctggcccagaaacccagccaggacgtgccgccacccgccaccgccgctgcagggggacctccgcacccccagctcaaagccagccccgcccaggcccagccttagccaggacgaggtgaaagctgagaccatccgcagcctgaggaagtctttcgccagcctcttctccgactgataccccactctgagaaccccaaaatccctgggcaacccttctctgggccctgaatccatttctcacttttggagtctccaaatcccttgagaacccatctcccggttctccaagattccacctctcattcctcaagatccccgagtaccttgagaaacctgactcctcctggccctaaatccggttctcacatgtggaatccccaagtccttttagaaccccactcgtggtcacttcaggatctacttctgttttagaacctccacattcctgaagacctccgcccctggtttccccagagggcgttttccttcctggaagtgcccaaataccaggcaacccattgcagaatcccttcctggagccctgaagttcctggaaaaccctatttttggtcccaaatctctccagcacacctatttcccatcataattttccaaatcctcaagaaacccctactgttgagccccttcccatggatcttccatccctctgaagatccacatcttcaaatgccacccaacacctagccccacaaggatttcccttcaccagctcccctcaacctcattcaataccttgggagcccctcccacttccaggacccctcggttcccccagggaccccctccccagtttcctgcctctgacagctgtctttaaatatgcaaactccacccatcttcccagaatcctttgcacacggaaggccagtggtctccgcttccccacctttgctgtggtgtctgtgtctgtgactgacgtggcctccttttgtgccgtgcttggcatatgtggtcctcgttcatcgtgccgcctgtggtgatgcgtgcagtgacgctgtttatgtggtccgcacctccccctgaccttcactccttgcctggactcaccccacccctcagcggctctgaaccccaagagaagagtcgggaaacaaaataaacaagcaaaggccca

SEQ ID NO: 30562 - DNA, 3039 bp, Homo sapiens
  source 1..3039: mol_type = unassigned DNA
gtaaataaaggcagctaaagctgactgctggttgcgcaaaatccccctggctcttctggctaaagtcctaccactccctgtacctggcagcagcctgtcttctgggcctcacctacacacgtctgggtaggagccagtcatctccatccatccacagccatgaatttcctccggcgacgtctctctgacagcagcttcatggccaacctgcctaatggctatatgacggacctgcaacgcccagatagctccaccagctcacctgcttcccccgccatggagaggaggcacccccagcccctggctgcctccttctcctctccaggatccagcctttttagctccctctccagtgccatgaagcaggcccctcaggccacctcaggactgatggagcctccaggtccctccacgcccattgttcaaagacccaggatcctgttggtgatcgatgatgcccatacagactggtcgaagtatttccatgggaagaaggtgaatggagagattgagatccgagtggagcaggctgaattctcagagttgaacctagctgcctatgtgaccgggggctgcatggtggacatgcaggtcgtgagaaatgggaccaaagtggtgagcagatccttcaagccagacttcatcctggtccgccagcatgcctacagcatggccctgggggaagactaccgcagcctggtcatcggcctgcagtatggagggctgcctgctgtcaactctctctactccgtctacaacttctgcagcaagccctgggtgttctctcagctcattaagatcttccattccctgggtcctgagaagttcccgcttgtggagcaaacatttttccccaaccataagccaatggtcacagccccacacttcccggtggtagtcaagctgggacatgcccacgctggaatgggaaagatcaaagtggaaaaccagcttgacttccaggacatcaccagcgtggtcgccatggccaaaacctacgccaccaccgaggccttcatcgactccaagtacgacatccgcatccagaaaattggatccaactacaaggcttacatgagaacctccatctctgggaactggaaggccaacacaggctctgccatgctggagcaggtggccatgacagagaggtacaggctgtgggtggacagctgctcggaaatgtttggcggcctggacatctgtgccgtcaaggctgtccacagcaaggatggcagagattacatcatcgaggtaatggacagctcaatgccgctgattggagagcatgtggaagaggacagacagctgatggccgaccttgttgtctccaaaatgagccagctcccgatgccaggaggcacagcgccctcccccctcagaccttgggctccacagattaaatcagcgaaatccccagggcaagcccagctggggcctcagctaggccagccccagccacgcccacctccgcaaggaggccctcgccaagctcagtctcctcagccccagagatctggaagcccctcccaacagaggctctccccacaaggccagcagcccctgagcccccagtccggatctccacagcagcaaaggtcaccaggctctccgcagctatcccgggcatccagtggcagctccccaaaccaggcctccaagccaggtgccaccctcgcctcacagccccggccccctgtgcagggccgtagtacctcccagcagggtgaagagtccaagaagccagcaccaccccatccgcatctcaacaaatctcagtccctgactaacagcctcagcacatccgacacctcccagcgtgggaccccaagtgaagacgaggccaaggctgaaaccatccgcaacctgaggaagtcttttgccagcctgttctctgactaacgccatccaggctgggaggggaagagtgctctgctacactcgtccccctcctgcctcatcttccttctcagccttggttcctgatgggaacagaatggagggcctgagaacatactttctaaatgcctttgacccaggaaccgattatctatatttgttcccattttccttcaccgtgacattccagcattgtctgactgtgaggtgggcctttgagagcctccaggttcctcaaaacaggcctgagcgatgggcatcacaccctctgcctacccacgtgcctgcttacctgccagataaccaagtgagatgtctgcgagtggctagttttcacattcttactagtgtttggctcacctttgggcaaaggccccctctaggccttgccccacctccatcaaacgcagacactgtagtcagacctcagcaatataggaggcaataatcttttaacagtgttttgcaaacaaacaaaaagagaaaaatcccagccaggggaactcgccacctgcccacgctagttccatccacgctcaagacccgcccttagaccaggcaggcaaaggcccccatcacactcggccactagtggggtcctgaggccaagaaagaaaccagaccctgtatgacaagtggggtctttcagaacacgacagaaacaggggggcccttgtaatgccactcatactcagagcattattcttatttggacagccaagggcagatcacaggttattgtaggaataaagactagtttacaaaggagaaagaggccctggacttcccaaggaaagggtcaggttagggctcctgtacccattctgttccaccactgtttgatctctctggcctcccaccaggaatgccgtttcctttttatggatctgttgggaaccagagagaatcaacagatcaatgacataggatccgaagtgcaatgatagtcacttctagtttggcatttcacaaactctgtacagcaaggtattggtaggttactcaatttcaaaagggccccatggccaaatatgtttaggaaccgctgtttgtatttctttttttggagacgcattgtatataatatatgtcaaaggctttcggaattcctgcaggaaagaaatcagctttgttaaatcc

SEQ ID NO: 30563 - DNA, 3126 bp, Homo sapiens
  source 1..3126: mol_type = unassigned DNA
gctcccgggacccggagcggatcgactggcgggcgccgcgccgaggcaccaccgggcgccgagttcctggcggctcgcacgcaggtaaataaaggcagctaaagctgactgctggttgcgcaaaatccccctggctcttctggctaaagtcctaccactccctgtacctggcagcagcctgtcttctgggcctcacctacacacgtctgggtaggagccagtcatctccatccatccacagccatgaatttcctccggcgacgtctctctgacagcagcttcatggccaacctgcctaatggctatatgacggacctgcaacgcccagatagctccaccagctcacctgcttcccccgccatggagaggaggcacccccagcccctggctgcctccttctcctctccaggatccagcctttttagctccctctccagtgccatgaagcaggcccctcaggccacctcaggactgatggagcctccaggtccctccacgcccattgttcaaagacccaggatcctgttggtgatcgatgatgcccatacagactggtcgaagtatttccatgggaagaaggtgaatggagagattgagatccgagtggagcaggctgaattctcagagttgaacctagctgcctatgtgaccgggggctgcatggtggacatgcaggtcgtgagaaatgggaccaaagtggtgagcagatccttcaagccagacttcatcctggtccgccagcatgcctacagcatggccctgggggaagactaccgcagcctggtcatcggcctgcagtatggagggctgcctgctgtcaactctctctactccgtctacaacttctgcagcaagccctgggtgttctctcagctcattaagatcttccattccctgggtcctgagaagttcccgcttgtggagcaaacatttttccccaaccataagccaatggtcacagccccacacttcccggtggtagtcaagctgggacatgcccacgctggaatgggaaagatcaaagtggaaaaccagcttgacttccaggacatcaccagcgtggtcgccatggccaaaacctacgccaccaccgaggccttcatcgactccaagtacgacatccgcatccagaaaattggatccaactacaaggcttacatgagaacctccatctctgggaactggaaggccaacacaggctctgccatgctggagcaggtggccatgacagagaggtacaggctgtgggtggacagctgctcggaaatgtttggcggcctggacatctgtgccgtcaaggctgtccacagcaaggatggcagagattacatcatcgaggtaatggacagctcaatgccgctgattggagagcatgtggaagaggacagacagctgatggccgaccttgttgtctccaaaatgagccagctcccgatgccaggaggcacagcgccctcccccctcagaccttgggctccacagattaaatcagcgaaatccccagggcaagcccagctggggcctcagctaggccagccccagccacgcccacctccgcaaggaggccctcgccaagctcagtctcctcagccccagagatctggaagcccctcccaacagaggctctccccacaaggccagcagcccctgagcccccagtccggatctccacagcagcaaaggtcaccaggctctccgcagctatcccgggcatccagtggcagctccccaaaccaggcctccaagccaggtgccaccctcgcctcacagccccggccccctgtgcagggccgtagtacctcccagcagggtgaagagtccaagaagccagcaccaccccatccgcatctcaacaaatctcagtccctgactaacagcctcagcacatccgacacctcccagcgtgggaccccaagtgaagacgaggccaaggctgaaaccatccgcaacctgaggaagtcttttgccagcctgttctctgactaacgccatccaggctgggaggggaagagtgctctgctacactcgtccccctcctgcctcatcttccttctcagccttggttcctgatgggaacagaatggagggcctgagaacatactttctaaatgcctttgacccaggaaccgattatctatatttgttcccattttccttcaccgtgacattccagcattgtctgactgtgaggtgggcctttgagagcctccaggttcctcaaaacaggcctgagcgatgggcatcacaccctctgcctacccacgtgcctgcttacctgccagataaccaagtgagatgtctgcgagtggctagttttcacattcttactagtgtttggctcacctttgggcaaaggccccctctaggccttgccccacctccatcaaacgcagacactgtagtcagacctcagcaatataggaggcaataatcttttaacagtgttttgcaaacaaacaaaaagagaaaaatcccagccaggggaactcgccacctgcccacgctagttccatccacgctcaagacccgcccttagaccaggcaggcaaaggcccccatcacactcggccactagtggggtcctgaggccaagaaagaaaccagaccctgtatgacaagtggggtctttcagaacacgacagaaacaggggggcccttgtaatgccactcatactcagagcattattcttatttggacagccaagggcagatcacaggttattgtaggaataaagactagtttacaaaggagaaagaggccctggacttcccaaggaaagggtcaggttagggctcctgtacccattctgttccaccactgtttgatctctctggcctcccaccaggaatgccgtttcctttttatggatctgttgggaaccagagagaatcaacagatcaatgacataggatccgaagtgcaatgatagtcacttctagtttggcatttcacaaactctgtacagcaaggtattggtaggttactcaatttcaaaagggccccatggccaaatatgtttaggaaccgctgtttgtatttctttttttggagacgcattgtatataatatatgtcaaaggctttcggaattcctgcaggaaagaaatcagctttgttaaatccaaa

SEQ ID NO: 30564 - DNA, 1332 bp, Homo sapiens
  source 1..1332: mol_type = unassigned DNA
atgaatttcctccggcgacgtctctctgacagcagcttcatggccaacctgcctaatggctatatgacggacctgcaacgcccagatagctccaccagctcacctgcttcccccgccatggagaggaggcacccccagcccctggctgcctccttctcctctccaggatccagcctttttagctccctctccagtgccatgaagcaggcccctcaggccacctcaggactgatggagcctccaggtccctccacgcccattgttcaaagacccaggatcctgttggtgatcgatgatgcccatacagactggtcgaagtatttccatgggaagaaggtgaatggagagattgagatccgagtggagcaggctgaattctcagagttgaacctagctgcctatgtgaccgggggctgcatggtggacatgcaggtcgtgagaaatgggaccaaagtggtgagcagatccttcaagccagacttcatcctggtccgccagcatgcctacagcatggccctgggggaagactaccgcagcctggtcatcggcctgcagtatggagggctgcctgctgtcaactctctctactccgtctacaacttctgcagcaagccctgggtgttctctcagctcattaagatcttccattccctgggtcctgagaagttcccgcttgtggagcaaacatttttccccaaccataagccaatggtcacagccccacacttcccggtggtagtcaagctgggacatgcccacgctggaatgggaaagatcaaagtggaaaaccagcttgacttccaggacatcaccagcgtggtcgccatggccaaaacctacgccaccaccgaggccttcatcgactccaagtacgacatccgcatccagaaaattggatccaactacaaggcttacatgagaacctccatctctgggaactggaaggccaacacaggctctgccatgctggagcaggtggccatgacagagaggtacaggctgtgggtggacagctgctcggaaatgtttggcggcctggacatctgtgccgtcaaggctgtccacagcaaggatggcagagattacatcatcgaggtaatggacagctcaatgccgctgattggagagcatgtggaagaggacagacagctgatggccgaccttgttgtctccaaaatgagccagctcccgatgccaggaggcacagcgccctcccccctcagaccttgggctccacagattaaatcagcgaaatccccagggcaagcccagctggggcctcagctaggccagccccagccacgcccacctccgcaagttagtttttcacca

SEQ ID NO: 30565 - DNA, 632 bp, Homo sapiens
  source 1..632: mol_type = unassigned DNA
ggattacaggcgtgagccaccctgtccggcgggaatgtaaattaatacggccattatggaaaacggcatggaggttcctcagaaaactaaaaatagaactaccatatgatccagcaggctcacttctggcaggtaaataaaggcagctaaagctgactgctggttgcgcaaaatccccctggctcttctggctaaagtcctaccactccctgtacctggcagcagcctgtcttctgggcctcacctacacacgtctgggtaggagccagtcatctccatccatccacagccatgaatttcctccggcgacgtctctctgacagcagcttcatggccaacctgcctaatggctatatgacggacctgcaacgcccagatagctccaccagctcacctgcttcccccgccatggagaggaggcacccccagcccctggctgcctccttctcctctccaggatccagcctttttagctccctctccagtgccatgaagcaggcccctcaggccacctcaggactgatggagcctccaggtccctccacgcccattgttcaaagacccaggatcctgttggtgatcgatgatgcccatacagactggtcgaagtatttccatgggaagaaggtgaa

SEQ ID NO: 30566 - DNA, 855 bp, Homo sapiens
  source 1..855: mol_type = unassigned DNA
ttgggtttgggaggtcaggtttgtcatgccatttccgatttccagtcatcctgggggcaggatgaaatttcagagtggtttcctggccaagctagaagcagagaatagctatggatacagcacctcgtgtatctatccagcacttacttggctttttctgagtgccaggaactgtgccaagccctagcagcatgaagaatggcctttggggagcttctggggctaagagggacagtaggaggagcaattgcagtgcagggtagtgcggaagactcgagatggagaagaggacggtgaggaagccaggaaggtttcagagaggagcaggtaaataaaggcagctaaagctgactgctggttgcgcaaaatccccctggctcttctggctaaagtcctaccactccctgtacctggcagcagcctgtcttctgggcctcacctacacacgtctgggtaggagccagtcatctccatccatccacagccatgaatttcctccggcgacgtctctctgacagcagcttcatggccaacctgcctaatggctatatgacggacctgcaacgcccagatagctccaccagctcacctgcttcccccgccatggagaggaggcacccccagcccctggctgcctccttctcctctccaggatccagcctttttagctccctctccagtgccatgaagcaggcccctcaggccacctcaggactgatggagcctccaggtccctccacgcccattgttcaaagacccaggatcctgttggtgatcgatgatgcccatacagactggtcgaagtatttccatgggaagaaggtgaatggagagattgagatccgagtggagcag

SEQ ID NO: 30567 - DNA, 974 bp, Homo sapiens
  source 1..974: mol_type = unassigned DNA
gcttatcacaagggcgtcttattcctccactaaacaggtgtctgtggagggcacacctgcttagcaggacacggggcccattcctaaccttgggggctcccagtctggtggtggagacatagtaagcaaggggtgacagtgccgtggataagctgtcccgtgtgaaaccaggtaatggacagctcaatgccgctgattggagagcatgtggaagaggacagacagctgatggccgaccttgttgtctccaaaatgagccagctcccgatgccaggaggcacagcgccctcccccctcagaccttgggctccacagattaaatcagcgaaatccccagggcaagcccagctggggcctcagctaggccagccccagccacgcccacctccgcaaggaggccctcgccaagctcaatctccacagcagcaaaggtcaccaggctctccgcagctatcccgggcatccagtggcagctccccaaaccaggcctccaagccaggtgccaccctcgcctcacagccccggccccctgtgcagggccgtagtacctcccagcagggtgaagagtccaagaagccagcaccaccccatccgcatctcaacaaatctcagtccctgactaacagcctcagcacatccgacacctcccagcgtgggaccccaagtgaagacgaggccaaggctgaaaccatccgcaacctgaggaagtcttttgccagcctgttctctgactaacgccatccaggctgggaggggaagagtgctctgctacactcgtccccctcctgcctcatcttccttctcagccttggttcctgatgggaacagaatggagggcctgagaacatactttctaaatgcctttgacccaggaaccgattatctatatttgttcccattttccttcaccgtgacattccagcattgtctgactgtgaggtgggcctttgagagcctccaggttcctcaaaaca

SEQ ID NO: 30568 - DNA, 497 bp, Homo sapiens
  source 1..497: mol_type = unassigned DNA
cgcgcacgcgcacgggccggcggcgcgcgccgagcggggggcaccgcgcgggtgcagccacgatggaagggggtgcgtacggagcgggcaaagccgggggcgccttcgacccctacaccctggtccggcagccgcacaccatcctgcgcgtcgtgtcttggctgttctccatagtggtgttcggctccatcgtgaacgagggctacctcaacagcgcctccgagggggaggagttctgcatctacaaccgcaaccccaacgcctgcagctatggcgtggccgtgggcgtgctcgccttcctcacctgcctgctgtacctggccctggacgtgtacttcccgcagatcagcagcgtcaaggaccgcaagaaagccgtcctgtccgacatcggtgtctcggcatgggagatgcactcttgaatgtccctctgttcctcggcttccccattttctccccactcaccctctcccccatgtgtggcactgcctattctgccc

SEQ ID NO: 30569 - DNA, 1353 bp, Homo sapiens
  source 1..1353: mol_type = unassigned DNA
gcgcaggggagggggcgggggcgccgcgcacgcgcacgggccggcggcgcgcgccgagcggggggcaccgcgcgggtgcagccacgatggaagggggtgcgtacggagcgggcaaagccgggggcgccttcgacccctacaccctggtccggcagccgcacaccatcctgcgcgtcgtgtcttggctgttctccatagtggtgttcggctccatcgtgaacgagggctacctcaacagcgcctccgagggggaggagttctgcatctacaaccgcaaccccaacgcctgcagctatggcgtggccgtgggcgtgctcgccttcctcacctgcctgctgtacctggccctggacgtgtacttcccgcagatcagcagcgtcaaggaccgcaagaaagccgtcctgtccgacatcggtgtctcggccttctgggctttcctctggttcgtgggattctgctacctggccaaccagtggcaggtctccaagcccaaggacaacccactgaacgaagggacggacgcagcccgggccgccatcgccttctcctttttctccatcttcacctggagcctgaccgcagccctggccgtgcggagattcaaggacctaagcttccaggaggagtacagcacactgttccctgcctcggcacagccgtaggcctccccggcttgcagaggccggcagccctgtatcacccctggcagtgaggtggcaggagcagcctagtgccagaaatgtccaagatgccagggcatgcagggcagtggaaggctggcttgaggaaccaattcaggttctccactgactcattcattccttcaccgcctccttcattgattcttcatgcgttcattcattcagtaaacatttattgagcagctgttttgtgcctagtgatgaattaggtggggtccttggctccaggagcccacaggctggggaggagaaaacaaacacatcaatatctcttccaaatggacagccgtggacagttaccaggtaggtagcggccccatacatgggctgcctagaggcgttcatggtccccattgctgagctgtgggtgcagagcaatagcctctcccttcacagcggtgtgaagagtgacctcactgtccttagggttagcatcctggccgaggatgtcacagggctcctggtctggctctgtcctcatgtgctatgtgaccctgacaaacccgtgcacctctctcagcctcagtccacttacctgaactgaggggtgataatggaccaacctctcaaggctgttgtgccaatgaaacaaaggccagcccagggcttagcacaagcatgctcaataaatgtaagctcttttgttcattca

SEQ ID NO: 30570 - DNA, 4391 bp, Homo sapiens
  source 1..4391: mol_type = unassigned DNA
gcgggtgcagccacgatggaagggggtgcgtacggagcgggcaaagccgggggcgccttcgacccctacaccctggtccggcagccgcacaccatcctgcgcgtcgtgtcttggctgttctccatagtggtgttcggctccatcgtgaacgagggctacctcaacagcgcctccgagggggaggagttctgcatctacaaccgcaaccccaacgcctgcagctatggcgtggccgtgggcgtgctcgccttcctcacctgcctgctgtacctggccctggacgtgtacttcccgcagatcagcagcgtcaaggaccgcaagaaagccgtcctgtccgacatcggtgtctcggccttctgggctttcctctggttcgtgggattctgctacctggccaaccagtggcaggtctccaagcccaaggacaacccactgaacgaagggacggacgcagcccgggccgccatcgccttctcctttttctccatcttcacctgggcgggccaggctgtgctggccttccagcggtaccagattggcgccgactcggccctcttctcccaggactacatggaccccagccaggactccagcatgccttacgcgccctacgtggagcccactgggccggatcccgccggtatgggcggcacctaccagcagccggccaacaccttcgacaccgagccccagggctaccagtcgcagggctactgagccacagtgaccgcctgcccccgcccctccccatctgtcccctctctccacacccagcccctgctcctgcccaggctgccctgcccagcgcctcatcagcctctgccttgtcccactgaggtccagggtagctcggggcaggggtggggcagtccagtgttggggactgtctacgtatgtgcaagtatatcccagggcatgtgccccgcaggggcctagagggtgggggccaggggtatttgcattcatacattgtgtcatcaagcattccttgagcgcctactgggcatccggcctgtgctgggcatgggtggtgacattggcagaaatggccactggaaaggggagcgatgagctgtggaggaagccctggtggtaccagaggccagaatggtgggaaagacagatccagataatgctgggaagtgtggctacaccgtggcttggtcatagggtgagtgtaaacacccacaggacactgggggctgtcaccctgctctggcagtcctgctaagagtgtcagggccgtctccattttatggttgaggaaactgaggtctagagaggtcaagattacttgcccagaatcactcaggcagctagtgatagaggtggggccaagcccaggctgcccgactgcagaccacgtgctcttccctggccacccacctcctaccatccccacgcttggggcttccctgctcagtgttactgtcattctgggaggccttggggccctcagccccttgagacaccctgattctgctgcatgccaagggcctgttctgccccagctgttcctcctcccctggggacagccccacctccgggtccctccacccacatccccctggtcctacccctggcccttggcctcctccaagagggctcaccccgggtgctgctctgtgctctgcgtgtcccacagacgcttgttccagggggctccagcaaaccccttcgtggtctctcaaaggactgatcactgtccttgcctctaggaggggtcactaagcccttacctagggctgggtggacaacaaggcacagatgagggtgtgactggcccgaggtcacggtgagtgagtggcaaagctggccctgacgcctgggtttcttggccccagctgcccagcaggtgcctcgattccctgcccttgtgacctcccaggaaacagaactgatctgggacactatgtcacctctcctctcatctggggtcagtcagggttcgggggctgcagcagccaagcgcatgagaggtgtttccttggccttccagaaggcccactgtggagccagcctccctatgggaggcagagcggcaaggacagggctttggaatcagccaggtcggctcctgggctgtggccgtggagagacactgcccccaggatgacacaggcaagagcccctgaggcatgggaggcccagggaagaccatgggctgtaggggagagtgtggcaggtgacccaaaggcccaaagagggccgtggggcctgaggaggtcataatctcttctgagtgggggcaggtcgattcttgcacaaggtgggctcttcactgagccataagggacagggaggtatgggagagcgctgggggcccatccccctgtccacccagtgtccactggcctgtccttcagggagcagagcagagcaggtggtggacgggcccagtgctgggtgttttcaccaccatccccccatcccccatctaagaatcctaagaggcaggcgatccctcacctgcttactcactcagcagttacccggcccctgtgctggagataccaagggcatgggtggtccctgcttcgatggccccaaagctgggccagagttaagggaaagaggaggaagtcctaagcagagaagtagcaccattatccccatttaacagaagggaaactgaggctcggcaagcataggcgagttggcagtggaacacggatctaaactcaggtgtgtccaagtcctcccaaaggacagcagtgatggagaggaccccagccagctgtgtgacagctggttgttgctgacttcattttccaatccggagaaggggctctgtccacagtcccccgccgccaggtggcccacatgggaccagcatgggggcaggttatctgttggcctgaagagtgaaacctgtaccaggccaaaggtgagggcgtgagtgagggcaggagtgtttatggcagagtgaagttctgtgcccaccacaagaggctgtgagatgttctgaccctcacccactgtccaccaaaagcctctcctgctgatgggcactaggagacctcagggtactgcccatctgtttctcctcgggtgccagccagctgctggtgatcctcagccggagggcagggtaccaggtaagcttaactccatcttgggtgtttgtgacaggccctgcctgccaccctaggcagggaaagctgtcaagactcctgccaggaatggggggtgctgagtcatctcacgaagaatccctcactcttcccgggttcagcccagaagcccttccaggcatgatcttccccatcaggctgggctctggcagggacctgcccaggatggagatgagagagggtgagagatggagggcgagatttggatgggacccagggctcctgactctgccctggaaggttcatggggaaactcgctccttctgttggcagaggacagcccctggggaaccccaggcccaactctgtccggtatcccttttcctcccagctgccctcccctacttctcccttgctcccaaagctttccttggagaagggccctcctgcagctggaccctgcagggtggctccctcctccccatcaagcacaagagagggcccaggaaaaaaggtttcacataagtgtagagtcgcaaggacgcttagagtcggcagagtctggggtagggagacagcgacttgtccaaggtcaagcacagagggagaggttcaggagtcaggtcttctgccttctgagttggctcatcctgggcagtcacagactgtcctgcctgcacggctcctatccacctgggggtgtcgcagttgaggggctaattcccaggggactgacgttagttccctactccatccttccctggtgattcttgatcttcaaagcctcggggatcccaggtttccccatgtaactgagacaccctgcctgttagccctgggagacccctaaccttggcccaagacccctttgattctctaaggagcacgaaagggggaatgcccctcccaggagtttatgggagaagggactgggccggctgcctcccagcgatgcacttgacctgacactccccatgtcctggtgcgcacagcccttgtcggtgccccggcccctcccgcagcgttactgcctgtgtatagtataaatatatatattttctatatataagatgtataatataaggctccacaaatatatctgtgtgtgtgtgtgcgtgtgtgtgcggtgaagggcggtccccatcctgggcccccactctagacccccccaccacctggttaagtctcgagtgaatccagtggccccgtggcaccctcctttatgacatccatccatctgtggtgaaccaagtgaaggtggtgacttctggtgacatagtaataaagtgaagactcagaacccaccagcgattgcaa

SEQ ID NO: 30571 - DNA, 1295 bp, Homo sapiens
  source 1..1295: mol_type = unassigned DNA
ccagcaggcatgcctccttggtctcatgttgaccttagagtttgggattctggaattcgatccttcatggataggcagctggacacagaggtcgtgggtgagctggaggagcaggcccggatgtgagctgttctccatagtggtgttcggctccatcgtgaacgagggctacctcaacagcgcctccgagggggaggagttctgcatctacaaccgcaaccccaacgcctgcagctatggcgtggccgtgggcgtgctcgccttcctcacctgcctgctgtacctggccctggacgtgtacttcccgcagatcagcagcgtcaaggaccgcaagaaagccgtcctgtccgacatcggtgtctcggccttctgggctttcctctggttcgtgggattctgctacctggccaaccagtggcaggtctccaagcccaaggacaacccactgaacgaagggacggacgcagcccgggccgccatcgccttctcctttttctccatcttcacctggagcctgaccgcagccctggccgtgcggagattcaaggacctaagcttccaggaggagtacagcacactgttccctgcctcggcacagccgtaggcctccccggcttgcagaggccggcagccctgtatcacccctggcagtgaggtggcaggagcagcctagtgccagaaatgtccaagatgccagggcatgcagggcagtggaaggctggcttgaggaaccaattcaggttctccactgactcattcattccttcaccgcctccttcattgattcttcatgcgttcattcattcagtaaacatttattgagcagctgttttgtgcctagtgatgaattaggtggggtccttggctccaggagcccacaggctggggaggagaaaacaaacacatcaatatctcttccaaatggacagccgtggacagttaccaggtaggtagcggccccatacatgggctgcctagaggcgttcatggtccccattgctgagctgtgggtgcagagcaatagcctctcccttcacagcggtgtgaagagtgacctcactgtccttagggttagcatcctggccgaggatgtcacagggctcctggtctggctctgtcctcatgtgctatgtgaccctgacaaacccgtgcacctctctcagcctcagtccacttacctgaactgaggggtgataatggaccaacctctcaaggctgttgtgccaatgaaacaaaggccagcccagggcttagcacaagcatgctcaataaatgtaagctcttttgttcattca

SEQ ID NO: 30572 - DNA, 564 bp, Homo sapiens
  source 1..564: mol_type = unassigned DNA
accgcgcgggtgcagccacgatggaagggggtgcgtacggagcgggcaaagccgggggcgccttcgacccctacaccctggtccggcagccgcacaccatcctgcgcgtcgtgtcttggctgttctccatagtggtgttcggctccatcgtgaacgagggctacctcaacagcgcctccgagggggaggagttctgcatctacaaccgcaaccccaacgcctgcagctatggcgtggccgtgggcgtgctcgccttcctcacctgcctgctgtacctggccctggacgtgtacttcccgcagatcagcagcgtcaaggaccgcaagaaagccgtcctgtccgacatcggtgtctcggccttctgggctttcctctggttcgtgggattctgctacctggccaaccagtggcaggtctccaagcccaaggacaacccactgaacgaagggacggacgcagcccgggccgccatcgccttctcctttttctccatcttcacctggagatctggggccacatcacctccatagccccatcccaagagccctccccataacccacagc

SEQ ID NO: 30573 - DNA, 1694 bp, Homo sapiens
  source 1..1694: mol_type = unassigned DNA
ggcggcggcagcggcggcgacggcgacatggagagcggggcctacggcgcggccaaggcgggcggctccttcgacctgcggcgcttcctgacgcagccgcaggtggtggcgcgcgccgtgtgcttggtcttcgccttgatcgtgttctcctgcatctatggtgagggctacagcaatgcccacgagtctaagcagatgtactgcgtgttcaaccgcaacgaggatgcctgccgctatggcagtgccatcggggtgctggccttcctggcctcggccttcttcttggtggtcgacgcgtatttcccccagatcagcaacgccactgaccgcaagtacctggtcattggtgacctgctcttctcagctctctggaccttcctgtggtttgttggtttctgcttcctcaccaaccagtgggcagtcaccaacccgaaggacgtgctggtgggggccgactctgtgagggcagccatcaccttcagcttcttttccatcttctcctggggtgtgctggcctccctggcctaccagcgctacaaggctggcgtggacgacttcatccagaattacgttgaccccactccggaccccaacactgcctacgcctcctacccaggtgcatctgtggacaactaccaacagccacccttcacccagaacgcggagaccaccgagggctaccagccgccccctgtgtactgagcggcggttagcgtgggaagggggacagagagggccctcccctctgccctggactttcccatgagcctcctggaactgccagcccctctctttcacctgttccatcctgtgcagctgacacacagctaaggagcctcatagcctggcgggggctggcagagccacaccccaagtgcctgtgcccagagggcttcagtcagccgctcactcctccagggcacttttaggaaagggtttttagctagtgtttttcctcgcttttaatgacctcagccccgcctgcagtggctagaagccagcaggtgcccatgtgctactgacaagtgcctcagcttccccccggcccgggtcaggccgtgggagccgctattatctgcgttctctgccaaagactcgtgggggccatcacacctgccctgtgcagcggagccggaccaggctcttgtgtcctcactcaggtttgcttcccctgtgcccactgctgtatgatctgggggccaccaccctgtgccggtggcctctgggctgcctcccgtggtgtgagggcggggctggtgctcatggcacttcctccttgctcccacccctggcagcagggaagggctttgcctgacaacacccagctttatgtaaatattctgcagttgttacttaggaagcctggggagggcaggggtgccccatggctcccagactctgtctgtgccgagtgtattataaaatcgtgggggagatgcccggcctgggatgctgtttggagacggaataaatgttttctcattcagtctccagtcattggttgagccacagcctaggggttggaggaagactccactctgggtacacccttaggggctggctttatggaacttgtagtttgaacaaggcagtggcaatccgccccctccagcctgcctggctggcccccttccctctgtctggggtcgcattccgcacaagcctttcatcaacatcttaaaatagtaactgtg

SEQ ID NO: 30574 - DNA, 2051 bp, Homo sapiens
  source 1..2051: mol_type = unassigned DNA
cgccgcggccggcgcgcgctcccgggaggcggcagcggctgcagcgttggtagcatcagcatcagcatcagcggcagcggcagcggcctcgggcggggccggccggacggacaggcggacagaaggcgccaggggcgcgcgtcccgcccgggccggccatggagggcgcctccttcggcgcgggccgcgcaggggccgccctggaccccgtgagctttgcgcggcggccccagaccctgctccgggtcgcgtcctgggtgttctccatcgccgtcttcgggcccatcgtcaacgagggctacgtgaacaccgacagcggccccgagctgcgctgcgtgttcaacgggaacgcgggcgcctgccgcttcggcgtcgcgctgggcctcggagccttcctcgcctgcgccgccttcctgctgctcgatgtgcgcttccagcaaatcagcagcgtccgcgaccgccggcgcgcggtgttgctggacctgggcttctcaggactctggtccttcctgtggttcgtgggcttctgcttcctcaccaatcagtggcagcgcacggcgccagggccggccacgacgcaggcgggggacgcggcgcgggccgccatcgccttcagcttcttctccatcctcagctgggtggcgctcaccgtgaaggccctgcagcggttccgcctgggcaccgacatgtcactcttcgccaccgaacagctgagcaccggggcgagccaggcctaccccggctatccggtgggcagcggcgtggagggcaccgagacctaccagagcccgcccttcaccgagaccctggacaccagccccaaagggtaccaggtgcccgcctactagcggctggcaggcacagaccagggctccaaggccaccccaccaacgcaggccccagggtctccgggacctcccttgggtccttccagctcagtgccgcggacagagtaggtggccgctttgcgccatccggggccaagagggggtggacccgcgtgtctgggctgcccctgccaagttcccccagtccctcagcacctggccccaggactgaggtcctgagaaggggatagcactgcccaggacgtgtgtccctagcctggaatggactggcctggggaaggctttcccctcttgggccacacctgctcactctggggttgggggtccagctgccctctacgatcaggtgcaggggctgcccaggacaaagcgggggcaggggaaagacaccaccctcgccccaagactggggatcctggccactgttcccatcccatgtccctgtgggtagtgactgtctcgtttctgtcatggtggtgcgtcccgtccggagccactctccactttctctcacaggctgctagaacagcccagccctgtcagtgttgtgatcatggtccagtcttcgggtttcacctcctagtactccacaagctgctcctctctctgtggccccggcccctgcccaggtgtgggtggttctggccaggaaggcacaaggtagctgtgggccaagacaccagccctgtcctagcccttcagtaagaccttgccaggagaggagaaggatgcctgggtgccaggcaagacaagcccctcagcaggagagaggcccagaggctccagctggccaccgtgccccacaagatggcccctgtgtggttccctttaccttggcttcctggcccagtccctgcctctccacctgcaccctgcttcctggcccagtcccaggttggagtccctctgcatagctgactactcatgcattgctcaaagctggcttttcacattaagtcaacaccaaacgtggttgccacatttcatcagacagacacctccctctggagatgcagttgagtgacaaccttgttacattgtagcctagaccaattctgtgtggatatttaagtgaacatgtttacaatttttgtatatatcactctctccctctcctgaaagaccagagattgtgtattttcagtgtcccatgttccgactgcaccttctttacaataaagactgtaactgagctgactgtga

SEQ ID NO: 30575 - DNA, 1213 bp, Homo sapiens
  source 1..1213: mol_type = unassigned DNA
atcagcatcagcatcagcggcagcggcagcggcctcgggcggggccggccggacggacaggcggacagaaggcgccaggggcgcgcgtcccgcccgggccggccatggagggcgcctccttcggcgcgggccgcgcaggggccgccctggaccccgtgagctttgcgcggcggccccagaccctgctccgggtcgcgtcctgggtgttctccatcgccgtcttcgggcccatcgtcaacgagggctacgtgaacaccgacagcggccccgagctgcgctgcgtgttcaacgggaacgcgggcgcctgccgcttcggcgtcgcgctgggcctcggagccttcctcgcctgcgccgccttcctgctgctcgatgtgcgcttccagcaaagcgggggcaggggaaagacaccaccctcgccccaagactggggatcctggccactgttcccatcccatgtccctgtgggtagtgactgtctcgtttctgtcatggtggtgcgtcccgtccggagccactctccactttctctcacaggctgctagaacagcccagccctgtcagtgttgtgatcatggtccagtcttcgggtttcacctcctagtactccacaagctgctcctctctctgtggccccggcccctgcccaggtgtgggtggttctggccaggaaggcacaaggtagctgtgggccaagacaccagccctgtcctagcccttcagtaagaccttgccaggagaggagaaggatgcctgggtgccaggcaagacaagcccctcagcaggagagaggcccagaggctccagctggccaccgtgccccacaagatggcccctgtgtggttccctttaccttggcttcctggcccagtccctgcctctccacctgcaccctgcttcctggcccagtcccaggttggagtccctctgcatagctgactactcatgcattgctcaaagctggcttttcacattaagtcaacaccaaacgtggttgccacatttcatcagacagacacctccctctggagatgcagttgagtgacaaccttgttacattgtagcctagaccaattctgtgtggatatttaagtgaacatgtttacaatttttgtatatatcactctctccctctcctgaaagaccagagattgtgtattttcagtgtcccatgttccgactgcaccttctttacaataaagactgtaactgagct

SEQ ID NO: 30576 - DNA, 1002 bp, Homo sapiens
  source 1..1002: mol_type = unassigned DNA
ggcgaaaggaagggcgggccctcaggtgacgcagattggccctccagagaaggggcggccccttctcaggtgccgtcacccccaaacctcagcactgccattccaggtccttaaaggggagaccgcgattctaagaagcagccaagcccagggctggcctgaagcccccggacggcagtgcccagcaggcagcgcccagcaccctggctcccacctcccagtggccccaaaggaaaacagctgccatgcacatccccaaaagcctccaggagctggccaacagcgaagccgtgcagtttctgagaaggcccaagaccatcacgcgggtcttcgaaggggtcttctccctgatcgtcttctcctccctgctgaccgacggctaccagaacaagatggagtctccgcagctccactgcattctcaacagcaacagcgtggcctgcagctttgccgtgggagccggcttcctggccttcctcagctgcctggccttcctcgtcctggacacacaggagacccgcattgccggcacccgcttcaagacagccttccagctcctggacttcatcctggctgttctctgggcagttgtctggttcatgggtttctgcttcctggccaaccaatggcagcattcgccgcccaaagagttcctcctggggagcagcagtgcccaggcagccatcgccttcaccttcttctccatccttgtctggatattccaggcctacctggcattccaggacctccgaaatgatgctccagtcccttacaagcgcttcctggatgagggtggcatggtgctgaccaccctccccttgccctctgccaacagccctgtgaacatgcccaccactggccccaacagcctgagttatgctagctctgccctgtccccctgtctgaccgctccaaagtccccccggcttgctatgatgcctgacaactaaatatccttatccaaatcaataaagagagaatcctccctccagaagggtttct

SEQ ID NO: 30577 - DNA, 4722 bp, Homo sapiens
  source 1..4722: mol_type = unassigned DNA
atggcgttcagtaaaggattccggatctatcacaaattggatcccccacctttcagcctcatagtggaaactaggcataaggaagaatgtctcatgttcgagtctggggctgtcgctgtgctctcatctgcagaaaaagaggcaatcaagggtacatactccaaagtactggatgcatatggactcttaggtgttctgcggttaaatcttggtgatactatgttacattatctggtcctagtcactggatgtatgtctgttggaaaaattcaagaatctgaagttttccgagttacttccactgagtttatatcactgcgaatcgattcttcagatgaggatcgcatttcagaagtgcggaaagttttgaattcaggaaacttttattttgcatggtctgcatctggcatcagtttagatttgagtcttaatgcgcatcgtagcatgcaagaacagacaactgataatagatttttctggaatcagtctttgcatttgcatctcaaacactatggcgtgaattgtgatgactggttattacgtcttatgtgtggaggagtagaaatcagaacaatttatgctgctcataaacaggcgaaggcttgcctcatttcaagattaagctgtgaacgagctgggaccaggtttaatgtccggggaacaaatgatgatggtcatgttgccaattttgtagaaacagaacaggttgtgtacttagatgactcagtttcttccttcatacaaatccgaggatctgttccattgttctgggagcaaccagggttgcaagtgggatctcatcgtgtccgtatgtcaaggggatttgaagccaatgcacctgcttttgacaggcattttagaacacttaagaacttatatggtaaacaaataatagtaaatttgcttggatctaaggaaggtgaacatatgctaagtaaagctttccagagtcatttgaaagcttctgaacatgctgctgatatccagatggtgaattttgactatcatcaaatggttaagggaggaaaggcagaaaaattacatagtgttcttaaacctcaagtccagaagtttctagattatggatttttttatttcaatggaagtgaagttcaaagatgccagagtggtacagttcgaacaaactgcttggattgtcttgatagaacaaatagtgtgcaggcatttcttggcttagagatgctagctaaacagttggaagctcttggtttagctgaaaagcctcagttggtgactcgctttcaagaagtttttcggtcaatgtggtccgtgaatggtgattcaatcagtaagatatatgcaggaactggagctcttgaagggaaagcgaagttaaaagatggtgctcgctctgttacccgaacaattcagaataacttctttgacagctccaagcaagaggccattgatgttttgctactgggaaatactctgaatagtgatttagctgacaaagctcgagcacttttaactactggaagtttgcgtgtttctgagcagacattacagtcagcatcttctaaagtactaaagagcatgtgtgagaatttctacaaatattcaaagcctaagaaaattcgagtatgtgtcggaacctggaatgtgaatggtgggaagcaatttcgcagcatagcttttaagaatcagacactcactgactggcttcttgatgcacccaagttagctggcatccaggagtttcaagataaaagaagtaagccaactgatatatttgcaattggttttgaagaaatggtagaattgaatgctggaaacattgtgagtgcaagcacaacaaatcagaagctctgggctgtagaacttcagaagacaatctccagagacaacaagtatgtgctgctggcttctgaacagttggtgggcgtctgtttgtttgtttttatcagaccacagcatgctccttttatcagggatgttgcagttgatactgtgaagactggaatgggaggtgcaactggaaataagggagcagttgcaatccgaatgctcttccatacaaccagcctttgcttcgtctgtagccactttgctgcagggcagtcacaagtcaaagaaagaaatgaagattttatagaaatagcacgaaaattgagttttcctatgggaaggatgctattttcccatgactatgtattttggtgtggtgatttcaactatcgaatcgatctccctaacgaagaagttaaagagctcataagacagcaaaattgggattctcttatagcaggagatcaacttatcaatcagaaaaatgctggacaggtttttagaggatttttagaaggaaaggtaacctttgctccgacatataagtatgacttgttttctgacgactatgacaccagtgaaaagtgccgcacccctgcctggacagaccgtgtcctttggagaaggaggaaatggccttttgatagatcagctgaagatctagatcttctaaatgctagttttcaagatgaaagcaaaattctgtacacgtggactccaggcactttgctgcactatggaagagctgagctgaagacttctgaccacaggcctgtcgttgccctgattgatatagatatatttgaagttgaagctgaagagaggcaaaacatttataaagaagtaattgcagttcagggtccaccagatggtacagtattggtctcaatcaaaagttctttaccagaaaataatttttttgatgatgccttgattgatgagcttctgcagcagtttgcaagttttggtgaagttatacttataagatttgtagaagataaaatgtgggttacatttttggagggaagctctgccttgaatgttctgagcctaaatggtaaagagttattgaatcggactataactattgctttaaaaagtccagactggatcaaaaatttggaagaagaaatgagtttagagaaaattagcattgcattgccatcatcaacaagctctaccctgcttggtgaagatgcagaggttgcagcagattttgatatggaaggtgatgttgatgactatagtgctgaagtggaggaacttcttcctcagcatctccagccatcttcaagttccggccttggtacttcccccagctcttcaccccgaactagtccctgccagtcacctacaatatcagagggtcctgtaccttcccttcccatcagaccaagccgagcaccgtcaagaactcctgggcctcccagtgcacagagttctcctattgacgcgcagccagcaacgccgctgccgcagaaagaccccgcccagcccttggagcccaagcggccgccgccgccccgcccggtcgcccctcccacacgcccggctcccccacagagacctcctccgccttcaggggctaggagtcctgcacccactagaaaggaatttggaggtattggagcccctcccagtcctggggtagctaggagagagatggaagcacccaaaagccctggaacaacaaggaaagataatataggacgcagtcagccttcacctcaagcaggacttgcaggcccaggacctgctggatacagtacagccagaccgacgattcctcctcgtgctggagttatcagtgccccacagagccacgcgcgggcatctgctggaagactgactcctgaaagccaaagcaaaacatcagaaacgtcgaaaggttcaactttccttcctgaaccactgaagcctcaggctgcttttcctccgcagtcttctttgcccccgcctgctcaaaggttgcaagagcctcttgtccctgtggcagcacctatgcctcagtctggcccccagccaaatttggaaaccccaccacaaccaccacctcgaagcaggtcatcccatagcttgccttcagaagcttcctcacaaccgcaagtaaaaacaaatggaatctctgatggcaaaagagaatcaccattaaagattgacccatttgaagatctgtcatttaatctgcttgctgtatcaaaggctcagctatctgttcaaacgtcacctgttcccaccccagacccaaagaggttgattcagttgccttctgcaacgcaaagtaatgttttgagttctgtaagttgcatgccaacaatgcctccaattccagctcggagtcaatcccaggaaaatatgcgaagttctccaaacccatttattactggcttgaccaggacaaatcctttcagtgacaggactgctgctcctggaaacccatttagagccaagtctgaagaatcagaggcaacttcatggttctccaaagaagagcccgttactatcagtcctttcccttctctgcagcctcttggtcataacaaaagcagggcttcatcttcacttgatggctttaaggacagttttgatctacagggccagtctacattaaaaattagcaacccgaaaggatgggtaaccttcgaggaagaagaggattttggtgtgaaagggaagtcaaagtcagcttgttcagacttactgggtaatcagccaagttcattttctggctccaacctgacattgaatgatgactggaataaaggtacaaatgtctccttctgtgtgttgccgtcaagaagacctcctccacctcctgtccctctgctcccgcccggcaccagccctccagtagatcctttcacgaccttggcctctaaggcttcacccacactggactttacagaaagataa

SEQ ID NO: 30578 - DNA, 7059 bp, Homo sapiens
  source 1..7059: mol_type = unassigned DNA
aagccggcggggggcggggagctgctgcggccagacccacgggcagccgggcgggcggacgcctccaagaccagtctctgcctccgcagcgtcagcgggagcgggctgcctccgaagaaaggagaatggcgttcagtaaaggattccggatctatcacaaattggatcccccacctttcagcctcatagtggaaactaggcataaggaagaatgtctcatgttcgagtctggggctgtcgctgtgctctcatctgcagaaaaagaggcaatcaagggtacatactccaaagtactggatgcatatggactcttaggtgttctgcggttaaatcttggtgatactatgttacattatctggtcctagtcactggatgtatgtctgttggaaaaattcaagaatctgaagttttccgagttacttccactgagtttatatcactgcgaatcgattcttcagatgaggatcgcatttcagaagtgcggaaagttttgaattcaggaaacttttattttgcatggtctgcatctggcatcagtttagatttgagtcttaatgcgcatcgtagcatgcaagaacagacaactgataatagatttttctggaatcagtctttgcatttgcatctcaaacactatggcgtgaattgtgatgactggttattacgtcttatgtgtggaggagtagaaatcagaacaatttatgctgctcataaacaggcgaaggcttgcctcatttcaagattaagctgtgaacgagctgggaccaggtttaatgtccggggaacaaatgatgatggtcatgttgccaattttgtagaaacagaacaggttgtgtacttagatgactcagtttcttccttcatacaaatccgaggatctgttccattgttctgggagcaaccagggttgcaagtgggatctcatcgtgtccgtatgtcaaggggatttgaagccaatgcacctgcttttgacaggcattttagaacacttaagaacttatatggtaaacaaataatagtaaatttgcttggatctaaggaaggtgaacatatgctaagtaaagctttccagagtcatttgaaagcttctgaacatgctgctgatatccagatggtgaattttgactatcatcaaatggttaagggaggaaaggcagaaaaattacatagtgttcttaaacctcaagtccagaagtttctagattatggatttttttatttcaatggaagtgaagttcaaagatgccagagtggtacagttcgaacaaactgcttggattgtcttgatagaacaaatagtgtgcaggcatttcttggcttagagatgctagctaaacagttggaagctcttggtttagctgaaaagcctcagttggtgactcgctttcaagaagtttttcggtcaatgtggtccgtgaatggtgattcaatcagtaagatatatgcaggaactggagctcttgaagggaaagcgaagttaaaagatggtgctcgctctgttacccgaacaattcagaataacttctttgacagctccaagcaagaggccattgatgttttgctactgggaaatactctgaatagtgatttagctgacaaagctcgagcacttttaactactggaagtttgcgtgtttctgagcagacattacagtcagcatcttctaaagtactaaagagcatgtgtgagaatttctacaaatattcaaagcctaagaaaattcgagtatgtgtcggaacctggaatgtgaatggtgggaagcaatttcgcagcatagcttttaagaatcagacactcactgactggcttcttgatgcacccaagttagctggcatccaggagtttcaagataaaagaagtaagccaactgatatatttgcaattggttttgaagaaatggtagaattgaatgctggaaacattgtgagtgcaagcacaacaaatcagaagctctgggctgtagaacttcagaagacaatctccagagacaacaagtatgtgctgctggcttctgaacagttggtgggcgtctgtttgtttgtttttatcagaccacagcatgctccttttatcagggatgttgcagttgatactgtgaagactggaatgggaggtgcaactggaaataagggagcagttgcaatccgaatgctcttccatacaaccagcctttgcttcgtctgtagccactttgctgcagggcagtcacaagtcaaagaaagaaatgaagattttatagaaatagcacgaaaattgagttttcctatgggaaggatgctattttcccatgactatgtattttggtgtggtgatttcaactatcgaatcgatctccctaacgaagaagttaaagagctcataagacagcaaaattgggattctcttatagcaggagatcaacttatcaatcagaaaaatgctggacaggtttttagaggatttttagaaggaaaggtaacctttgctccgacatataagtatgacttgttttctgacgactatgacaccagtgaaaagtgccgcacccctgcctggacagaccgtgtcctttggagaaggaggaaatggccttttgatagatcagctgaagatctagatcttctaaatgctagttttcaagatgaaagcaaaattctgtacacgtggactccaggcactttgctgcactatggaagagctgagctgaagacttctgaccacaggcctgtcgttgccctgattgatatagatatatttgaagttgaagctgaagagaggcaaaacatttataaagaagtaattgcagttcagggtccaccagatggtacagtattggtctcaatcaaaagttctttaccagaaaataatttttttgatgatgccttgattgatgagcttctgcagcagtttgcaagttttggtgaagttatacttataagatttgtagaagataaaatgtgggttacatttttggagggaagctctgccttgaatgttctgagcctaaatggtaaagagttattgaatcggactataactattgctttaaaaagtccagactggatcaaaaatttggaagaagaaatgagtttagagaaaattagcattgcattgccatcatcaacaagctctaccctgcttggtgaagatgcagaggttgcagcagattttgatatggaaggtgatgttgatgactatagtgctgaagtggaggaacttcttcctcagcatctccagccatcttcaagttccggccttggtacttcccccagctcttcaccccgaactagtccctgccagtcacctacaatatcagagggtcctgtaccttcccttcccatcagaccaagccgagcaccgtcaagaactcctgggcctcccagtgcacagagttctcctattgacgcgcagccagcaacgccgctgccgcagaaagaccccgcccagcccttggagcccaagcggccgccgccgccccgcccggtcgcccctcccacacgcccggctcccccacagagacctcctccgccttcaggggctaggagtcctgcacccactagaaaggaatttggagcacccaaaagccctggaacaacaaggaaagataatataggacgcagtcagccttcacctcaagcaggacttgcaggcccaggacctgctggatacagtacagccagaccgacgattcctcctcgtgctggagttatcagtgccccacagagccacgcgcgggcatctgctggaagactgactcctgaaagccaaagcaaaacatcagaaacgtcgaaaggttcaactttccttcctgaaccactgaagcctcaggctgcttttcctccgcagtcttctttgcccccgcctgctcaaaggttgcaagagcctcttgtccctgtggcagcacctatgcctcagtctggcccccagccaaatttggaaaccccaccacaaccaccacctcgaagcaggtcatcccatagcttgccttcagaagcttcctcacaaccgcaacaggagcaaccatcagggtaacaggtaaaaacaaatggaatctctgatggcaaaagagaatcaccattaaagattgacccatttgaagatctgtcatttaatctgcttgctgtatcaaaggctcagctatctgttcaaacgtcacctgttcccaccccagacccaaagaggttgattcagttgccttctgcaacgcaaagtaatgttttgagttctgtaagttgcatgccaacaatgcctccaattccagctcggagtcaatcccaggaaaatatgcgaagttctccaaacccatttattactggcttgaccaggacaaatcctttcagtgacaggactgctgctcctggaaacccatttagagccaagtctgaagaatcagaggcaacttcatggttctccaaagaagagcccgttactatcagtcctttcccttctctgcagcctcttggtcataacaaaagcagggcttcatcttcacttgatggctttaaggacagttttgatctacagggccagtctacattaaaaattagcaacccgaaaggatgggtaaccttcgaggaagaagaggattttggtgtgaaagggaagtcaaagtcagcttgttcagacttactgggtaatcagccaagttcattttctggctccaacctgacattgaatgatgactggaataaaggtacaaatgtctccttctgtgtgttgccgtcaagaagacctcctccacctcctgtccctctgctcccgcccggcaccagccctccagtagatcctttcacgaccttggcctctaaggcttcacccacactggactttacagaaagataacgccatgcaatagaaaacagtgggtacttgcttttggcaggatagagctaagagaattgggcattagtatttcattatgtgcaataagtcattgtaagtgcactgatatcttcacaaaacaccactatttgatgtgtacagagttggactatgtgtatattggaaataaggaaaaacccttctcattgttaactggagttttgatgtatttctctttggatgaataggagacagtagtagccataaaaagtacttatactttagaaaacagtccttattcagaaacttttcggtcagtcttctgaagaatctcaaaaagcccacccaactttcagctgacatttccaccagccctctcatacttgttaacaattggtatctttgagtatttaccaaagagctgccaaggttacagtgaacagagttttgaaaggcattgctttaaaggaaaaaagtataggtatgtgtacatatataatacatacaaacacatgtacttctgtatacatttacatatttttacaattcatactttaatttctaggctataactcagaccaaattatacctaaaagttccaacaaagtccctttttcaatatcacattaccaaaaagatggctgcaaatgtaatttggacctttcattaattttgttttcaaaactagaataatctcaccacagaatcagaattttctaccgttccacacccaaccccttcaaatacacacaaccttgttacttttcactccagcaccttcatacgcttttctccaggaggaggttcttgcagctggaaacagcctattttgtggtcactgtcaagtggatggatattctagcgctcccaaaaaagcactatggccttatatgcagggaaggcacataccaccaagttcaatgagaaatattagagctaaccgtactctcttctctgcgtacgttcgagtatacgttgcccatatccctcccatattttctttttgctgcttttgctctggaactttgcttttagcagggaaagcagctgtcccctgagtgctttgaattgggaatatacccagtgtgtgttctcccccctcttacgaggctacataacacatctatgatgctgctttaagtttttagaggctatacctcaaagtagctgcggattttgtctcctgcactgccaatatgcaactgatcccgcttttattaattttttgaagaagtacacagaatttttacagaatgtagtattttgatatcattaagtaaaccaatcagaaaactccttgagcaatagttgtttctttgtcagtttcagttacaatcatctttacccattaagacttacattaacattccttttatataaagagttgtatatgtccacctaaattcctatgtccacacttaacctttaaagatgtacattgagggaatatcaaaaaatagcgttcatggctacgaatatgtagaatgttaaaagcacagcaaactgcactgcacttataaagcaaatctattagaaaaaaagcatttttctaaatgctcaaatgttatcaaaatactatatttatagaagtaatcttctctgttaacagccaagatttgctgttagaaataactcttgtgagttttatattgtgctttttggaggttctaatcatttcagcagtagcgtcttaaacagcagtattactataagcagttgcttcaaaatgtgaattaacttgttgaaactgtggctttaacatccatgtgactagtgtatatggtatttgctctccattagcaaaataattcattgttaggtaaacttcactagtgcaaattgcagatctgtgagcaatgtttcctattgaatataaactactgtctaaaatatacatatcagcagcccagcctttatcaggaaaattatacttggcaagttgctgaaaatgcacaaagttatgaaagttaaaggtatgctgcaaataactagccattattctatgtattattaaatatttactagttctgttaaaagcagagcagaagttagacactaaggatctctttgtgaactctgtgttctctatattagattgctgtttatatgtaagaattttattgcttatgtggcatacaatatttataactataaactttatagaagtacagtattaaagtcagtggtacacagacattctgtacatatcctgtgaaacgtgctgtcatatgaaataaatatatctgtctttaccatg

SEQ ID NO: 30579 - DNA, 6942 bp, Homo sapiens
  source 1..6942: mol_type = unassigned DNA
aagccggcggggggcggggagctgctgcggccagacccacgggcagccgggcgggcggacgcctccaagaccagtctctgcctccgcagcgtcagcgggagcgggctgcctccgaagaaaggagaatggcgttcagtaaaggattccggatctatcacaaattggatcccccacctttcagcctcatagtggaaactaggcataaggaagaatgtctcatgttcgagtctggggctgtcgctgtgctctcatctgcagaaaaagaggcaatcaagggtacatactccaaagtactggatgcatatggactcttaggtgttctgcggttaaatcttggtgatactatgttacattatctggtcctagtcactggatgtatgtctgttggaaaaattcaagaatctgaagttttccgagttacttccactgagtttatatcactgcgaatcgattcttcagatgaggatcgcatttcagaagtgcggaaagttttgaattcaggaaacttttattttgcatggtctgcatctggcatcagtttagatttgagtcttaatgcgcatcgtagcatgcaagaacagacaactgataatagatttttctggaatcagtctttgcatttgcatctcaaacactatggcgtgaattgtgatgactggttattacgtcttatgtgtggaggagtagaaatcagaacaatttatgctgctcataaacaggcgaaggcttgcctcatttcaagattaagctgtgaacgagctgggaccaggtttaatgtccggggaacaaatgatgatggtcatgttgccaattttgtagaaacagaacaggttgtgtacttagatgactcagtttcttccttcatacaaatccgaggatctgttccattgttctgggagcaaccagggttgcaagtgggatctcatcgtgtccgtatgtcaaggggatttgaagccaatgcacctgcttttgacaggcattttagaacacttaagaacttatatggtaaacaaataatagtaaatttgcttggatctaaggaaggtgaacatatgctaagtaaagctttccagagtcatttgaaagcttctgaacatgctgctgatatccagatggtgaattttgactatcatcaaatggttaagggaggaaaggcagaaaaattacatagtgttcttaaacctcaagtccagaagtttctagattatggatttttttatttcaatggaagtgaagttcaaagatgccagagtggtacagttcgaacaaactgcttggattgtcttgatagaacaaatagtgtgcaggcatttcttggcttagagatgctagctaaacagttggaagctcttggtttagctgaaaagcctcagttggtgactcgctttcaagaagtttttcggtcaatgtggtccgtgaatggtgattcaatcagtaagatatatgcaggaactggagctcttgaagggaaagcgaaggctggaaagttaaaagatggtgctcgctctgttacccgaacaattcagaataacttctttgacagctccaagcaagaggccattgatgttttgctactgggaaatactctgaatagtgatttagctgacaaagctcgagcacttttaactactggaagtttgcgtgcatcttctaaagtactaaagagcatgtgtgagaatttctacaaatattcaaagcctaagaaaattcgagtatgtgtcggaacctggaatgtgaatggtgggaagcaatttcgcagcatagcttttaagaatcagacactcactgactggcttcttgatgcacccaagttagctggcatccaggagtttcaagataaaagaagtaagccaactgatatatttgcaattggttttgaagaaatggtagaattgaatgctggaaacattgtgagtgcaagcacaacaaatcagaagctctgggctgtagaacttcagaagacaatctccagagacaacaagtatgtgctgctggcttctgaacagttggtgggcgtctgtttgtttgtttttatcagaccacagcatgctccttttatcagggatgttgcagttgatactgtgaagactggaatgggaggtgcaactggaaataagggagcagttgcaatccgaatgctcttccatacaaccagcctttgcttcgtctgtagccactttgctgcagggcagtcacaagtcaaagaaagaaatgaagattttatagaaatagcacgaaaattgagttttcctatgggaaggatgctattttcccatgactatgtattttggtgtggtgatttcaactatcgaatcgatctccctaacgaagaagttaaagagctcataagacagcaaaattgggattctcttatagcaggagatcaacttatcaatcagaaaaatgctggacaggtttttagaggatttttagaaggaaaggtaacctttgctccgacatataagtatgacttgttttctgacgactatgacaccagtgaaaagtgccgcacccctgcctggacagaccgtgtcctttggagaaggaggaaatggccttttgatagatcagctgaagatctagatcttctaaatgctagttttcaagatgaaagcaaaattctgtacacgtggactccaggcactttgctgcactatggaagagctgagctgaagacttctgaccacaggcctgtcgttgccctgattgatatagatatatttgaagttgaagctgaagagaggcaaaacatttataaagaagtaattgcagttcagggtccaccagatggtacagtattggtctcaatcaaaagttctttaccagaaaataatttttttgatgatgccttgattgatgagcttctgcagcagtttgcaagttttggtgaagttatacttataagatttgtagaagataaaatgtgggttacatttttggagggaagctctgccttgaatgttctgagcctaaatggtaaagagttattgaatcggactataactattgctttaaaaagtccagactggatcaaaaatttggaagaagaaatgagtttagagaaaattagcattgcattgccatcatcaacaagctctaccctgcttggtgaagatgcagaggttgcagcagattttgatatggaaggtgatgttgatgactatagtgctgaagtggaggaacttcttcctcagcatctccagccatcttcaagttccggccttggtacttcccccagctcttcaccccgaactagtccctgccagtcacctacaatatcagagggtcctgtaccttcccttcccatcagaccaagccgagcaccgtcaagaactcctgggcctcccagtgcacagagttctcctattgacgcgcagccagcaacgccgctgccgcagaaagaccccgcccagcccttggagcccaagcggccgccgccgccccgcccggtcgcccctcccacacgcccggctcccccacagagacctcctccgccttcaggacgcagtcagccttcacctcaagcaggacttgcaggcccaggacctgctggatacagtacagccagaccgacgattcctcctcgtgctggagttatcagtgccccacagagccacgcgcgggcatctgctggaagactgactcctgaaagccaaagcaaaacatcagaaacgtcgaaaggttcaactttccttcctgaaccactgaagcctcaggctgcttttcctccgcagtcttctttgcccccgcctgctcaaaggttgcaagagcctcttgtccctgtggcagcacctatgcctcagtctggcccccagccaaatttggaaaccccaccacaaccaccacctcgaagcaggtcatcccatagcttgccttcagaagcttcctcacaaccgcaagtaaaaacaaatggaatctctgatggcaaaagagaatcaccattaaagattgacccatttgaagatctgtcatttaatctgcttgctgtatcaaaggctcagctatctgttcaaacgtcacctgttcccaccccagacccaaagaggttgattcagttgccttctgcaacgcaaagtaatgttttgagttctgtaagttgcatgccaacaatgcctccaattccagctcggagtcaatcccaggaaaatatgcgaagttctccaaacccatttattactggcttgaccaggacaaatcctttcagtgacaggactgctgctcctggaaacccatttagagccaagtctgaagaatcagaggcaacttcatggttctccaaagaagagcccgttactatcagtcctttcccttctctgcagcctcttggtcataacaaaagcagggcttcatcttcacttgatggctttaaggacagttttgatctacagggccagtctacattaaaaattagcaacccgaaaggatgggtaaccttcgaggaagaagaggattttggtgtgaaagggaagtcaaagtcagcttgttcagacttactgggtaatcagccaagttcattttctggctccaacctgacattgaatgatgactggaataaaggtacaaatgtctccttctgtgtgttgccgtcaagaagacctcctccacctcctgtccctctgctcccgcccggcaccagccctccagtagatcctttcacgaccttggcctctaaggcttcacccacactggactttacagaaagataacgccatgcaatagaaaacagtgggtacttgcttttggcaggatagagctaagagaattgggcattagtatttcattatgtgcaataagtcattgtaagtgcactgatatcttcacaaaacaccactatttgatgtgtacagagttggactatgtgtatattggaaataaggaaaaacccttctcattgttaactggagttttgatgtatttctctttggatgaataggagacagtagtagccataaaaagtacttatactttagaaaacagtccttattcagaaacttttcggtcagtcttctgaagaatctcaaaaagcccacccaactttcagctgacatttccaccagccctctcatacttgttaacaattggtatctttgagtatttaccaaagagctgccaaggttacagtgaacagagttttgaaaggcattgctttaaaggaaaaaagtataggtatgtgtacatatataatacatacaaacacatgtacttctgtatacatttacatatttttacaattcatactttaatttctaggctataactcagaccaaattatacctaaaagttccaacaaagtccctttttcaatatcacattaccaaaaagatggctgcaaatgtaatttggacctttcattaattttgttttcaaaactagaataatctcaccacagaatcagaattttctaccgttccacacccaaccccttcaaatacacacaaccttgttacttttcactccagcaccttcatacgcttttctccaggaggaggttcttgcagctggaaacagcctattttgtggtcactgtcaagtggatggatattctagcgctcccaaaaaagcactatggccttatatgcagggaaggcacataccaccaagttcaatgagaaatattagagctaaccgtactctcttctctgcgtacgttcgagtatacgttgcccatatccctcccatattttctttttgctgcttttgctctggaactttgcttttagcagggaaagcagctgtcccctgagtgctttgaattgggaatatacccagtgtgtgttctcccccctcttacgaggctacataacacatctatgatgctgctttaagtttttagaggctatacctcaaagtagctgcggattttgtctcctgcactgccaatatgcaactgatcccgcttttattaattttttgaagaagtacacagaatttttacagaatgtagtattttgatatcattaagtaaaccaatcagaaaactccttgagcaatagttgtttctttgtcagtttcagttacaatcatctttacccattaagacttacattaacattccttttatataaagagttgtatatgtccacctaaattcctatgtccacacttaacctttaaagatgtacattgagggaatatcaaaaaatagcgttcatggctacgaatatgtagaatgttaaaagcacagcaaactgcactgcacttataaagcaaatctattagaaaaaaagcatttttctaaatgctcaaatgttatcaaaatactatatttatagaagtaatcttctctgttaacagccaagatttgctgttagaaataactcttgtgagttttatattgtgctttttggaggttctaatcatttcagcagtagcgtcttaaacagcagtattactataagcagttgcttcaaaatgtgaattaacttgttgaaactgtggctttaacatccatgtgactagtgtatatggtatttgctctccattagcaaaataattcattgttaggtaaacttcactagtgcaaattgcagatctgtgagcaatgtttcctattgaatataaactactgtctaaaatatacatatcagcagcccagcctttatcaggaaaattatacttggcaagttgctgaaaatgcacaaagttatgaaagttaaaggtatgctgcaaataactagccattattctatgtattattaaatatttactagttctgttaaaagcagagcagaagttagacactaaggatctctttgtgaactctgtgttctctatattagattgctgtttatatgtaagaattttattgcttatgtggcatacaatatttataactataaactttatagaagtacagtattaaagtcagtggtacacagacattctgtacatatcctgtgaaacgtgctgtcatatgaaataaatatatctgtctttaccatg

SEQ ID NO: 30580 - DNA, 7094 bp, Homo sapiens
  source 1..7094: mol_type = unassigned DNA
atgcggaagagatgggcctgctggagcggaagtgacgctcccggcggctgtggcggcggctgcgggagaaggaggaggaggagccggaggaagagggctgcctccgaagaaaggagaatggcgttcagtaaaggattccggatctatcacaaattggatcccccacctttcagcctcatagtggaaactaggcataaggaagaatgtctcatgttcgagtctggggctgtcgctgtgctctcatctgcagaaaaagaggcaatcaagggtacatactccaaagtactggatgcatatggactcttaggtgttctgcggttaaatcttggtgatactatgttacattatctggtcctagtcactggatgtatgtctgttggaaaaattcaagaatctgaagttttccgagttacttccactgagtttatatcactgcgaatcgattcttcagatgaggatcgcatttcagaagtgcggaaagttttgaattcaggaaacttttattttgcatggtctgcatctggcatcagtttagatttgagtcttaatgcgcatcgtagcatgcaagaacagacaactgataatagatttttctggaatcagtctttgcatttgcatctcaaacactatggcgtgaattgtgatgactggttattacgtcttatgtgtggaggagtagaaatcagaacaatttatgctgctcataaacaggcgaaggcttgcctcatttcaagattaagctgtgaacgagctgggaccaggtttaatgtccggggaacaaatgatgatggtcatgttgccaattttgtagaaacagaacaggttgtgtacttagatgactcagtttcttccttcatacaaatccgaggatctgttccattgttctgggagcaaccagggttgcaagtgggatctcatcgtgtccgtatgtcaaggggatttgaagccaatgcacctgcttttgacaggcattttagaacacttaagaacttatatggtaaacaaataatagtaaatttgcttggatctaaggaaggtgaacatatgctaagtaaagctttccagagtcatttgaaagcttctgaacatgctgctgatatccagatggtgaattttgactatcatcaaatggttaagggaggaaaggcagaaaaattacatagtgttcttaaacctcaagtccagaagtttctagattatggatttttttatttcaatggaagtgaagttcaaagatgccagagtggtacagttcgaacaaactgcttggattgtcttgatagaacaaatagtgtgcaggcatttcttggcttagagatgctagctaaacagttggaagctcttggtttagctgaaaagcctcagttggtgactcgctttcaagaagtttttcggtcaatgtggtccgtgaatggtgattcaatcagtaagatatatgcaggaactggagctcttgaagggaaagcgaagttaaaagatggtgctcgctctgttacccgaacaattcagaataacttctttgacagctccaagcaagaggccattgatgttttgctactgggaaatactctgaatagtgatttagctgacaaagctcgagcacttttaactactggaagtttgcgtgtttctgagcagacattacagtcagcatcttctaaagtactaaagagcatgtgtgagaatttctacaaatattcaaagcctaagaaaattcgagtatgtgtcggaacctggaatgtgaatggtgggaagcaatttcgcagcatagcttttaagaatcagacactcactgactggcttcttgatgcacccaagttagctggcatccaggagtttcaagataaaagaagtaagccaactgatatatttgcaattggttttgaagaaatggtagaattgaatgctggaaacattgtgagtgcaagcacaacaaatcagaagctctgggctgtagaacttcagaagacaatctccagagacaacaagtatgtgctgctggcttctgaacagttggtgggcgtctgtttgtttgtttttatcagaccacagcatgctccttttatcagggatgttgcagttgatactgtgaagactggaatgggaggtgcaactggaaataagggagcagttgcaatccgaatgctcttccatacaaccagcctttgcttcgtctgtagccactttgctgcagggcagtcacaagtcaaagaaagaaatgaagattttatagaaatagcacgaaaattgagttttcctatgggaaggatgctattttcccatgactatgtattttggtgtggtgatttcaactatcgaatcgatctccctaacgaagaagttaaagagctcataagacagcaaaattgggattctcttatagcaggagatcaacttatcaatcagaaaaatgctggacaggtttttagaggatttttagaaggaaaggtaacctttgctccgacatataagtatgacttgttttctgacgactatgacaccagtgaaaagtgccgcacccctgcctggacagaccgtgtcctttggagaaggaggaaatggccttttgatagatcagctgaagatctagatcttctaaatgctagttttcaagatgaaagcaaaattctgtacacgtggactccaggcactttgctgcactatggaagagctgagctgaagacttctgaccacaggcctgtcgttgccctgattgatatagatatatttgaagttgaagctgaagagaggcaaaacatttataaagaagtaattgcagttcagggtccaccagatggtacagtattggtctcaatcaaaagttctttaccagaaaataatttttttgatgatgccttgattgatgagcttctgcagcagtttgcaagttttggtgaagttatacttataagatttgtagaagataaaatgtgggttacatttttggagggaagctctgccttgaatgttctgagcctaaatggtaaagagttattgaatcggactataactattgctttaaaaagtccagactggatcaaaaatttggaagaagaaatgagtttagagaaaattagcattgcattgccatcatcaacaagctctaccctgcttggtgaagatgcagaggttgcagcagattttgatatggaaggtgatgttgatgactatagtgctgaagtggaggaacttcttcctcagcatctccagccatcttcaagttccggccttggtacttcccccagctcttcaccccgaactagtccctgccagtcacctacaatatcagagggtcctgtaccttcccttcccatcagaccaagccgagcaccgtcaagaactcctgggcctcccagtgcacagagttctcctattgacgcgcagccagcaacgccgctgccgcagaaagaccccgcccagcccttggagcccaagcggccgccgccgccccgcccggtcgcccctcccacacgcccggctcccccacagagacctcctccgccttcaggggctaggagtcctgcacccactagaaaggaatttggaggtattggagcccctcccagtcctggggtagctaggagagagatggaagcacccaaaagccctggaacaacaaggaaagataatataggacgcagtcagccttcacctcaagcaggacttgcaggcccaggacctgctggatacagtacagccagaccgacgattcctcctcgtgctggagttatcagtgccccacagagccacgcgcgggcatctgctggaagactgactcctgaaagccaaagcaaaacatcagaaacgtcgaaaggttcaactttccttcctgaaccactgaagcctcaggctgcttttcctccgcagtcttctttgcccccgcctgctcaaaggttgcaagagcctcttgtccctgtggcagcacctatgcctcagtctggcccccagccaaatttggaaaccccaccacaaccaccacctcgaagcaggtcatcccatagcttgccttcagaagcttcctcacaaccgcaacaggagcaaccatcagggtaacaggtaaaaacaaatggaatctctgatggcaaaagagaatcaccattaaagattgacccatttgaagatctgtcatttaatctgcttgctgtatcaaaggctcagctatctgttcaaacgtcacctgttcccaccccagacccaaagaggttgattcagttgccttctgcaacgcaaagtaatgttttgagttctgtaagttgcatgccaacaatgcctccaattccagctcggagtcaatcccaggaaaatatgcgaagttctccaaacccatttattactggcttgaccaggacaaatcctttcagtgacaggactgctgctcctggaaacccatttagagccaagtctgaagaatcagaggcaacttcatggttctccaaagaagagcccgttactatcagtcctttcccttctctgcagcctcttggtcataacaaaagcagggcttcatcttcacttgatggctttaaggacagttttgatctacagggccagtctacattaaaaattagcaacccgaaaggatgggtaaccttcgaggaagaagaggattttggtgtgaaagggaagtcaaagtcagcttgttcagacttactgggtaatcagccaagttcattttctggctccaacctgacattgaatgatgactggaataaaggtacaaatgtctccttctgtgtgttgccgtcaagaagacctcctccacctcctgtccctctgctcccgcccggcaccagccctccagtagatcctttcacgaccttggcctctaaggcttcacccacactggactttacagaaagataacgccatgcaatagaaaacagtgggtacttgcttttggcaggatagagctaagagaattgggcattagtatttcattatgtgcaataagtcattgtaagtgcactgatatcttcacaaaacaccactatttgatgtgtacagagttggactatgtgtatattggaaataaggaaaaacccttctcattgttaactggagttttgatgtatttctctttggatgaataggagacagtagtagccataaaaagtacttatactttagaaaacagtccttattcagaaacttttcggtcagtcttctgaagaatctcaaaaagcccacccaactttcagctgacatttccaccagccctctcatacttgttaacaattggtatctttgagtatttaccaaagagctgccaaggttacagtgaacagagttttgaaaggcattgctttaaaggaaaaaagtataggtatgtgtacatatataatacatacaaacacatgtacttctgtatacatttacatatttttacaattcatactttaatttctaggctataactcagaccaaattatacctaaaagttccaacaaagtccctttttcaatatcacattaccaaaaagatggctgcaaatgtaatttggacctttcattaattttgttttcaaaactagaataatctcaccacagaatcagaattttctaccgttccacacccaaccccttcaaatacacacaaccttgttacttttcactccagcaccttcatacgcttttctccaggaggaggttcttgcagctggaaacagcctattttgtggtcactgtcaagtggatggatattctagcgctcccaaaaaagcactatggccttatatgcagggaaggcacataccaccaagttcaatgagaaatattagagctaaccgtactctcttctctgcgtacgttcgagtatacgttgcccatatccctcccatattttctttttgctgcttttgctctggaactttgcttttagcagggaaagcagctgtcccctgagtgctttgaattgggaatatacccagtgtgtgttctcccccctcttacgaggctacataacacatctatgatgctgctttaagtttttagaggctatacctcaaagtagctgcggattttgtctcctgcactgccaatatgcaactgatcccgcttttattaattttttgaagaagtacacagaatttttacagaatgtagtattttgatatcattaagtaaaccaatcagaaaactccttgagcaatagttgtttctttgtcagtttcagttacaatcatctttacccattaagacttacattaacattccttttatataaagagttgtatatgtccacctaaattcctatgtccacacttaacctttaaagatgtacattgagggaatatcaaaaaatagcgttcatggctacgaatatgtagaatgttaaaagcacagcaaactgcactgcacttataaagcaaatctattagaaaaaaagcatttttctaaatgctcaaatgttatcaaaatactatatttatagaagtaatcttctctgttaacagccaagatttgctgttagaaataactcttgtgagttttatattgtgctttttggaggttctaatcatttcagcagtagcgtcttaaacagcagtattactataagcagttgcttcaaaatgtgaattaacttgttgaaactgtggctttaacatccatgtgactagtgtatatggtatttgctctccattagcaaaataattcattgttaggtaaacttcactagtgcaaattgcagatctgtgagcaatgtttcctattgaatataaactactgtctaaaatatacatatcagcagcccagcctttatcaggaaaattatacttggcaagttgctgaaaatgcacaaagttatgaaagttaaaggtatgctgcaaataactagccattattctatgtattattaaatatttactagttctgttaaaagcagagcagaagttagacactaaggatctctttgtgaactctgtgttctctatattagattgctgtttatatgtaagaattttattgcttatgtggcatacaatatttataactataaactttatagaagtacagtattaaagtcagtggtacacagacattctgtacatatcctgtgaaacgtgctgtcatatgaaataaatatatctgtcttta

SEQ ID NO: 30581 - DNA, 4852 bp, Homo sapiens
  source 1..4852: mol_type = unassigned DNA
gcggcgcaatgcggaagagatgggcctgctggagcggaagtgacgctcccggcggctgtggcggcggctgcgggagaaggaggaggaggagccggaggaagagggctgcctccgaagaaaggagaatggcgttcagtaaaggattccggatctatcacaaattggatcccccacctttcagcctcatagtggaaactaggcataaggaagaatgtctcatgttcgagtctggggctgtcgctgtgctctcatctgcagaaaaagaggcaatcaagggtacatactccaaagtactggatgcatatggactcttaggtgttctgcggttaaatcttggtgatactatgttacattatctggtcctagtcactggatgtatgtctgttggaaaaattcaagaatctgaagttttccgagttacttccactgagtttatatcactgcgaatcgattcttcagatgaggatcgcatttcagaagtgcggaaagttttgaattcaggaaacttttattttgcatggtctgcatctggcatcagtttagatttgagtcttaatgcgcatcgtagcatgcaagaacagacaactgataatagatttttctggaatcagtctttgcatttgcatctcaaacactatggcgtgaattgtgatgactggttattacgtcttatgtgtggaggagtagaaatcagaacaatttatgctgctcataaacaggcgaaggcttgcctcatttcaagattaagctgtgaacgagctgggaccaggtttaatgtccggggaacaaatgatgatggtcatgttgccaattttgtagaaacagaacaggttgtgtacttagatgactcagtttcttccttcatacaaatccgaggatctgttccattgttctgggagcaaccagggttgcaagtgggatctcatcgtgtccgtatgtcaaggggatttgaagccaatgcacctgcttttgacaggcattttagaacacttaagaacttatatggtaaacaaataatagtaaatttgcttggatctaaggaaggtgaacatatgctaagtaaagctttccagagtcatttgaaagcttctgaacatgctgctgatatccagatggtgaattttgactatcatcaaatggttaagggaggaaaggcagaaaaattacatagtgttcttaaacctcaagtccagaagtttctagattatggatttttttatttcaatggaagtgaagttcaaagatgccagagtggtacagttcgaacaaactgcttggattgtcttgatagaacaaatagtgtgcaggcatttcttggcttagagatgctagctaaacagttggaagctcttggtttagctgaaaagcctcagttggtgactcgctttcaagaagtttttcggtcaatgtggtccgtgaatggtgattcaatcagtaagatatatgcaggaactggagctcttgaagggaaagcgaagttaaaagatggtgctcgctctgttacccgaacaattcagaataacttctttgacagctccaagcaagaggccattgatgttttgctactgggaaatactctgaatagtgatttagctgacaaagctcgagcacttttaactactggaagtttgcgtgtttctgagcagacattacagtcagcatcttctaaagtactaaagagcatgtgtgagaatttctacaaatattcaaagcctaagaaaattcgagtatgtgtcggaacctggaatgtgaatggtgggaagcaatttcgcagcatagcttttaagaatcagacactcactgactggcttcttgatgcacccaagttagctggcatccaggagtttcaagataaaagaagtaagccaactgatatatttgcaattggttttgaagaaatggtagaattgaatgctggaaacattgtgagtgcaagcacaacaaatcagaagctctgggctgtagaacttcagaagacaatctccagagacaacaagtatgtgctgctggcttctgaacagttggtgggcgtctgtttgtttgtttttatcagaccacagcatgctccttttatcagggatgttgcagttgatactgtgaagactggaatgggaggtgcaactggaaataagggagcagttgcaatccgaatgctcttccatacaaccagcctttgcttcgtctgtagccactttgctgcagggcagtcacaagtcaaagaaagaaatgaagattttatagaaatagcacgaaaattgagttttcctatgggaaggatgctattttcccatgactatgtattttggtgtggtgatttcaactatcgaatcgatctccctaacgaagaagttaaagagctcataagacagcaaaattgggattctcttatagcaggagatcaacttatcaatcagaaaaatgctggacaggtttttagaggatttttagaaggaaaggtaacctttgctccgacatataagtatgacttgttttctgacgactatgacaccagtgaaaagtgccgcacccctgcctggacagaccgtgtcctttggagaaggaggaaatggccttttgatagatcagctgaagatctagatcttctaaatgctagttttcaagatgaaagcaaaattctgtacacgtggactccaggcactttgctgcactatggaagagctgagctgaagacttctgaccacaggcctgtcgttgccctgattgatatagatatatttgaagttgaagctgaagagaggcaaaacatttataaagaagtaattgcagttcagggtccaccagatggtacagtattggtctcaatcaaaagttctttaccagaaaataatttttttgatgatgccttgattgatgagcttctgcagcagtttgcaagttttggtgaagttatacttataagatttgtagaagataaaatgtgggttacatttttggagggaagctctgccttgaatgttctgagcctaaatggtaaagagttattgaatcggactataactattgctttaaaaagtccagactggatcaaaaatttggaagaagaaatgagtttagagaaaattagcattgcattgccatcatcaacaagctctaccctgcttggtgaagatgcagaggttgcagcagattttgatatggaaggtgatgttgatgactatagtgctgaagtggaggaacttcttcctcagcatctccagccatcttcaagttccggccttggtacttcccccagctcttcaccccgaactagtccctgccagtcacctacaatatcagagggtcctgtaccttcccttcccatcagaccaagccgagcaccgtcaagaactcctgggcctcccagtgcacagagttctcctattgacgcgcagccagcaacgccgctgccgcagaaagaccccgcccagcccttggagcccaagcggccgccgccgccccgcccggtcgcccctcccacacgcccggctcccccacagagacctcctccgccttcaggggctaggagtcctgcacccactagaaaggaatttggaggtattggagcccctcccagtcctggggtagctaggagagagatggaagcacccaaaagccctggaacaacaaggaaagataatataggacgcagtcagccttcacctcaagcaggacttgcaggcccaggacctgctggatacagtacagccagaccgacgattcctcctcgtgctggagttatcagtgccccacagagccacgcgcgggcatctgctggaagactgactcctgaaagccaaagcaaaacatcagaaacgtcgaaaggttcaactttccttcctgaaccactgaagcctcaggctgcttttcctccgcagtcttctttgcccccgcctgctcaaaggttgcaagagcctcttgtccctgtggcagcacctatgcctcagtctggcccccagccaaatttggaaaccccaccacaaccaccacctcgaagcaggtcatcccatagcttgccttcagaagcttcctcacaaccgcaagtaaaaacaaatggaatctctgatggcaaaagagaatcaccattaaagattgacccatttgaagatctgtcatttaatctgcttgctgtatcaaaggctcagctatctgttcaaacgtcacctgttcccaccccagacccaaagaggttgattcagttgccttctgcaacgcaaagtaatgttttgagttctgtaagttgcatgccaacaatgcctccaattccagctcggagtcaatcccaggaaaatatgcgaagttctccaaacccatttattactggcttgaccaggacaaatcctttcagtgacaggactgctgctcctggaaacccatttagagccaagtctgaagaatcagaggcaacttcatggttctccaaagaagagcccgttactatcagtcctttcccttctctgcagcctcttggtcataacaaaagcagggcttcatcttcacttgatggctttaaggacagttttgatctacagggccagtctacattaaaaattagcaacccgaaaggatgggtaaccttcgaggaagaagaggattttggtgtgaaagggaagtcaaagtcagcttgttcagacttactgggtaatcagccaagttcattttctggctccaacctgacattgaatgatgactggaataaaggtacaaatgtctccttctgtgtgttgccgtcaagaagacctcctccacctcctgtccctctgctcccgcccggcaccagccctccagtagatcctttcacgaccttggcctctaaggcttcacccacactggactttacagaaagataacgcca

SEQ ID NO: 30582 - DNA, 7378 bp, Homo sapiens
  source 1..7378: mol_type = unassigned DNA
gcggggagctgtcgcgggcagcgcgccctcgggaggacgtggccccggcccccgcccgcagtgggcccgaccctcatggccctgagcaaagggctgcggctgctggggcgcctgggggccgagggggactgtagcgtgctgctggaggcgcgcggccgcgacgactgcctgctgttcgaggccggcacggtggccacgctggctccagaagaaaaggaagtcattaaaggacagtatggcaagctcacggacgcgtacggctgcctgggggagctgaggctgaaatctggtggcacgtctctgagcttcctggtgttggtgacaggctgcacatctgtgggcagaattccagatgctgaaatctacaaaatcactgccactgacttttaccctcttcaggaagaggccaaggaggaggaacgcctcatagctttgaagaaaatcctcagctcgggggtgttctatttctcatggccaaacgatgggtctcgctttgacctgactgtccgcacgcagaagcagggggatgacagctctgaatgggggaactccttcttctggaaccagctgttgcacgtgcccttgaggcagcaccaggtgagctgctgtgactggctgctgaagatcatctgcggggtggtcaccatccgcaccgtgtatgcctcccacaagcaggccaaggcctgcctcgtctctcgcgttagctgtgagcgcacaggcactcgcttccacacccgtggcgtgaacgacgacggccatgtgtccaacttcgtggagacagagcagatgatttacatggacgatggagtgtcatcttttgtccagatcagaggctccgttccgctgttctgggaacagccagggcttcaggttggctcccatcatctgagactccacagaggcctggaagccaatgcccctgctttcgacaggcacatggtgcttctgaaggagcagtacgggcagcaggtggtcgtgaaccttctgggaagcagaggcggagaggaggtgctcaacagagccttcaagaagctgctctgggcttcttgccacgcgggcgacacgcctatgatcaattttgacttccatcagtttgccaaaggtgggaagctagagaaattggagaccctcttgaggccacagttaaagctgcactgggaagacttcgatgtgttcacaaagggggagaacgtcagtccacgttttcagaaaggcactttgcggatgaactgtcttgactgcctggaccgaaccaacactgtgcagagcttcatcgcgctcgaggtcctgcatctgcagctcaagaccctggggctgagttcaaaacccatcgttgaccgctttgtggagtccttcaaagccatgtggtctctgaatggccacagcctgagcaaggtgttcacaggcagcagagccctggaagggaaggccaaggtggggaagctgaaggatggagcccggtccatgtctcgaaccatccagtccaacttcttcgacggggtgaagcaggaggccatcaagctgctgctggttggggacgtctacggcgaggaggtggcagacaaagggggcatgctgctggacagcacggcgctcctggtgactcccaggatcctgaaagctatgactgagcgtcagtccgaattcacaaatttcaagcggatccggattgctatggggacctggaacgtgaacggaggaaagcagttccggagcaacgtgctcaggacggcggagctgacagactggctgctcgactcgccccagctctcgggagctaccgactcccaggatgacagcagcccagctgacatatttgctgtggggtttgaagagatggtggaattgagcgcagggaatattgtcaatgccagtactaccaacaagaagatgtggggtgaacagcttcagaaagccatctcacgctctcatagatacattctgttgacttcggcacagctggtgggcgtctgtctttatatctttgtacgtccataccatgtcccgttcatcagggacgtagccatcgacacagtgaagacgggcatggggggcaaggcggggaacaagggcgccgtcggcatccgcttccagttccacagcaccagcttctgcttcatatgtagtcacctgacggccgggcagtcccaggtgaaggagcggaatgaagactacaaggagatcacccagaaactctgcttcccaatggggagaaatgttttttctcatgattatgtattttggtgtggcgatttcaactaccgcattgatcttacttatgaagaagtcttctattttgttaaacgccaagactggaagaaacttctggaatttgatcaactacagctacagaaatcaagtggaaaaatttttaaggactttcacgaaggagccattaactttggacccacctacaagtatgacgttggctcagccgcctacgatacaagcgacaaatgccgcacccccgcctggacagacagggtgctgtggtggaggaagaaacatccctttgataaaacagctggagaactcaaccttctagacagtgatctagatgttgacaccaaagtcagacacacctggtctcctggtgccctgcagtattatggtcgtgcggagctacaagcgtctgatcacagacctgtgctggcgatcgtggaggtggaagttcaggaagtcgatgtgggtgctcgggagagggttttccaggaagtgtcctccttccagggccccctggatgccactgttgtagtaaaccttcaatcaccgaccttagaagagaaaaacgagtttccagaggacctgcgtactgagctcatgcagaccttggggagttatgggacaattgttcttgtcaggatcaaccaagggcagatgctggtaacttttgcagacagtcactcggctctcagtgtcctggacgtggacggtatgaaggtgaaaggcagagcagtgaagattagaccgaagaccaaggactggctgaaaggtttgcgagaggagatcattcggaaacgagacagcatggcccccgtgtctcccactgccaactcctgtttgctggaggaaaactttgacttcacaagtttggactatgagtcagaaggggatattcttgaagacgatgaagactacttggtggatgaattcaatcagcctggagtctcggacagtgaactcgggggagacgacctctctgatgtccccggccccacagcactggctcctcccagcaagtcacctgctctcaccaaaaagaagcagcatccaacgtacaaagatgacgcggacctggtggagctcaagcgggagctggaagccgtcggggagttccgccaccgttctccgagcaggtctctgtcggtccccaaccggcctcggccacctcaacccccgcagagacccccccctccaaccggtttaatggtgaaaaagtcggcttcagatgcgtccatctcctccggcacccatggacagtattcaattttgcagacggcaagacttctaccaggagcacctcagcaacctcccaaggctcggactggaataagtaaaccttataatgtcaagcagatcaaaaccaccaatgcccaggaggcagaagcagcaatccggtgtctcctggaagccagaggaggtgcctccgaagaagccctaagtgccgtggccccaagggaccttgaagcatcctctgaaccagagcccacaccgggggcagccaaaccagagaccccacaggcgcccccactccttccccgtcggcccccacccagagttcctgccatcaagaagccaaccttgagaaggacaggaaagcccctgtcaccggaagaacagtttgagcaacagactgtccattttacaatcgggcccccggagacaagcgttgaggcccctcctgtcgtgacagcccctcgagtccctcctgttcccaaaccaagaacatttcagcctgggaaagctgcagagaggccaagccacaggaagccagcatcagacgaagcccctcctggggcaggagcctctgtgccaccacctctggaggcgccgcctcttgtgcccaaggtacccccgaggaggaagaagtcagcccccgcagccttccacctgcaggtcctgcagagcaacagccagcttctccagggcctcacttacaatagcagtgacagcccctctgggcacccacctgccgcgggcaccgtcttcccacaaggggactttctcagcacttcatctgctacaagccccgacagcgatggcaccaaagcgatgaagccagaggcagccccacttcttggtgattatcaggaccccttctggaaccttcttcaccaccctaaactgttgaataacacttggctttctaagagctcagaccctttggactcaggaaccaggagccccaaaagagatcccatagacccagtgtcagctggcgcttcagctgccaaggcagagctgccaccagatcatgaacacaaaaccttaggtcactgggtgacaatcagtgaccaagaaaagaggacagcactgcaggtgtttgacccactggcaaaaacatgactgagcagctttgaaggctgcagtcctatagaatgcataccttcctccctctagacatccctccaccagaagagacatctatttaaaggcacactggccaaaacgtttgtgcatctgtcactctcgtgtagtttacaaaaatcgtgtctcttattcagtaagatggttactcagccaccaaaatatatttcactcaaggcttgtacatctgaagtttgctcttcaaggaatgggaaccttcctgttaaattcggtgtatggattttaagaaaggaatctagccaatgaggtccaagaagttctcacccattgaatttttaaatggctgttcagttcatgttgtacgtgatggagatttgtcttttgttttatttgcattttacagatttggtataacattttggggagccacctgaaggttgatgtataaagtaaggattagagaaagaggtcgttgtgaccattagtagctgtcctggcccacttaaacaaggttacaaaaaatcagagtcggaagcagccaaataggtcaacctaatgactagactgtacattcccatgagccttcatgtttaagtgtgtacatgtgcgttaaccttgatgatgcgtgaatcccgagggagccggtggcatacaccgttagcttaaccttagcttaaactagctgaaggctcctgtgccatgtcttagacattgcatgccctatcaattactataatcctgagccatggtgtgctactgaaaccaatttttatccaccatctagtccttattaaatgaaacctcacggatcctttgttccgcttatattccatgcataccacataaaagcacacagtgcgaaaactcttgctgatacgcgatattgattctcattgttagaatatggagagtgtttcagcctcgtctgtccggctggagcttcgggatggaaagtgctatgtgtccctgcatataagaatcaccaggccagtgtttctgggtttgcttgtctatatgtttgtctatattttttgcctatacatttttcccacgtttccaacagcacttctcacctattcaataactgaaaaagacattaccatagtgctttacatttttaaagtaatgttacaaggtctggaatccatttggagcagataccgtgttttcgctatttaataagaagttcagtagtgaaatcttactgtaccgcctgttgtatctgggagcctcgtacagaggctcgcacagcagtgatcaagtgtcatcccttacgtgactgggggatgtctgtcctaaaagctgactgctaggatagtaaggatcatcttgcctgggctatgccactgtcttgttaccaattagacatctggaatttcataattagttttcattgtcactgtcaagatatattgcagattacttaaatatggccatcaaaacaaaagttacaacacgtatctcttttcatctgaaaactaatacctggaaaaggataaaaaaaaaaaggaatccgtgacccacagagctagacagataagatgcatagttgaccagtcataaaaggcggtgtttaggtgatcaggatgccgttggtggcatttacgtgctttatatgatttttacctctgtaacaaacacaagaaataaacagaatggtccttaacagagtttgggggagagagcaagatgggttccttggagaagctgatttgccaagatgcacatcgctattaacagccagagtcataaatgaaatgaaattgaagaattcattcaaatgctcttttccctataacctcttttctcaccaaaaaggagataaatttgaaaacagataaatgtaacaaccagtcaaagaagcaggggaaaagtaagctcctccaaagttgcttgcagtgctggaaatagatctcatttttaggttttctcttcgttccagataccaaataaatgggacagagaataaaatttttgttaaaatatgtgctcatctcctaagtagctcttcagagtctgaccgtaagtaaaaacacacagaattgtgttgactgggggaggtgaatcacaaaaaagttacgaggagtttaagagttaaatattatttgatcgtggctgtcaaatttagtgaacaacatagattggatttggagttggtagtaggtatggttctcataccagaattctcttaaaaaaaaaaaaaaggacaattggaattgccttatttatttttaaaatcaatgcttactagttggtaggattcccaggtcagcagcagggttgattaaataatcttgacaatgagcagctgccatcttgggggatttcattctgtggttttttaaatgtttcgtctttgatgctaccatccagggcttcttattgtgaccttgtagcctattttgttcctgctgttctctaacatggtgcagttcacgcagactggtttaggtacttcacaactcaccattgtctctctgaccccaagcctagtcccttttacatcaccatcttctcagacttcttgcctattcttaaaatatgttttggttaatgattgaattaggacatcagcttaagcaattcctgtaacggtttaacgttgttgaagttcaaggcacataataaaattctccctgatgtgtgtgtaagtataaacaaagtaatgtatcaaagcgttcactttataatgaagtcatttcattgggaaggaaagctgcaaagattattgggggactagtgattaataaaatcctgtaatatttttgaagtgaaaatttgtactgaaattgtacatgatacctattaaatgtttttgtctttttttaaa

SEQ ID NO: 30583 - DNA, 5091 bp, Homo sapiens
  source 1..5091: mol_type = unassigned DNA
cctaattacacattttgggagagcatagccaggaaattgcatctgtgaaaagaaaatacaaattttcctctagatgagtttgtgaacgcctgtgtggccccagcgctctgagaggtggggcctagaatgagtccgagtgttctcagctcctgcagctcttaccataccaattgctgccaaccttctgggattcctgggtcctggaaacccggcagcaacactgtgtctcaagcctacagtgggcatgctggcgaggactgcaggcatggtcatgactgttttgaataattatatgcgaggaatgtttttaaccaaaggccccaaagcatccgaagcctggcttcaaggtggaggagtaaggaggatgagtctgggacgtggggtggttcgtggcgcagacctctattgtggaagtgtcatgatcgcattcttggatattgactcgattctatatgggtctctcgaatggaacccctgcgagtagctggagaactcaaccttctagacagtgatctagatgttgacaccaaagtcagacacacctggtctcctggtgccctgcagtattatggtcgtgcggagctacaagcgtctgatcacaggtgaggtcctgacttccatggcgttttctcctgtgctgggcaaggcagcgtctccctctccgcaggaaaatgcatgctgtccccataaggatgtgtgtgcgcatgggggtgcattttgtgtgcatacaatacaccaaagaacaaagaatgatggaacaaatatctgtggacccaccaccaagaactaattaatcttagcattttgtcattgctccatatcataaatgacatcattgatgaaaatttcaaagatgcaacctacgtattttgcggcttttatattttcttaaatgatgtcgttgtgcaacttgcttttttgttactatttttgagatacagtcgtgttgatgttatagctctggtgcattcatttgtaactgctgtctagtatcccactaaatatatccatggaacttacaacttatccattcacctcttgatgaatattttctccaggattttatgattacaaacaccatagggtttttaaatctgggatgcacaaccttttttttttttttttttttgagagagagtcttgctctattgcccaggctggatggagtacagtggtgtgatctcagctcactgcaacctccgcttcccagattcaagcaattctcctgcctcagcctcccaagtagctgggattacaggtgcacaccaccatgcctggctaatttttgtgtttttagtagagacggggtttcaccatgttggccaggctggtcccaaactcctgacctcaggtgatccacccaccttggcctctcaaagtgttgggattacaggcgtgagccaccgcacctggccctaggatgcagggctttttaaatgctctgtgcatcatgcattgaggatagagtggaggcagcagagggagcaccgtgggcaccagcacctgtgccctgggattgctgcagaggaagactcaccctgcagaatgtctttaaagacagaggagaggatggcatttgagggtgtgaagaaggaagagtttgatcttcccaaggctgctgcctaaactctcatgtcagtttcaacttttacaaggaaagaaattaagaaaaagaagacctgtgctggcgatcgtggaggtggaagttcaggaagtcgatgtgggtgctcgggagagggttttccaggaagtgtcctccttccagggccccctggatgccactgttgtagtaaaccttcaatcaccgaccttagaagagaaaaacgagtttccagaggacctgcgtactgagctcatgcagaccttggggagttatgggacaattgttcttgtcaggatcaaccaagggcagatgctggtaacttttgcagacagtcactcggctctcagtgtcctggacgtggacggtatgaaggtgaaaggcagagcagtgaagattagaccgaagaccaaggactggctgaaaggtttgcgagaggagatcattcggaaacgagacagcatggcccccgtgtctcccactgccaactcctgtttgctggaggaaaactttgacttcacaagtttggactatgagtcagaaggggatattcttgaagacgatgaagactacttggtggatgaattcaatcagcctggagtctcggacagtgaactcgggggagacgacctctctgatgtccccggccccacagcactggctcctcccagcaagtcacctgctctcaccaaaaagaagcagcatccaacgtacaaagatgacgcggacctggtggagctcaagcgggagctggaagccgtcggggagttccgccaccgttctccgagcaggtctctgtcggtccccaaccggcctcggccacctcaacccccgcagagacccccccctccaaccggtttaatggtgaaaaagtcggcttcagatgcgtccatctcctccggcacccatggacagtattcaattttgcagacggcaagacttctaccaggagcacctcagcaacctcccaaggctcggactggaataagtaaaccttataatgtcaagcagatcaaaaccaccaatgcccaggaggcagaagcagcaatccggtgtctcctggaagccagaggaggtgcctccgaagaagccctaagtgccgtggccccaagggaccttgaagcatcctctgaaccagagcccacaccgggggcagccaaaccagagaccccacaggcgcccccactccttccccgtcggcccccacccagagttcctgccatcaagaagccaaccttgagaaggacaggaaagcccctgtcaccggaagaacagtttgagcaacagactgtccattttacaatcgggcccccggagacaagcgttgaggcccctcctgtcgtgacagcccctcgagtccctcctgttcccaaaccaagaacatttcagcctgggaaagctgcagagaggccaagccacaggaagccagcatcagacgaagcccctcctggggcaggagcctctgtgccaccacctctggaggcgccgcctcttgtgcccaaggtacccccgaggaggaagaagtcagcccccgcagccttccacctgcaggtcctgcagagcaacagccagcttctccagggcctcacttacaatagcagtgacagcccctctgggcacccacctgccgcgggcaccgtcttcccacaaggggactttctcagcacttcatctgctacaagccccgacagcgatggcaccaaagcgatgaagccagaggcagccccacttcttggtgattatcaggaccccttctggaaccttcttcaccaccctaaactgttgaataacacttggctttctaagagctcagaccctttggactcaggaaccaggagccccaaaagagatcccatagacccagtgtcagctggcgcttcagctgccaaggcagagctgccaccagatcatgaacacaaaaccttaggtcactgggtgacaatcagtgaccaagaaaagaggacagcactgcaggtgtttgacccactggcaaaaacatgactgagcagctttgaaggctgcagtcctatagaatgcataccttcctccctctagacatccctccaccagaagagacatctatttaaaggcacactggccaaaacgtttgtgcatctgtcactctcgtgtagtttacaaaaatcgtgtctcttattcagtaagatggttactcagccaccaaaatatatttcactcaaggcttgtacatctgaagtttgctcttcaaggaatgggaaccttcctgttaaattcggtgtatggattttaagaaaggaatctagccaatgaggtccaagaagttctcacccattgaatttttaaatggctgttcagttcatgttgtacgtgatggagatttgtcttttgttttatttgcattttacagatttggtataacattttggggagccacctgaaggttgatgtataaagtaaggattagagaaagaggtcgttgtgaccattagtagctgtcctggcccacttaaacaaggttacaaaaaatcagagtcggaagcagccaaataggtcaacctaatgactagactgtacattcccatgagccttcatgtttaagtgtgtacatgtgcgttaaccttgatgatgcgtgaatcccgagggagccggtggcatacaccgttagcttaaccttagcttaaactagctgaaggctcctgtgccatgtcttagacattgcatgccctatcaattactataatcctgagccatggtgtgctactgaaaccaatttttatccaccatctagtccttattaaatgaaacctcacggatcctttgttccgcttatattccatgcataccacataaaagcacacagtgcgaaaactcttgctgatacgcgatattgattctcattgttagaatatggagagtgtttcagcctcgtctgtccggctggagcttcgggatggaaagtgctatgtgtccctgcatataagaatcaccaggccagtgtttctgggtttgcttgtctatatgtttgtctatattttttgcctatacatttttcccacgtttccaacagcacttctcacctattcaataactgaaaaagacattaccatagtgctttacatttttaaagtaatgttacaaggtctggaatccatttggagcagataccgtgttttcgctatttaataagaagttcagtagtgaaatcttactgtaccgcctgttgtatctgggagcctcgtacagaggctcgcacagcagtgatcaagtgtcatcccttacgtgactgggggatgtctgtcctaaaagctgactgctaggatagtaaggatcatcttgcctgggctatgccactgtcttgttaccaattagacatctggaatttcataattagttttcattgtcactgtcaagatatattgcagattacttaaatatggccatcaaaacaaaagttacaacacgtatctcttttcatctgaaaactaatacctggaaaaggataaaaaaaaaaa

SEQ ID NO: 30584 - DNA, 499 bp, Homo sapiens
  source 1..499: mol_type = unassigned DNA
gcggccgcgacgactgcctgctgttcgaggccggcacggtggccacgctggctccagaagaaaaggaagtcattaaaggacagtatggcaagctcacggacgcgtacggctgcctgggggagctgaggctgaaatctggtggcacgtctctgagcttcctggtgttggtgacaggctgcacatctgtgggcagaattccagatgctgaaatctacaaaatcactgccactgacttttaccctcttcaggaagaggccaaggaggaggaacgcctcatagctttgaagaaaatcctcagctcgggggtgttctatttctcatggccaaacgatgggtctcgctttgacctgactgtccgcacgcagaagcagggggatgacagctctgaatgggggaactccttcttctgaggcagccacaggttttcatctggccttggtgctttggattccccagaagtgaattcctgatttctgccggaagaaggggaccctcccca

SEQ ID NO: 30585 - DNA, 3973 bp, Homo sapiens
  source 1..3973: mol_type = unassigned DNA
gcaaagtgaaactctggcaagttgcgggcgcgcggggagctgtcgcgggcagcgcgccctcgggaggacgtggccccggcccccgcccgcagtgggcccgaccctcatggccctgagcaaagggctgcggctgctggggcgcctgggggccgagggggactgtagcgtgctgctggaggcgcgcggccgcgacgactgcctgctgttcgaggccggcacggtggccacgctggctccagaagaaaaggaagtcattaaaggacagtatggcaagctcacggacgcgtacggctgcctgggggagctgaggctgaaatctggtggcacgtctctgagcttcctggtgttggtgacaggctgcacatctgtgggcagaattccagatgctgaaatctacaaaatcactgccactgacttttaccctcttcaggaagaggccaaggaggaggaacgcctcatagctttgaagaaaatcctcagctcgggggtgttctatttctcatggccaaacgatgggtctcgctttgacctgactgtccgcacgcagaagcagggggatgacagctctgaatgggggaactccttcttctggaaccagctgttgcacgtgcccttgaggcagcaccaggtgagctgctgtgactggctgctgaagatcatctgcggggtggtcaccatccgcaccgtgtatgcctcccacaagcaggccaaggcctgcctcgtctctcgcgttagctgtgagcgcacaggcactcgcttccacacccgtggcgtgaacgacgacggccatgtgtccaacttcgtggagacagagcagatgatttacatggacgatggagtgtcatcttttgtccagatcagaggctccgttccgctgttctgggaacagccagggcttcaggttggctcccatcatctgagactccacagaggcctggaagccaatgcccctgctttcgacaggcacatggtgcttctgaaggagcagtacgggcagcaggtggtcgtgaaccttctgggaagcagaggcggagaggaggtgctcaacagagccttcaagaagctgctctgggcttcttgccacgcgggcgacacgcctatgatcaattttgacttccatcagtttgccaaaggtgggaagctagagaaattggagaccctcttgaggccacagttaaagctgcactgggaagacttcgatgtgttcacaaagggggagaacgtcagtccacgttttcagaaaggcactttgcggatgaactgtcttgactgcctggaccgaaccaacactgtgcagagcttcatcgcgctcgaggtcctgcatctgcagctcaagaccctggggctgagttcaaaacccatcgttgaccgctttgtggagtccttcaaagccatgtggtctctgaatggccacagcctgagcaaggtgttcacaggcagcagagccctggaagggaaggccaaggtggggaagctgaaggatggagcccggtccatgtctcgaaccatccagtccaacttcttcgacggggtgaagcaggaggccatcaagctgctgctggttggggacgtctacggcgaggaggtggcagacaaagggggcatgctgctggacagcacggcgctcctggtgactcccaggatcctgaaagctatgactgagcgtcagtccgaattcacaaatttcaagcggatccggattgctatggggacctggaacgtgaacggaggaaagcagttccggagcaacgtgctcaggacggcggagctgacagactggctgctcgactcgccccagctctcgggagctaccgactcccaggatgacagcagcccagctgacatatttgctgtggggtttgaagagatggtggaattgagcgcagggaatattgtcaatgccagtactaccaacaagaagatgtggggtgaacagcttcagaaagccatctcacgctctcatagatacattctgttgacttcggcacagctggtgggcgtctgtctttatatctttgtacgtccataccatgtcccgttcatcagggacgtagccatcgacacagtgaagacgggcatggggggcaaggcggggaacaagggcgccgtcggcatccgcttccagttccacagcaccagcttctgcttcatatgtagtcacctgacggccgggcagtcccaggtgaaggagcggaatgaagactacaaggagatcacccagaaactctgcttcccaatggggagaaatgttttttctcatgattatgtattttggtgtggcgatttcaactaccgcattgatcttacttatgaagaagtcttctattttgttaaacgccaagactggaagaaacttctggaatttgatcaactacagctacagaaatcaagtggaaaaatttttaaggactttcacgaaggagccattaactttggacccacctacaagtatgacgttggctcagccgcctacgatacaagcgacaaatgccgcacccccgcctggacagacagggtgctgtggtggaggaagaaacatccctttgataaaacagctggagaactcaaccttctagacagtgatctagatgttgacaccaaagtcagacacacctggtctcctggtgccctgcagtattatggtcgtgcggagctacaagcgtctgatcacagacctgtgctggcgatcgtggaggtggaagttcaggaagtcgatgtgggtgctcgggagagggttttccaggaagtgtcctccttccagggccccctggatgccactgttgtagtaaaccttcaatcaccgaccttagaagagaaaaacgagtttccagaggacctgcgtactgagctcatgcagaccttggggagttatgggacaattgttcttgtcaggatcaaccaagggcagatgctggtaacttttgcagacagtcactcggctctcagtgtcctggacgtggacggtatgaaggtgaaaggcagagcagtgaagattagaccgaagaccaaggactggctgaaaggtttgcgagaggagatcattcggaaacgagacagcatggcccccgtgtctcccactgccaactcctgtttgctggaggaaaactttgacttcacaagtttggactatgagtcagaaggggatattcttgaagacgatgaagactacttggtggatgaattcaatcagcctggagtctcggacagtgaactcgggggagacgacctctctgatgtccccggccccacagcactggctcctcccagcaagtcacctgctctcaccaaaaagaagcagcatccaacgtacaaagatgacgcggacctggtggagctcaagcgggagctggaagccgtcggggagttccgccaccgttctccgagcaggtctctgtcggtccccaaccggcctcggccacctcaacccccgcagagacccccccctccaaccggtttaatggtgaaaaagtcggcttcagatgcgtccatctcctccggcacccatggacagtattcaattttgcagacggcaagacttctaccaggagcacctcagcaacctcccaaggctcggactggaataagtaaaccttataatgtcaagcagatcaaaaccaccaatgcccaggaggcagaagcagcaatccggtgtctcctggaagccagaggaggtgcctccgaagaagccctaagtgccgtggccccaagggaccttgaagcatcctctgaaccagagcccacaccgggggcagccaaaccagagaccccacaggcgcccccactccttccccgtcggcccccacccagagttcctgccatcaagaagccaaccttgagaaggacaggaaagattgttttttgctctcgctctcaagcttctcagccttgcttactgcttcaaagacatgagtttgtaaggacagtagcagcccaaagactggcatctgtagacacatctggatcttccgtttga

SEQ ID NO: 30586 - DNA, 7271 bp, Homo sapiens
  source 1..7271: mol_type = unassigned DNA
gcaaagtgaaactctggcaagttgcgggcgcgcggggagctgtcgcgggcagcgcgccctcgggaggacgtggccccggcccccgcccgcagtgggcccgaccctcatggccctgagcaaagggctgcggctgctggggcgcctgggggccgagggggactgtagcgtgctgctggaggcgcgcggccgcgacgactgcctgctgttcgaggccggcacggtggccacgctggctccagaagaaaaggaagtcattaaaggacagtatggcaagctcacggacgcgtacggctgcctgggggagctgaggctgaaatctggtggcacgtctctgagcttcctggtgttggtgacaggctgcacatctgtgggcagaattccagatgctgaaatctacaaaatcactgccactgacttttaccctcttcaggaagaggccaaggaggaggaacgcctcatagctttgaagaaaatcctcagctcgggggtgttctatttctcatggccaaacgatgggtctcgctttgacctgactgtccgcacgcagaagcagggggatgacagctctgaatgggggaactccttcttctggaaccagctgttgcacgtgcccttgaggcagcaccaggtgagctgctgtgactggctgctgaagatcatctgcggggtggtcaccatccgcaccgtgtatgcctcccacaagcaggccaaggcctgcctcgtctctcgcgttagctgtgagcgcacaggcactcgcttccacacccgtggcgtgaacgacgacggccatgtgtccaacttcgtggagacagagcagatgatttacatggacgatggagtgtcatcttttgtccagatcagaggctccgttccgctgttctgggaacagccagggcttcaggttggctcccatcatctgagactccacagaggcctggaagccaatgcccctgctttcgacaggcacatggtgcttctgaaggagcagtacgggcagcaggtggtcgtgaaccttctgggaagcagaggcggagaggaggtgctcaacagagccttcaagaagctgctctgggcttcttgccacgcgggcgacacgcctatgatcaattttgacttccatcagtttgccaaaggtgggaagctagagaaattggagaccctcttgaggccacagttaaagctgcactgggaagacttcgatgtgttcacaaagggggagaacgtcagtccacgttttcagaaaggcactttgcggatgaactgtcttgactgcctggaccgaaccaacactgtgcagagcttcatcgcgctcgaggtcctgcatctgcagctcaagaccctggggctgagttcaaaacccatcgttgaccgctttgtggagtccttcaaagccatgtggtctctgaatggccacagcctgagcaaggtgttcacaggcagcagagccctggaagggaaggccaaggtggggaagctgaaggatggagcccggtccatgtctcgaaccatccagtccaacttcttcgacggggtgaagcaggaggccatcaagctgctgctggttggggacgtctacggcgaggaggtggcagacaaagggggcatgctgctggacagcacggcgctcctggtgactcccaggatcctgaaagctatgactgagcgtcagtccgaattcacaaatttcaagcggatccggattgctatggggacctggaacgtgaacggaggaaagcagttccggagcaacgtgctcaggacggcggagctgacagactggctgctcgactcgccccagctctcgggagctaccgactcccaggatgacagcagcccagctgacatatttgctgtggggtttgaagagatggtggaattgagcgcagggaatattgtcaatgccagtactaccaacaagaagatgtggggtgaacagcttcagaaagccatctcacgctctcatagatacattctgttgacttcggcacagctggtgggcgtctgtctttatatctttgtacgtccataccatgtcccgttcatcagggacgtagccatcgacacagtgaagacgggcatggggggcaaggcggggaacaagggcgccgtcggcatccgcttccagttccacagcaccagcttctgcttcatatgtagtcacctgacggccgggcagtcccaggtgaaggagcggaatgaagactacaaggagatcacccagaaactctgcttcccaatggggagaaatgttttttctcatgattatgtattttggtgtggcgatttcaactaccgcattgatcttacttatgaagaagtcttctattttgttaaacgccaagactggaagaaacttctggaatttgatcaactacagctacagaaatcaagtggaaaaatttttaaggactttcacgaaggagccattaactttggacccacctacaagtatgacgttggctcagccgcctacgatacaagcgacaaatgccgcacccccgcctggacagacagggtgctgtggtggaggaagaaacatccctttgataaaacagctggagaactcaaccttctagacagtgatctagatgttgacaccaaagtcagacacacctggtctcctggtgccctgcagtattatggtcgtgcggagctacaagcgtctgatcacagacctgtgctggcgatcgtggaggtggaagttcaggaagtcgatgtgggtgctcgggagagggttttccaggaagtgtcctccttccagggccccctggatgccactgttgtagtaaaccttcaatcaccgaccttagaagagaaaaacgagtttccagaggacctgcgtactgagctcatgcagaccttggggagttatgggacaattgttcttgtcaggatcaaccaagggcagatgctggtaacttttgcagacagtcactcggctctcagtgtcctggacgtggacggtatgaaggtgaaaggcagagcagtgaagattagaccgaagaccaaggactggctgaaaggtttgcgagaggagatcattcggaaacgagacagcatggcccccgtgtctcccactgccaactcctgtttgctggaggaaaactttgacttcacaagtttggactatgagtcagaaggggatattcttgaagacgatgaagactacttggtggatgaattcaatcagcctggagtctcggacagtgaactcgggggagacgacctctctgatgtccccggccccacagcactggctcctcccagcaagtcacctgctctcaccaaaaagaagcagcatccaacgtacaaagccggtttaatggtgaaaaagtcggcttcagatgcgtccatctcctccggcacccatggacagtattcaattttgcagacggcaagacttctaccaggagcacctcagcaacctcccaaggctcggactggaataagtaaaccttataatgtcaagcagatcaaaaccaccaatgcccaggaggcagaagcagcaatccggtgtctcctggaagccagaggaggtgcctccgaagaagccctaagtgccgtggccccaagggaccttgaagcatcctctgaaccagagcccacaccgggggcagccaaaccagagaccccacaggcgcccccactccttccccgtcggcccccacccagagttcctgccatcaagaagccaaccttgagaaggacaggaaagcccctgtcaccggaagaacagtttgagcaacagactgtccattttacaatcgggcccccggagacaagcgttgaggcccctcctgtcgtgacagcccctcgagtccctcctgttcccaaaccaagaacatttcagcctgggaaagctgcagagaggccaagccacaggaagccagcatcagacgaagcccctcctggggcaggagcctctgtgccaccacctctggaggcgccgcctcttgtgcccaaggtacccccgaggaggaagaagtcagcccccgcagccttccacctgcaggtcctgcagagcaacagccagcttctccagggcctcacttacaatagcagtgacagcccctctgggcacccacctgccgcgggcaccgtcttcccacaaggggactttctcagcacttcatctgctacaagccccgacagcgatggcaccaaagcgatgaagccagaggcagccccacttcttggtgattatcaggaccccttctggaaccttcttcaccaccctaaactgttgaataacacttggctttctaagagctcagaccctttggactcaggaaccaggagccccaaaagagatcccatagacccagtgtcagctggcgcttcagctgccaaggcagagctgccaccagatcatgaacacaaaaccttaggtcactgggtgacaatcagtgaccaagaaaagaggacagcactgcaggtgtttgacccactggcaaaaacatgactgagcagctttgaaggctgcagtcctatagaatgcataccttcctccctctagacatccctccaccagaagagacatctatttaaaggcacactggccaaaacgtttgtgcatctgtcactctcgtgtagtttacaaaaatcgtgtctcttattcagtaagatggttactcagccaccaaaatatatttcactcaaggcttgtacatctgaagtttgctcttcaaggaatgggaaccttcctgttaaattcggtgtatggattttaagaaaggaatctagccaatgaggtccaagaagttctcacccattgaatttttaaatggctgttcagttcatgttgtacgtgatggagatttgtcttttgttttatttgcattttacagatttggtataacattttggggagccacctgaaggttgatgtataaagtaaggattagagaaagaggtcgttgtgaccattagtagctgtcctggcccacttaaacaaggttacaaaaaatcagagtcggaagcagccaaataggtcaacctaatgactagactgtacattcccatgagccttcatgtttaagtgtgtacatgtgcgttaaccttgatgatgcgtgaatcccgagggagccggtggcatacaccgttagcttaaccttagcttaaactagctgaaggctcctgtgccatgtcttagacattgcatgccctatcaattactataatcctgagccatggtgtgctactgaaaccaatttttatccaccatctagtccttattaaatgaaacctcacggatcctttgttccgcttatattccatgcataccacataaaagcacacagtgcgaaaactcttgctgatacgcgatattgattctcattgttagaatatggagagtgtttcagcctcgtctgtccggctggagcttcgggatggaaagtgctatgtgtccctgcatataagaatcaccaggccagtgtttctgggtttgcttgtctatatgtttgtctatattttttgcctatacatttttcccacgtttccaacagcacttctcacctattcaataactgaaaaagacattaccatagtgctttacatttttaaagtaatgttacaaggtctggaatccatttggagcagataccgtgttttcgctatttaataagaagttcagtagtgaaatcttactgtaccgcctgttgtatctgggagcctcgtacagaggctcgcacagcagtgatcaagtgtcatcccttacgtgactgggggatgtctgtcctaaaagctgactgctaggatagtaaggatcatcttgcctgggctatgccactgtcttgttaccaattagacatctggaatttcataattagttttcattgtcactgtcaagatatattgcagattacttaaatatggccatcaaaacaaaagttacaacacgtatctcttttcatctgaaaactaatacctggaaaaggataaaaaaaaaaaggaatccgtgacccacagagctagacagataagatgcatagttgaccagtcataaaaggcggtgtttaggtgatcaggatgccgttggtggcatttacgtgctttatatgatttttacctctgtaacaaacacaagaaataaacagaatggtccttaacagagtttgggggagagagcaagatgggttccttggagaagctgatttgccaagatgcacatcgctattaacagccagagtcataaatgaaatgaaattgaagaattcattcaaatgctcttttccctataacctcttttctcaccaaaaaggagataaatttgaaaacagataaatgtaacaaccagtcaaagaagcaggggaaaagtaagctcctccaaagttgcttgcagtgctggaaatagatctcatttttaggttttctcttcgttccagataccaaataaatgggacagagaataaaatttttgttaaaatatgtgctcatctcctaagtagctcttcagagtctgaccgtaagtaaaaacacacagaattgtgttgactgggggaggtgaatcacaaaaaagttacgaggagtttaagagttaaatattatttgatcgtggctgtcaaatttagtgaacaacatagattggatttggagttggtagtaggtatggttctcataccagaattctcttaaaaaaaaaaaaaaggacaattggaattgccttatttatttttaaaatcaatgcttactagttggtaggattcccaggtcagcagcagggttgattaaataatcttgacaatgagcagctgccatcttgggggatttcattctgtggttttttaaatgtttcgtctttgatgctaccatccagggcttcttattgtgaccttgtagcctattttgttcctgctgttctctaacatggtgcagttcacgcagactggtttaggtacttcacaactcaccattgtctctctgaccccaagcctagtcccttttacatcaccatcttctcagacttcttgcctattcttaaaatatgttttggttaatgattgaattaggacatcagcttaagcaattcctgtaacggtttaacgttgttgaagttcaaggcacataataaaattctccctgatgtgtgtgtaagtataaacaaagtaatgtatcaaagcgttcactttataatgaagtcatttcattgggaaggaaagctgcaaagattattgggggactagtgattaataaaatcctgtaatatttttgaagtgaaaatttgtactgaaattgtacatgatacctattaaatgtttttgtcttttttt

SEQ ID NO: 30587 - DNA, 547 bp, Homo sapiens
  source 1..547: mol_type = unassigned DNA
agtgcaatggcgcgatctcggctcaccacaacctctgcctcctgggttcaagcaattctcctgcctcagcctcctgaatagctgggactacaggcatgcgccaccatgcccaactaattttttgtatttttagtagagacggggtttttccatgttggtcaggctggtctgaaactccgacctcaggtggtccacctgcctcagcctcccaaagtgctgggattacagccatgagccgccgtgcctggccgacctctcttctcttttaagatgtttctttatgcctcgggacctgctcctcctgcaggaacctgcaggtggggaggtcaaggtggcacgtctctgagcttcctggtgttggtgacaggctgcacatctgtgggcagaattccagatgctgaaatctacaaaatcactgccactgacttttaccctcttcaggaagaggccaaggaggaggaacgcctcatagctttgaagaaaatcctcagctcgggggtgttctatttctcatggccaaacgatgggtctcgctttgacctgactg

SEQ ID NO: 30588 - DNA, 2060 bp, Homo sapiens
  source 1..2060: mol_type = unassigned DNA
agtgcaatggcgcgatctcggctcaccacaacctctgcctcctgggttcaagcaattctcctgcctcagcctcctgaatagctgggactacaggcatgcgccaccatgcccaactaattttttgtatttttagtagagacggggtttttccatgttggtcaggctggtctgaaactccgacctcaggtggtccacctgcctcagcctcccaaagtgctgggattacagccatgagccgccgtgcctggccgacctctcttctcttttaagatgtttctttatgcctcgggacctgctcctcctgcaggaacctgcaggtggggaggtcaaggtggcacgtctctgagcttcctggtgttggtgacaggctgcacatctgtgggcagaattccagatgctgaaatctacaaaatcactgccactgacttttaccctcttcaggaagaggccaaggaggaggaacgcctcatagctttgaagaaaatcctcagctcgggggtgttctatttctcatggccaaacgatgggtctcgctttgacctgactgtccgcacgcagaagcagggggatgacagctctgaatgggggaactccttcttctggaaccagctgttgcacgtgcccttgaggcagcaccaggtgagctgctgtgactggctgctgaagatcatctgcggggtggtcaccatccgcaccgtgtatgcctcccacaagcaggccaaggcctgcctcgtctctcgcgttagctgtgagcgcacaggcactcgcttccacacccgtggcgtgaacgacgacggccatgtgtccaacttcgtggagacagagcagatgatttacatggacgatggagtgtcatcttttgtccagatcagaggctccgttccgctgttctgggaacagccagggcttcaggttggctcccatcatctgagactccacagaggcctggaagccaatgcccctgctttcgacaggcacatggtgcttctgaaggagcagtacgggcagcaggtggtcgtgaaccttctgggaagcagaggcggagaggaggtgctcaacagagccttcaagtttgccaaaggtgggaagctagagaaattggagaccctcttgaggccacagttaaagctgcactgggaagacttcgatgtgttcacaaagggggagaacgtcagtccacgttttcagaaaggcactttgcggatgaactgtcttgactgcctggaccgaaccaacactgtgcagagcttcatcgcgctcgaggtcctgcatctgcagctcaagaccctggggctgagttcaaaacccatcgttgaccgctttgtggagtccttcaaagccatgtggtctctgaatggccacagcctgagcaaggtgttcacaggcagcagagccctggaagggaaggccaaggtggggaagctgaaggatggagcccggtccatgtctcgaaccatccagtccaacttcttcgacggggtgaagcaggaggccatcaagctgctgctggttggggacgtctacggcgaggaggtggcagacaaagggggcatgctgctggacagcacggcgctcctggtgactcccaggatcctgaaagctatgactgagcgtcagtccgaattcacaaatttcaagcggatccggattgctatggggacctggaacgtgaacggaggaaagcagttccggagcaacgtgctcaggacggcggagctgacagactggctgctcgactcgccccagctctcgggagctaccgactcccagggtgagggcagtgactttgggggagacaaaatccaattgcacctaacctgacatgtcacgcttgaccctttagtggccatcgtcttgtggaatttcatctttggtgtcttccctcctcacaatgtctaaatagcaccatggcctgactctcaagaatgctgcctcgcaagtaactgacctttttcctttcccagatgtttagaagagttagcagatggtgaatctctcttttctctttgcatacagtgatggtgaagtcttaggctttcatcagtagaatcttttcgtca

SEQ ID NO: 30589 - DNA, 2080 bp, Homo sapiens
  source 1..2080: mol_type = unassigned DNA
gggcgcagcgccgagattgattcaccttcacctgtgctgcactccagctgacccaagtaggaagccagacgagctgtaaaacatgaacggaagagtggattatttggtcactgaggaagagatcaatcttaccagagggccctcagggctgggcttcaacatcgtcggtgggacagatcagcagtatgtctccaacgacagtggcatctacgtcagccgcatcaaagaaaatggggctgcggccctggatgggcggctccaggagggtgataagatcctttcggtaaatggccaagacctaaagaacctgctgcaccaggatgctgtagacctctttcgtaatgcaggctatgctgtgtctctgagagtgcagcacaggttacaggtgcagaatggacctataggacatcgaggtgaaggggacccaagtggtattcccatatttatggtgctggtgccagtgtttgccctcaccatggtagcagcctgggctttcatgagataccggcaacaactttgaaaaacttgctctctttcaatactcccaatgaagatacatttcactcaccctccacccctgctattctgccatgtctttccctctctctgcatagccagatttgaagtgactgatacccaccccaaaccttgctgttcacagtctccaattcttcatattctaatgggaaagtaaaggtattgtttgaaggaaaactgaagaaaagacttggcttagaacaaatgaggagttatatattttactaggacttttgatagaaattcagctacaacccaaagagagaaagattgagtcttcctgtcaccataggcaataccttttttcttagctggcatgccataaaggccagctatgtgatattagaggaagaaaggatttttctttttaatgatcttccttgggaaattattgtggcctttatttaatttctaactacgtacctgggtgcctatatcgacaaagagtgagaagagcatttttacttttttaaaaaagcaaatacatatatacacatacgtatgcaaatattatagtataatagtgatccctatggagaattaaaggtgagaaagctactttgtggtgtctaggtttctgataaaagggatgatcttaactgaagaatttaaagagatacttaaacagagcaaatgtagtaggaacaagggagtgagccttataagaggacgttcagtctcatttattaaaataataactgagactgggagaggtggctcatgcctgtaaatcccagcactttggtagcctgaagtgggagattgcttgagtccaggagaccagcctgggcaacatagcaaaacctcatctctatttaaaaaaaaaatagaaaaaaatgtaataactgaagcaactaattaaaaatcttagaagaacaatatttattcttataacagccaactatggtgagttattataaggtaaattgccataatccagcgctgctcacatctaaaaaactttgaggtgtaaaggtaaatcgtaccaatctctgggctgccctagtgacttttttgatacctcagagtcctattgaagaaccaggtggaatgattgtggtaagggctatagtgctggagccaaacaccccagcaagaaaactctaaaaggacaaaagataaggtagtgcctccaaggtggcacctgaaccctctcaggctactttttggtttctactaacaaacctgagggaaggaactgcctccctggcaggatgggcatcaaatcaactctggcttcagatttagttaaaatgaggccgggtgcagcggctcacacctgtcatctcagcactttgggaggccgaggcaggcagatcacaaggtcaggagttcaagaccagcctggccaacatggtgaaaccccatgtctactgaaaatacaaaaattacctggacatggtggcgcgttcctgtaattccagctactcaggaggctgaggcaggagaactgtttgaaccaggacctgggagacggaggttgcagtgagccaagatcacgccactgcactccagcctgggctacagagcaagactccatctc

SEQ ID NO: 30590 - DNA, 1452 bp, Homo sapiens
  source 1..1452: mol_type = unassigned DNA
gcattgcgcaggcgcgctgcctggagtcctgcccccagcggcggttgctccaatcaccactggaggctccctcccgaggcaccctcgctggcgagctgagaggaaatggcggggaggtccctgacatcgaaggccgagcccaccgcaggagccgtggacagggctgagaaggccggagggcaggacacgtcctcacagaaaattgaagacttgatggaaatggtgcaaaagctgcagaaagtgggaagcctagagccccgagttgaggtcctgattaaccggattaatgaggtccagcaagcaaaaaagaaagccaataaagacctaggagaggcccggaccatctgtgaggccctgcagaaggaactggactcgctgcatggagagaaagtacacctgaaggagatcttgagcaaaaaacaagagaccctgaggatcctccggctgcattgccaggaaaaggaaagtgaggcacacaggaagcacaccatgttgcaggagtgcaaggagagaatttctgccctgaacttgcagattgaagaagagaagaacaaacagagacagctgaggttggcattcgaggaacagctggaagatctgatgggccagcacaaggacctctgggacttccacatgccagagcggctggcaaaggagatttgtgccctggacagcagcaaggagcagctgctcaaggaagagaagctggtcaaggcgacactggaagacgtgaagcatcagctgtgctccctgtgtggggctgagggcccctccacccttgatgagggactctttctccgcagccaggaggctgcagccacagtgcagctgtttcaggaagagcacaggaaggctgaggagctcctagcagctgctgcccagcgccaccagcagctgcagcagaagtgccaacaacagcagcagaagcggcagaggctgaaggaagagctggaaaagcatggaatgcaagtccctgcccaagcccagagcacacaagaggaagaggctggcccaggagatgtggctcccagaccaggtagaccagtgacatggtggagttgaagagagaggctcactgcagagcactgtttccatggaaaaatggaacatggcaaagtgcagaaattcttcagtcagtccaggacagacgagttctctaagatgcagttaatcatacctgtcttaaacaaactggcaatatactatcaaacatgacttttaaatcaagtggaagttagaaaatatattgaactgagtggcaatgaagacaccacattttaaaactgtaattcagttaagcccacaattagaaggaactttagcttttattggttcaccacaattttttaagaaatcaaccaatgattgttcagttaatgaataaaaggcctttgacacagttcacctattcatgtgaaaaaaaaagactaataaatagtcagcttcccttag

SEQ ID NO: 30591 - DNA, 1309 bp, Homo sapiens
  source 1..1309: mol_type = unassigned DNA
gcattgcgcaggcgcgctgcctggagtcctgcccccagcggcggttgctccaatcaccactggaggctccctcccgaggcaccctcgctggcgagctgagaggaaatggcggggaggtccctgacatcgaaggccgagcccaccgcaggagccgtggacagggctgagaaggccggagggcaggacacgtcctcacagaaaattgaagacttgatggaaatggtgcaaaagctgcagaaagtgggaagcctagagccccgagttgaggtcctgattaaccggattaatgaggtccagcaagcaaaaaagaaagccaataaagacctaggagaggcccggaccatctgtgaggccctgcagaaggaactggactcgctgcatggagagaaagtacacctgaaggagatcttgagcaaaaaacaagagaccctgaggatcctccggctgcattgccaggaaaaggaaagtgaggcacacaggaagcacaccatgttgcaggagtgcaaggagagaatttctgccctgaacttgcagattgaagaagagaagaacaaacagagacagctgaggttggcattcgaggaacagctggaagatctgatgggccagcacaaggacctctgggacttccacatgccagagcggctggcaaaggagatttgtgccctggacagcagcaaggagcagctgctcaaggaagagaagctggtcaaggcgacactggaagacgtgaagcatcagctgtgctccctgtgtggggctgagggcccctccacccttgatgagggactctttctccgcagccaggaggctgcagccacagtgcagctgtttcaggaagagcacaggaaggctgaggagctcctagcagctgctgcccagcgccaccagcagctgcagcagaagtgccaacaacagcagcagaagcggcagaggctgaaggaagagctggaaaagcatggaatgcaagtccctgcccaagcccagagcacacaagaggaagaggctggcccaggagatgtggccagtcccaagcccctaaaaggagaaagacctggagctgcacaccaagcagggcctgatgtcctcataggccaggaggacacactccaccccgaccttagcccaaggggctttcaggaaataaaggagctattttgatacagctaagtctactggtgaggagtaggggtcaggcccaagatccccagtctcctgtgactgattgaagccttggcttgactctgcctcttggtctgggccagaggtacatcacaggttttcaataaatgcttccttaacctcctgg

SEQ ID NO: 30592 - DNA, 1377 bp, Homo sapiens
  source 1..1377: mol_type = unassigned DNA
gctcaggctggagaagggccgcgggacccggggaacgcggcctggaggacgaggaggactgggttcccggaggcaacaggaccggctcggcatctacagctactggcaggacacgtcctcacagaaaattgaagacttgatggaaatggtgcaaaagctgcagaaagtgggaagcctagagccccgagttgaggtcctgattaaccggattaatgaggtccagcaagcaaaaaagaaagccaataaagacctaggagaggcccggaccatctgtgaggccctgcagaaggaactggactcgctgcatggagagaaagtacacctgaaggagatcttgagcaaaaaacaagagaccctgaggatcctccggctgcattgccaggaaaaggaaagtgaggcacacaggaagcacaccatgttgcaggagtgcaaggagagaatttctgccctgaacttgcagattgaagaagagaagaacaaacagagacagctgaggttggcattcgaggaacagctggaagatctgatgggccagcacaaggacctctgggacttccacatgccagagcggctggcaaaggagatttgtgccctggacagcagcaaggagcagctgctcaaggaagagaagctggtcaaggcgacactggaagacgtgaagcatcagctgtgctccctgtgtggggctgagggcccctccacccttgatgagggactctttctccgcagccaggaggctgcagccacagtgcagctgtttcaggaagagcacaggaaggctgaggagctcctagcagctgctgcccagcgccaccagcagctgcagcagaagtgccaacaacagcagcagaagcggcagaggctgaaggaagagctggaaaagcatggaatgcaagtccctgcccaagcccagagcacacaagaggaagaggctggcccaggagatgtggctcccagaccaggtagaccagtgacatggtggagttgaagagagaggctcactgcagagcactgtttccatggaaaaatggaacatggcaaagtgcagaaattcttcagtcagtccaggacagacgagttctctaagatgcagttaatcatacctgtcttaaacaaactggcaatatactatcaaacatgacttttaaatcaagtggaagttagaaaatatattgaactgagtggcaatgaagacaccacattttaaaactgtaattcagttaagcccacaattagaaggaactttagcttttattggttcaccacaattttttaagaaatcaaccaatgattgttcagttaatgaataaaaggcctttgacacagttcacctattcatgtgaaaaaaaaagactaataaatagtcagcttccctta

SEQ ID NO: 30593 - DNA, 1375 bp, Homo sapiens
  source 1..1375: mol_type = unassigned DNA
gctccggctgaggggccgcgggacccggggaacgcggcctggaggacgaggaggactgggttcccggaggcaacaggaccggctcggcatctacagctactggcaggacacgtcctcacagaaaattgaagacttgatggaaatggtgcaaaagctgcagaaagtgggaagcctagagccccgagttgaggtcctgattaaccggattaatgaggtccagcaagcaaaaaagaaagccaataaagacctaggagaggcccggaccatctgtgaggccctgcagaaggaactggactcgctgcatggagagaaagtacacctgaaggagatcttgagcaaaaaacaagagaccctgaggatcctccggctgcattgccaggaaaaggaaagtgaggcacacaggaagcacaccatgttgcaggagtgcaaggagagaatttctgccctgaacttgcagattgaagaagagaagaacaaacagagacagctgaggttggcattcgaggaacagctggaagatctgatgggccagcacaaggacctctgggacttccacatgccagagcggctggcaaaggagatttgtgccctggacagcagcaaggagcagctgctcaaggaagagaagctggtcaaggcgacactggaagacgtgaagcatcagctgtgctccctgtgtggggctgagggcccctccacccttgatgagggactctttctccgcagccaggaggctgcagccacagtgcagctgtttcaggaagagcacaggaaggctgaggagctcctagcagctgctgcccagcgccaccagcagctgcagcagaagtgccaacaacagcagcagaagcggcagaggctgaaggaagagctggaaaagcatggaatgcaagtccctgcccaagcccagagcacacaagaggaagaggctggcccaggagatgtggctcccagaccaggtagaccagtgacatggtggagttgaagagagaggctcactgcagagcactgtttccatggaaaaatggaacatggcaaagtgcagaaattcttcagtcagtccaggacagacgagttctctaagatgcagttaatcatacctgtcttaaacaaactggcaatatactatcaaacatgacttttaaatcaagtggaagttagaaaatatattgaactgagtggcaatgaagacaccacattttaaaactgtaattcagttaagcccacaattagaaggaactttagcttttattggttcaccacaattttttaagaaatcaaccaatgattgttcagttaatgaataaaaggcctttgacacagttcacctattcatgtgaaaaaaaaagactaataaatagtcagcttcccttag

SEQ ID NO: 30594 - DNA, 1217 bp, Homo sapiens
  source 1..1217: mol_type = unassigned DNA
acggaatggagcgacagggagtggacgtgccccatgtgaaatgcaaagaccaggaaccgcagcccttgggggagagcaaggagcatccgcggtgggaagagaactgcgaggaggaagctggtggagggccagctagtgccagttgccagctgacggtcctggaagggaagtcgggactctacttctcctctctggactcaagcattgacatcctgcagaagagagcccaggagctgatcgaaaacatcaacaagagccggcaaaaggaccatgcactcatgaccaacttcaggaacagcctgaagaccaaggtttcggatctgacagagaaattagaggagaggatctatcagatttataatgaccacaacaagatcatccaggaaaagctccaagagttcacccagaaaatggcaaagatcagccatttggagacagagctcaaacaagtctgccacagcgtggagactgtgtacaaagacctgtgtctccagcctgagcagagcctaagactcagatgggggccagaccactctaggggaaagtccccaccacgtcccggcaactcacagcccccagacgtgttcgtttcttctgtggctgaaactacttctcaggccactgcttcagaagtacagaccaacagagatggtgaatgctgacagctgccgggagactcacgccttagtgacagtctccaggagaagactgtgaggccaccatttgggccacactgagaaattgtttttcatggttctataatgcatcttggcagaaaaaaacaaaaacccaaagctccttgtgctgaactcccaaaatgtagcaagtccagcccctgccataggcccaggcttcgtgctccccacccttggcaagttctccccacccccagccccacagtttattaaatgtttgattttcaacctggccacgcttccttgccacagaggctgaaagcacccctgagctccaaggaaacacagcaagccctttcttaccctcgggagggataggagggacagcacatcggaagagcagtcacttgcctcagctgacctctgcccatctgaagccgcctctcccagagaatcccacaccccatgccctggtgtctcatcctttgctcctccccagctccttgaagcagaaggcagattgtagcctcctttttagagccaattctgtttacttcctaaagtacaaacctatttttttta

SEQ ID NO: 30595 - DNA, 3452 bp, Homo sapiens
  source 1..3452: mol_type = unassigned DNA
caggaacttaagacagttcctcctggcgatgtgatggaatttaatgggacaggagaagggaacgggctttcttttcaggccagcgtggcagcgggcggtagggcgaaagggagaaggaaacgagggtttattccgttgcccactccgcgatatttacaaccgtaacagagaaaatggaaaagcaaaagccctttgcattgttcgtaccaccgagatcaagcagcagtcaggtgtctgcggtgaaacctcagaccctgggaggcgattccactttcttcaagagtttcaacaaatgtactgaagatgattttgagtttccatttgcaaagactaatctctccaaaaatggggaaaacattgattcagatcctgctttacaaaaagttaatttcttgcccgtgcttgagcaggttggtaattctgactgtcactatcaggaaggactaaaagactctgatttggagaattcagagggattgagcagagtgtattcaaaactgtataaggaggctgaaaagataaaaaaatggaaagtaagtacagaagctgaactgagacagaaagaaagtaagttgcaagaaaacagaaagataattgaagcacagcgaaaagccattcaggaactgcaatttggaaatgaaaaagtaagtttgaaattagaagaaggaatacaagaaaataaagatttaataaaagagaataatgccacaaggcatttatgtaatctactcaaagaaacctgtgctagatctgcagaaaagacaaagaaatatgaatatgaacgggaagaaaccaggcaagtttatatggatctaaataataacattgagaaaatgataacagcttttgaggaacttcgtgtgcaagctgagaattccagactggaaatgcattttaagttaaaggaagattatgaaaaaatccaacaccttgaacaagaatacaagaaggaaataaatgacaaggaaaagcaggtatcactactattgatccaaatcactgagaaagaaaataaaatgaaagatttaacatttctgctagaggaatccagagataaagttaatcaattagaggaaaagacaaaattacagagtgaaaacttaaaacaatcaattgagaaacagcatcatttgactaaagaactagaagatattaaagtgtcattacaaagaagtgtgagtactcaaaaggctttagaggaagatttacagatagcaacaaaaacaatttgtcagctaactgaagaaaaagaaactcaaatggaagaatctaataaagctagagctgctcattcgtttgtggttactgaatttgaaactactgtctgcagcttggaagaattattgagaacagaacagcaaagattggaaaaaaatgaagatcaattgaaaatacttaccatggagcttcaaaagaaatcaagtgagctggaagagatgactaagcttacaaataacaaagaagtagaacttgaagaattgaaaaaagtcttgggagaaaaggaaacacttttatatgaaaataaacaatttgagaagattgctgaagaattaaaaggaacagaacaagaactaattggtcttctccaagccagagagaaagaagtacatgatttggaaatacagttaactgccattaccacaagtgaacagtattattcaaaagaggttaaagatctaaaaactgagcttgaaaacgagaagcttaagaatactgaattaacttcacactgcaacaagctttcactagaaaacaaagagctcacacaggaaacaagtgatatgaccctagaactcaagaatcagcaagaagatattaataataacaaaaagcaagaagaaaggatgttgaaacaaatagaaaatcttcaagaaacagaaacccaattaagaaatgaactagaatatgtgagagaagagctaaaacagaaaagagatgaagttaaatgtaaattggacaagagtgaagaaaattgtaacaatttaaggaaacaagttgaaaataaaaacaagtatattgaagaacttcagcaggagaataaggccttgaaaaaaaaaggtacagcagaaagcaagcaactgaatgtttatgagataaaggtcaataaattagagttagaactagaaagtgccaaacagaaatttggagaaatcacagacacctatcagaaagaaattgaggacaaaaagatatcagaagaaaatcttttggaagaggttgagaaagcaaaagtaatagctgatgaagcagtaaaattacagaaagaaattgataagcgatgtcaacataaaatagctgaaatggtagcacttatggaaaaacataagcaccaatatgataagatcattgaagaaagagactcagaattaggactttataagagcaaagaacaagaacagtcatcactgagagcatctttggagattgaactatccaatctcaaagctgaacttttgtctgttaagaagcaacttgaaatagaaagagaagagaaggaaaaactcaaaagagaggcaaaagaaaacacagctactcttaaagaaaaaaaagacaagaaaacacaaacatttttattggaaacacctgaaatttattggaaattggattctaaagcagttccttcacaaactgtatctcgaaatttcacatcagttgatcatggcatatccaaagataaaagagactatctgtggacatctgccaaaaatactttatctacaccattgccaaaggcatatacagtgaagacaccaacaaaaccaaaactacagcaaagagaaaacttgaatatacccattgaagaaagtaaaaaaaagagaaaaatggcctttgaatttgatattaattcagatagttcagaaactactgatcttttgagcatggtttcagaagaagagacattgaaaacactgtataggaacaataatccaccagcttctcatctttgtgtcaaaacaccaaaaaaggccccttcatctctaacaacccctggatctacactgaagtttggagctataagaaaaatgcgggaggaccgttgggctgtaattgctaaaatggatagaaaaaaaaaactaaaagaagctgaaaagttatttgtttaatttcagagaatcagtgtagttaaggagcctaataacgtgaaacttatagttaatattttgttcttatttgccagagccaaattttatctggaagttgagacttaaaaaatacttgcatgaatgatttgtgtttctttatatttttagcctaaatgttaactacatattgtctggaaacctgtcattgtattcagataattagatgattatatattgttgttactttttcttgtattcatgaaaactgtttttactaagttttcaaatttgtaaagttagcctttgaatgctaagaatgcattattgagggtcattctttattctttactattaaaatattttggatgc

SEQ ID NO: 30596 - DNA, 3522 bp, Homo sapiens
  source 1..3522: mol_type = unassigned DNA
ctgggagcctggcaagcccacacagcgacggttatttagccgttgaactgccagccgcccggggcccacgcgctccgggccgctcaggctgagcgatttcccgccttttctgaggttctgaggcgggagccattggttctttctgttgccctcatagaccgtatgtagcagttcgcgtgggcacagaacccacggtttcccgctagttcttcaaagatatttacaaccgtaacagagaaaatggaaaagcaaaagccctttgcattgttcgtaccaccgagatcaagcagcagtcaggtgtctgcggtgaaacctcagaccctgggaggcgattccactttcttcaagagtttcaacaaatgtactgaagatgattttgagtttccatttgcaaagactaatctctccaaaaatggggaaaacattgattcagatcctgctttacaaaaagttaatttcttgcccgtgcttgagcaggttggtaattctgactgtcactatcaggaaggactaaaagactctgatttggagaattcagagggattgagcagagtgtattcaaaactgtataaggaggctgaaaagataaaaaaatggaaagtaagtacagaagctgaactgagacagaaagaaagtaagttgcaagaaaacagaaagataattgaagcacagcgaaaagccattcaggaactgcaatttggaaatgaaaaagtaagtttgaaattagaagaaggaatacaagaaaataaagatttaataaaagagaataatgccacaaggcatttatgtaatctactcaaagaaacctgtgctagatctgcagaaaagacaaagaaatatgaatatgaacgggaagaaaccaggcaagtttatatggatctaaataataacattgagaaaatgataacagcttttgaggaacttcgtgtgcaagctgagaattccagactggaaatgcattttaagttaaaggaagattatgaaaaaatccaacaccttgaacaagaatacaagaaggaaataaatgacaaggaaaagcaggtatcactactattgatccaaatcactgagaaagaaaataaaatgaaagatttaacatttctgctagaggaatccagagataaagttaatcaattagaggaaaagacaaaattacagagtgaaaacttaaaacaatcaattgagaaacagcatcatttgactaaagaactagaagatattaaagtgtcattacaaagaagtgtgagtactcaaaaggctttagaggaagatttacagatagcaacaaaaacaatttgtcagctaactgaagaaaaagaaactcaaatggaagaatctaataaagctagagctgctcattcgtttgtggttactgaatttgaaactactgtctgcagcttggaagaattattgagaacagaacagcaaagattggaaaaaaatgaagatcaattgaaaatacttaccatggagcttcaaaagaaatcaagtgagctggaagagatgactaagcttacaaataacaaagaagtagaacttgaagaattgaaaaaagtcttgggagaaaaggaaacacttttatatgaaaataaacaatttgagaagattgctgaagaattaaaaggaacagaacaagaactaattggtcttctccaagccagagagaaagaagtacatgatttggaaatacagttaactgccattaccacaagtgaacagtattattcaaaagaggttaaagatctaaaaactgagcttgaaaacgagaagcttaagaatactgaattaacttcacactgcaacaagctttcactagaaaacaaagagctcacacaggaaacaagtgatatgaccctagaactcaagaatcagcaagaagatattaataataacaaaaagcaagaagaaaggatgttgaaacaaatagaaaatcttcaagaaacagaaacccaattaagaaatgaactagaatatgtgagagaagagctaaaacagaaaagagatgaagttaaatgtaaattggacaagagtgaagaaaattgtaacaatttaaggaaacaagttgaaaataaaaacaagtatattgaagaacttcagcaggagaataaggccttgaaaaaaaaaggtacagcagaaagcaagcaactgaatgtttatgagataaaggtcaataaattagagttagaactagaaagtgccaaacagaaatttggagaaatcacagacacctatcagaaagaaattgaggacaaaaagatatcagaagaaaatcttttggaagaggttgagaaagcaaaagtaatagctgatgaagcagtaaaattacagaaagaaattgataagcgatgtcaacataaaatagctgaaatggtagcacttatggaaaaacataagcaccaatatgataagatcattgaagaaagagactcagaattaggactttataagagcaaagaacaagaacagtcatcactgagagcatctttggagattgaactatccaatctcaaagctgaacttttgtctgttaagaagcaacttgaaatagaaagagaagagaaggaaaaactcaaaagagaggcaaaagaaaacacagctactcttaaagaaaaaaaagacaagaaaacacaaacatttttattggaaacacctgaaatttattggaaattggattctaaagcagttccttcacaaactgtatctcgaaatttcacatcagttgatcatggcatatccaaagataaaagagactatctgtggacatctgccaaaaatactttatctacaccattgccaaaggcatatacagtgaagacaccaacaaaaccaaaactacagcaaagagaaaacttgaatatacccattgaagaaagtaaaaaaaagagaaaaatggcctttgaatttgatattaattcagatagttcagaaactactgatcttttgagcatggtttcagaagaagagacattgaaaacactgtataggaacaataatccaccagcttctcatctttgtgtcaaaacaccaaaaaaggccccttcatctctaacaacccctggatctacactgaagtttggagctataagaaaaatgcgggaggaccgttgggctgtaattgctaaaatggatagaaaaaaaaaactaaaagaagctgaaaagttatttgtttaatttcagagaatcagtgtagttaaggagcctaataacgtgaaacttatagttaatattttgttcttatttgccagagccaaattttatctggaagttgagacttaaaaaatacttgcatgaatgatttgtgtttctttatatttttagcctaaatgttaactacatattgtctggaaacctgtcattgtattcagataattagatgattatatattgttgttactttttcttgtattcatgaaaactgtttttactaagttttcaaatttgtaaagttagcctttgaatgctaagaatgcattattgagggtcattctttattctttactattaaaatattttggatgcaaa

SEQ ID NO: 30597 - DNA, 2554 bp, Homo sapiens
  source 1..2554: mol_type = unassigned DNA
ccacgcgctccgggccgctcaggctgagcgatttcccgccttttctgaggttctgaggcgggagccattggttctttctgttgccctcatagaccgtatgtagcagttcgcgtgggcacagaacccacggtttcccgctagttcttcaaagtagatatttacaaccgtaacagagaaaatggaaaagcaaaagccctttgcattgttcgtaccaccgagatcaagcagcagtcaggtgtctgcggtgaaacctcagaccctgggaggcgattccactttcttcaagagtttcaacaaatgtactgaagatgattttgagtttccatttgcaaagactaatctctccaaaaatggggaaaacattgattcagatcctgctttacaaaaagttaatttcttgcccgtgcttgagcaggttggtaattctgactgtcactatcaggaaggactaaaagactctgatttggagaattcagagggattgagcagagtgtattcaaaactgtataaggaggctgaaaagataaaaaaatggaaagtaagtacagaagctgaactgagacagaaagaaagtaagttgcaagaaaacagaaagataattgaagcacagcgaaaagccattcaggaactgcaatttggaaatgaaaaagtaagtttgaaattagaagaaggaatacaagaaaataaagatttaataaaagagaataatgccacaaggcatttatgtaatctactcaaagaaacctgtgctagatctgcagaaaagacaaagaaatatgaatatgaacgggaagaaaccaggcaagtttatatggatctaaataataacattgagaaaatgataacagcttttgaggaacttcgtgtgcaagctgagaattccagactggaaatgcattttaagttaaaggaagattatgaaaaaatccaacaccttgaacaagaatacaagaaggaaataaatgacaaggaaaagcaggtatcactactattgatccaaatcactgagaaagaaaataaaatgaaagatttaacatttctgctagaggaatccagagataaagttaatcaattagaggaaaagacaaaattacagagtgaaaacttaaaacaatcaattgagaaacagcatcatttgactaaagaactagaagatattaaagtgtcattacaaagaagtgtgagtactcaaaaggctttagaggaagatttacagatagcaacaaaaacaatttgtcagctaactgaagaaaaagaaactcaaatggaagaatctaataaagctagagctgctcattcgtttgtggttactgaatttgaaactactgtctgcagcttggaagaattattgagaacagaacagcaaagattggaaaaaaatgaagatcaattgaaaatacttaccatggagcttcaaaagaaatcaagtgagctggaagagatgactaagcttacaaataacaaagaagtagaacttgaagaattgaaaaaagtcttgggagaaaaggaaacacttttatatgaaaataaacaatttgagaagattgctgaagaattaaaaggaacagaacaagaactaattggtcttctccaagccagagagaaagaagtacatgatttggaaatacagttaactgccattaccacaagtgaacagtattattcaaaagaggttaaagatctaaaaactgagcttgaaaacgagaagcttaagaatactgaattaacttcacactgcaacaagctttcactagaaaacaaagagctcacacaggaaacaagtgatatgaccctagaactcaagaatcagcaagaagatattaataataacaaaaagcaagaagaaaggatgttgaaacaaatagaaaatcttcaagaaacagaaacccaattaagaaatgaactagaatatgtgagagaagagctaaaacagaaaagagatgaagttaaatgtaaattggacaagagtgaagaaaattgtaacaatttaaggaaacaagttgaaaataaaaacaagtatattgaagaacttcagcaggagaataaggccttgaaaaaaaaaggtacagcagaaagcaagcaactgaatgtttatgagataaaggtcaataaattagagttagaactagaaagtgccaaacagaaatttggagaaatcacagacacctatcagaaagaaattgaggacaaaaagatatcagaagaaaatcttttggaagaggttgagaaagcaaaagtaatagctgatgaagcagtaaaattacagaaagaaattgataagcgatgtcaacataaaatagctgaaatggtagcacttatggaaaaacataagcaccaatatgataagatcattgaagaaagagactcagaattaggactttataagagcaaagaacaagaacagtcatcactgagagcatctttggagattgaactatccaatctcaaagctgaacttttgtctgttaagaagcaacttgaaatagaaagagaagagaaggaaaaactcaaaagagaggcaaaagaaaacacagctactcttaaagaaaaaaaa

SEQ ID NO: 30598 - DNA, 2597 bp, Homo sapiens
  source 1..2597: mol_type = unassigned DNA
ttatttagccgttgaactgccagccgcccggggcccacgcgctccgggccgctcaggctgagcgatttcccgccttttctgaggttctgaggcgggagccattggttctttctgttgccctcatagaccgtatgtagcagttcgcgtgggcacagaacccacggtttcccgctagttcttcaaagatatttacaaccgtaacagagaaaatggaaaagcaaaagccctttgcattgttcgtaccaccgagatcaagcagcagtcaggtgtctgcggtgaaacctcagaccctgggaggcgattccactttcttcaagagtttcaacaaatgtactgaagatgattttgagtttccatttgcaaagactaatctctccaaaaatggggaaaacattgattcagatcctgctttacaaaaagttaatttcttgcccgtgcttgagcaggttggtaattctgactgtcactatcaggaaggactaaaagactctgatttggagaattcagagggattgagcagagtgtattcaaaactgtataaggaggctgaaaagataaaaaaatggaaagtaagtacagaagctgaactgagacagaaagaaagtaagttgcaagaaaacagaaagataattgaagcacagcgaaaagccattcaggaactgcaatttggaaatgaaaaagtaagtttgaaattagaagaaggaatacaagaaaataaagatttaataaaagagaataatgccacaaggcatttatgtaatctactcaaagaaacctgtgctagatctgcagaaaagacaaagaaatatgaatatgaacgggaagaaaccaggcaagtttatatggatctaaataataacattgagaaaatgataacagcttttgaggaacttcgtgtgcaagctgagaattccagactggaaatgcattttaagttaaaggaagattatgaaaaaatccaacaccttgaacaagaatacaagaaggaaataaatgacaaggaaaagcaggtatcactactattgatccaaatcactgagaaagaaaataaaatgaaagatttaacatttctgctagaggaatccagagataaagttaatcaattagaggaaaagacaaaattacagagtgaaaacttaaaacaatcaattgagaaacagcatcatttgactaaagaactagaagatattaaagtgtcattacaaagaagtgtgagtactcaaaaggctttagaggaagatttacagatagcaacaaaaacaatttgtcagctaactgaagaaaaagaaactcaaatggaagaatctaataaagctagagctgctcattcgtttgtggttactgaatttgaaactactgtctgcagcttggaagaattattgagaacagaacagcaaagattggaaaaaaatgaagatcaattgaaaatacttaccatggagcttcaaaagaaatcaagtgagctggaagagatgactaagcttacaaataacaaagaagtagaacttgaagaattgaaaaaagtcttgggagaaaaggaaacacttttatatgaaaataaacaatttgagaagattgctgaagaattaaaaggaacagaacaagaactaattggtcttctccaagccagagagaaagaagtacatgatttggaaatacagttaactgccattaccacaagtgaacagtattattcaaaagaggttaaagatctaaaaactgagcttgaaaacgagaagcttaagaatactgaattaacttcacactgcaacaagctttcactagaaaacaaagagctcacacaggaaacaagtgatatgaccctagaactcaagaatcagcaagaagatattaataataacaaaaagcaagaagaaaggatgttgaaacaaatagaaaatcttcaagaaacagaaacccaattaagaaatgaactagaatatgtgagagaagagctaaaacagaaaagagatgaagttaaatgtaaattggacaagagtgaagaaaattgtaacaatttaaggaaacaagttgaaaataaaaacaagtatattgaagaacttcagcaggagaataaggccttgaaaaaaaaaggtacagcagaaagcaagcaactgaatgtttatgagataaaggtcaataaattagagttagaactagaaagtgccaaacagaaatttggagaaatcacagacacctatcagaaagaaattgaggacaaaaagatatcagaagaaaatcttttggaagaggttgagaaagcaaaagtaatagctgatgaagcagtaaaattacagaaagaaattgataagcgatgtcaacataaaatagctgaaatggtagcacttatggaaaaacataagcaccaatatgataagatcattgaagaaagagactcagaattaggactttataagagcaaagaacaagaacagtcatcactgagagcatctttggagattgaactatccaatctcaaagctgaacttttgtctgttaagaagcaacttgaaatagaaagagaagagaaggaaaaactcaaaagagaggcaaaagaaaacacagctactcttaaagaaaaaaaagacaagaaatga

SEQ ID NO: 30599 - DNA, 5559 bp, Homo sapiens
  source 1..5559: mol_type = unassigned DNA
tgcggcggtccctgaggcgcagagttgcgacgctcggcggcatagggggcggctccaccgacactacgcggacgcctcctgccgcagatacacaatcatcatcttactagttctctgtgttgctcgctaaccagtcccccagttcagtagactggagcccagagcctgcttacttgtcaggtgtttattttgtcttgctttttttttttttttaaatgaagtcaaaatgccaataagaccagatctccagcagttggaaaaatgcattgatgatgctttaagaaaaaatgatttcaaacctttgaaaacacttttgcaaattgatatttgtgaagatgtgaagattaaatgcagcaaacagtttttccacaaggtggacaaccttatatgcagggaacttaataaagaggatatccacaatgtttcagccattttggtttctgttggaagatgtggcaaaaatatcagtgtattggggcaagctggacttctaacgatgataaaacaaggactaatacaaaagatggttgcctggtttgaaaaatccaaggacattattcagagtcaaggaaattcaaaagatgaagctgttctaaatatgatagaagacttagttgatcttctgctggtcatacatgatgtcagtgatgaaggtaaaaaacaagtagtggaaagtttcgtacctcgcatttgttccctggttattgactcaagagtgaatatttgtattcagcaagagattataaaaaaaatgaatgctatgcttgacaaaatgcctcaagatgcccggaaaatactctctaaccaagaaatgttaattctcatgagtagtatgggagaaaggattttagatgctggagattatgacttacaggtaggcattgtagaagctttgtgtagaatgaccacagaaaaacaaagacaagaactggcacatcagtggttttcaatggattttattgctaaggcatttaaaagaattaaggactctgaatttgaaacagattgcaggatatttctcaaccttgtaaatggcatgcttggagacaaaagaagggtctttacatttccttgtttatcagcatttcttgataaatatgagctgcaaataccatcagatgaaaaacttgaggaattttggattgattttaatcttgggagtcagactctctcattctacattgctggagataatgatgatcatcaatgggaagcagttactgtgccagaggaaaaagtacaaatatacagcattgaagtgagagaatcaaagaagctactgacaataattctgaaaaatacagtaaaaattagcaaaagagaagggaaagaattgcttttgtattttgacgcatcactagaaatcactaatgtaactcaaaaaatttttggtgcaactaaacatagggaatctatcagaaaacaaggtatttcagttgccaaaacgtcgctgcatatactttttgacgcaagtggatcacagattctagtgccagaaagtcaaatctcaccagtcggagaagagctcgttagtttaaaggaaaaatcaaagtccccaaaggaatttgctaaaccttcaaaatatatcaaaaacagtgacaaagggaatagaaataatagtcagcttgagaaaactactcctagcaaaagaaaaatgtctgaagcatcaatgattgtttctggtgcagatagatacactatgagaagtccagtgcttttcagcaacacatcaataccaccacgaagaagaagaattaaaccaccactgcaaatgacgagctctgcagagaaacctagtgtttctcaaacatcagaaaatagagtggataatgctgcatcactgaaatctagatcatcagaaggaagacatagaagagataatatagacaaacatatcaaaactgctaagtgtgtagaaaacacagaaaataagaatgttgaattcccaaaccaaaattttagtgaactccaggatgttataccagattcacaggcagcggaaaaaagagatcatactatattacctggtgttttagacaacatctgtggaaataaaatacacagcaaatgggcatgttggacacctgtaacaaacattgaactatgtaataaccaaagagcaagtacttcgtcaggagacacattgaatcaagatattgttataaataaaaaacttactaaacaaaaatcatcctcttcaatatctgatcataattctgaaggaacaggaaaagtgaaatataagaaagaacaaaccgaccatatcaaaatagataaagcagaagtagaagtttgcaagaaacacaatcagcaacaaaatcatcctaaatattcagggcagaaaaatactgaaaatgccaagcagagtgattggcctgttgaatctgaaactacttttaaatcggttctcctaaataagacaattgaagaatcgctgatatataggaagaaatacatattgtcaaaagatgtgaatactgctacttgcgataaaaatccatctgctagcaaaaatgtgcaaagtcatagaaaagcagagaaagaattgacttctgagcttaattcctgggattcgaaacaaaaaaaaatgagagaaaagtcaaaagggaaagaatttaccaatgtagcagaatccttgataagccaaatcaataaaagatacaaaacaaaagatgacatcaagtctacaagaaaattaaaggagtctttgattaacagtggtttttcaaacaaacctgttgtacaactcagtaaggaaaaagttcagaaaaaaagctacagaaaactgaagactacctttgttaatgttacttctgaatgcccagtgaatgatgtttacaattttaatttgaatggagctgatgaccctatcataaaacttggaatccaagagtttcaagctacagctaaagaagcttgtgcggataggtcaattagattggtaggtccaaggaatcatgatgaacttaaatcttctgtcaaaacaaaagataaaaaaattataacaaatcatcaaaagaaaaatctgtttagtgatactgaaacagagtacagatgtgatgacagcaagactgatattagctggctaagagaaccgaaatcaaaaccacagctaatagactatagcagaaataaaaatgtgaagaatcataaaagtggaaaatcaagatcatccttggaaaagggacagccaagctctaaaatgacacccagtaaaaatatcacaaaaaagatggacaagacaattccggaaggaagaatcagacttccacgaaaagcaaccaaaacaaaaaaaaactataaagatctctcaaattcagaatcagagtgtgaacaagaattttcacattcatttaaagagaacataccagtaaaggaggagaatatccattccagaatgaaaacggtaaagctaccaaagaaacaacagaaagtcttctgtgctgaaacagaaaaggaactatcaaaacaatggaaaaactcatctctactaaaagatgctatacgagataattgccttgacttatctcccagatctttatctggcagtccatcatctatagaagtaacgagatgtatagagaaaataacagaaaaggattttactcaggattatgactgcataacaaaatctatatcaccttatccaaaaacttcatcacttgaatccttaaatagtaacagtggagttggaggtacaataaagtcacccaaaaacaatgagaaaaacttcctgtgtgcaagtgaaagttgttcaccaattccacgaccactgtttttgcccagacatactccaactaagagtaatactattgtaaatagaaaaaaaataagttctctggtacttacacaagaaacacaaaacagtaacagctattcagatgtaagcagttatagttcagaagaacggtttatggaaattgaatctccacatatcaatgaaaattatatacaaagcaaaagagaggaaagtcatttagcatcttcattatccaagtctagtgaaggaagagagaaaacgtggtttgacatgccctgtgatgctactcatgtatcaggccccacccaacatcttagtcgcaaaagaatatatatagaagataatctaagtaattccaatgaagtagaaatggaagagaaaggagaaaggagagcaaacttgcttcccaaaaaactgtgtaaaattgaagatgcagatcatcatatccacaaaatgtctgaaagtgtatcttcattatcaacaaatgacttttctattccttgggagacctggcaaaatgaatttgcagggatagagatgacttatgagacttacgagaggctcaattcagaatttaagagaaggaataatatccgacataaaatgttgagttattttactacgcagtcttggaaaacagctcagcaacatctgagaacaatgaatcatcaaagtcaggactctaggattaaaaaacttgataaattccaattcattatcatagaggagctggagaattttgaaaaagattcacagtctttaaaagatttggaaaaggaatttgtggacttttgggaaaagatatttcagaagttcagtgcatatcaaaaaagcgaacaacagaggcttcatcttttgaaaacttcattggctaaaagtgtcttctgtaatactgatagtgaagaaactgtttttacatccgagatgtgtttgatgaaagaagatatgaaagtgctgcaagacaggcttcttaaggacatgctagaagaggagcttcttaatgtacgcagagaactgatgtcagtattcatgtctcatgaaagaaatgctaatgtgtgaaatctagtttttatcaccatactttatctaattattattctctgtatataactgaggaaataagaatagtcctacaaagagaaaaatatacatgtcaccgaagcaagtgtaccctttataggaaccctcaaattaaaaaaaaatgtcttttaatggatgagagggaaccactataacatgagtccaagcccagaagacttctgtctatacaatatttttttttaattttggagataaaagctttaagaaactttttgagttaattatactcataaaatgagtttctttaataaattaaattttattgtgtaaaatgtattattacataaaatgtgtttttgaatcaatgcagtttggggatgaatataattaaaatatgtttaataacttagaattcaactaataaaaatttagccacacttacaagggggaggaagtccctagtttaaaatgtataactgagtggtagatcagtactttcagcacactgttggaaacatttattcagatatggctctaatgtattaggaagcactaaatggcctaaaaaagctactacattgcctaaatatgttaattcaatatagaagtcctatttcataaccaggctgtttgacaaatacttttaatctagtagtcattgtaatatcttgctagattaatttataaaaatgagtatacatttgatttgcttttaatgaagttgaaataaatgcttatgtcacttgaataaatataaa

SEQ ID NO: 30600 - DNA, 5477 bp, Homo sapiens
  source 1..5477: mol_type = unassigned DNA
atacacaatcatcatcttactagttctctgtgttgctcgctaaccagtcccccagttcagtagactggagcccagagcctgcttacttgtcaggtgtttattttgtcttgctttttttttttttttaaatgaagtcaaaatgccaataagaccagatctccagcagttggaaaaatgcattgatgatgctttaagaaaaaatgatttcaaacctttgaaaacacttttgcaaattgatatttgtgaagatgtgaagattaaatgcagcaaacagtttttccacaaggtggacaaccttatatgcagggaacttaataaagaggatatccacaatgtttcagccattttggtttctgttggaagatgtggcaaaaatatcagtgtattggggcaagctggacttctaacgatgataaaacaaggactaatacaaaagatggttgcctggtttgaaaaatccaaggacattattcagagtcaaggaaattcaaaagatgaagctgttctaaatatgatagaagacttagttgatcttctgctggtcatacatgatgtcagtgatgaaggtaaaaaacaagtagtggaaagtttcgtacctcgcatttgttccctggttattgactcaagagtgaatatttgtattcagcaagagattataaaaaaaatgaatgctatgcttgacaaaatgcctcaagatgcccggaaaatactctctaaccaagaaatgttaattctcatgagtagtatgggagaaaggattttagatgctggagattatgacttacaggtaggcattgtagaagctttgtgtagaatgaccacagaaaaacaaagacaagaactggcacatcagtggttttcaatggattttattgctaaggcatttaaaagaattaaggactctgaatttgaaacagattgcaggatatttctcaaccttgtaaatggcatgcttggagacaaaagaagggtctttacatttccttgtttatcagcatttcttgataaatatgagctgcaaataccatcagatgaaaaacttgaggaattttggattgattttaatcttgggagtcagactctctcattctacattgctggagataatgatgatcatcaatgggaagcagttactgtgccagaggaaaaagtacaaatatacagcattgaagtgagagaatcaaagaagctactgacaataattctgaaaaatacagtaaaaattagcaaaagagaagggaaagaattgcttttgtattttgacgcatcactagaaatcactaatgtaactcaaaaaatttttggtgcaactaaacatagggaatctatcagaaaacaaggtatttcagttgccaaaacgtcgctgcatatactttttgacgcaagtggatcacagattctagtgccagaaagtcaaatctcaccagtcggagaagagctcgttagtttaaaggaaaaatcaaagtccccaaaggaatttgctaaaccttcaaaatatatcaaaaacagtgacaaagggaatagaaataatagtcagcttgagaaaactactcctagcaaaagaaaaatgtctgaagcatcaatgattgtttctggtgcagatagatacactatgagaagtccagtgcttttcagcaacacatcaataccaccacgaagaagaagaattaaaccaccactgcaaatgacgagctctgcagagaaacctagtgtttctcaaacatcagaaaatagagtggataatgctgcatcactgaaatctagatcatcagaaggaagacatagaagagataatatagacaaacatatcaaaactgctaagtgtgtagaaaacacagaaaataagaatgttgaattcccaaaccaaaattttagtgaactccaggatgttataccagattcacaggcagcggaaaaaagagatcatactatattacctggtgttttagacaacatctgtggaaataaaatacacagcaaatgggcatgttggacacctgtaacaaacattgaactatgtaataaccaaagagcaagtacttcgtcaggagacacattgaatcaagatattgttataaataaaaaacttactaaacaaaaatcatcctcttcaatatctgatcataattctgaaggaacaggaaaagtgaaatataagaaagaacaaaccgaccatatcaaaatagataaagcagaagtagaagtttgcaagaaacacaatcagcaacaaaatcatcctaaatattcagggcagaaaaatactgaaaatgccaagcagagtgattggcctgttgaatctgaaactacttttaaatcggttctcctaaataagacaattgaagaatcgctgatatataggaagaaatacatattgtcaaaagatgtgaatactgctacttgcgataaaaatccatctgctagcaaaaatgtgcaaagtcatagaaaagcagagaaagaattgacttctgagcttaattcctgggattcgaaacaaaaaaaaatgagagaaaagtcaaaagggaaagaatttaccaatgtagcagaatccttgataagccaaatcaataaaagatacaaaacaaaagatgacatcaagtctacaagaaaattaaaggagtctttgattaacagtggtttttcaaacaaacctgttgtacaactcagtaaggaaaaagttcagaaaaaaagctacagaaaactgaagactacctttgttaatgttacttctgaatgcccagtgaatgatgtttacaattttaatttgaatggagctgatgaccctatcataaaacttggaatccaagagtttcaagctacagctaaagaagcttgtgcggataggtcaattagattggtaggtccaaggaatcatgatgaacttaaatcttctgtcaaaacaaaagataaaaaaattataacaaatcatcaaaagaaaaatctgtttagtgatactgaaacagagtacagatgtgatgacagcaagactgatattagctggctaagagaaccgaaatcaaaaccacagctaatagactatagcagaaataaaaatgtgaagaatcataaaagtggaaaatcaagatcatccttggaaaagggacagccaagctctaaaatgacacccagtaaaaatatcacaaaaaagatggacaagacaattccggaaggaagaatcagacttccacgaaaagcaaccaaaacaaaaaaaaactataaagatctctcaaattcagaatcagagtgtgaacaagaattttcacattcatttaaagagaacataccagtaaaggaggagaatatccattccagaatgaaaacggtaaagctaccaaagaaacaacagaaagtcttctgtgctgaaacagaaaaggaactatcaaaacaatggaaaaactcatctctactaaaagatgctatacgagataattgccttgacttatctcccagatctttatctggcagtccatcatctatagaagtaacgagatgtatagagaaaataacagaaaaggattttactcaggattatgactgcataacaaaatctatatcaccttatccaaaaacttcatcacttgaatccttaaatagtaacagtggagttggaggtacaataaagtcacccaaaaacaatgagaaaaacttcctgtgtgcaagtgaaagttgttcaccaattccacgaccactgtttttgcccagacatactccaactaagagtaatactattgtaaatagaaaaaaaataagttctctggtacttacacaagaaacacaaaacagtaacagctattcagatgtaagcagttatagttcagaagaacggtttatggaaattgaatctccacatatcaatgaaaattatatacaaagcaaaagagaggaaagtcatttagcatcttcattatccaagtctagtgaaggaagagagaaaacgtggtttgacatgccctgtgatgctactcatgtatcaggccccacccaacatcttagtcgcaaaagaatatatatagaagataatctaagtaattccaatgaagtagaaatggaagagaaaggagaaaggagagcaaacttgcttcccaaaaaactgtgtaaaattgaagatgcagatcatcatatccacaaaatgtctgaaagtgtatcttcattatcaacaaatgacttttctattccttgggagacctggcaaaatgaatttgcagggatagagatgacttatgagacttacgagaggctcaattcagaatttaagagaaggaataatatccgacataaaatgttgagttattttactacgcagtcttggaaaacagctcagcaacatctgagaacaatgaatcatcaaagtcaggactctaggattaaaaaacttgataaattccaattcattatcatagaggagctggagaattttgaaaaagattcacagtctttaaaagatttggaaaaggaatttgtggacttttgggaaaagatatttcagaagttcagtgcatatcaaaaaagcgaacaacagaggcttcatcttttgaaaacttcattggctaaaagtgtcttctgtaatactgatagtgaagaaactgtttttacatccgagatgtgtttgatgaaagaagatatgaaagtgctgcaagacaggcttcttaaggacatgctagaagaggagcttcttaatgtacgcagagaactgatgtcagtattcatgtctcatgaaagaaatgctaatgtgtgaaatctagtttttatcaccatactttatctaattattattctctgtatataactgaggaaataagaatagtcctacaaagagaaaaatatacatgtcaccgaagcaagtgtaccctttataggaaccctcaaattaaaaaaaaatgtcttttaatggatgagagggaaccactataacatgagtccaagcccagaagacttctgtctatacaatatttttttttaattttggagataaaagctttaagaaactttttgagttaattatactcataaaatgagtttctttaataaattaaattttattgtgtaaaatgtattattacataaaatgtgtttttgaatcaatgcagtttggggatgaatataattaaaatatgtttaataacttagaattcaactaataaaaatttagccacacttacaagggggaggaagtccctagtttaaaatgtataactgagtggtagatcagtactttcagcacactgttggaaacatttattcagatatggctctaatgtattaggaagcactaaatggcctaaaaaagctactacattgcctaaatatgttaattcaatatagaagtcctatttcataaccaggctgtttgacaaatacttttaatctagtagtcattgtaatatcttgctagattaatttataaaaatgagtatacatttgatttgcttttaatgaagttgaaataaatgcttatgtcacttgaataaatataaatcatt

SEQ ID NO: 30601 - DNA, 3341 bp, Homo sapiens
  source 1..3341: mol_type = unassigned DNA
tgcagagttcgcggcgagggtggctcgcgcaggcgcgaggctccccatcagcacctgcctggccagcctcggcctcggggatgggaaatgggcgctcggagccgcccccgcgcgtgggcgactcggtcaagatacacaatcatcatcttactagttctctgtgttgctcgctaaccagtcccccagttcagtagactggagcccagagcctgcttacttgtcaggtgtttattttgtcttgctttttttttttttttaaatgaagtcaaaatgccaataagaccagatctccagcagttggaaaaatgcattgatgatgctttaagaaaaaatgatttcaaacctttgaaaacacttttgcaaattgatatttgtgaagatgtgaagattaaatgcagcaaacagtttttccacaaggtggacaaccttatatgcagggaacttaataaagaggatatccacaatgtttcagccattttggtttctgttggaagatgtggcaaaaatatcagtgtattggggcaagctggacttctaacgatgataaaacaaggactaatacaaaagatggttgcctggtttgaaaaatccaaggacattattcagagtcaaggaaattcaaaagatgaagctgttctaaatatgatagaagacttagttgatcttctgctggtcatacatgatgtcagtgatgaaggtaaaaaacaagtagtggaaagtttcgtacctcgcatttgttccctggttattgactcaagagtgaatatttgtattcagcaagagattataaaaaaaatgaatgctatgcttgacaaaatgcctcaagatgcccggaaaatactctctaaccaagaaatgttaattctcatgagtagtatgggagaaaggattttagatgctggagattatgacttacaggtaggcattgtagaagctttgtgtagaatgaccacagaaaaacaaagacaagaactggcacatcagtggttttcaatggattttattgctaaggcatttaaaagaattaaggactctgaatttgaaacagattgcaggatatttctcaaccttgtaaatggcatgcttggagacaaaagaagggtctttacatttccttgtttatcagcatttcttgataaatatgagctgcaaataccatcagatgaaaaacttgaggaattttggattgattttaatcttgggagtcagactctctcattctacattgctggagataatgatgatcatcaatgggaagcagttactgtgccagaggaaaaagtacaaatatacagcattgaagtgagagaatcaaagaagctactgacaataattctgaaaaatacagtaaaaattagcaaaagagaagggaaagaattgcttttgtattttgacgcatcactagaaatcactaatgtaactcaaaaaatttttggtgcaactaaacatagggaatctatcagaaaacaaggtatttcagttgccaaaacgtcgctgcatatactttttgacgcaagtggatcacagattctagtgccagaaagtcaaatctcaccagtcggagaagagctcgttagtttaaaggaaaaatcaaagtccccaaaggaatttgctaaaccttcaaaatatatcaaaaacagtgacaaagggaatagaaataatagtcagcttgagaaaactactcctagcaaaagaaaaatgtctgaagcatcaatgattgtttctggtgcagatagatacactatgagaagtccagtgcttttcagcaacacatcaataccaccacgaagaagaagaattaaaccaccactgcaaatgacgagctctgcagagaaacctagtgtttctcaaacatcagaaaatagagtggataatgctgcatcactgaaatctagatcatcagaaggaagacatagaagagataatatagacaaacatatcaaaactgctaagtgtgtagaaaacacagaaaataagaatgttgaattcccaaaccaaaattttagtgaactccaggatgttataccagattcacaggcagcggaaaaaagagatcatactatattacctggtgttttagacaacatctgtggaaataaaatacacagcaaatgggcatgttggacacctgtaacaaacattgaactatgtaataaccaaagagcaagtacttcgtcaggagacacattgaatcaagatattgttataaataaaaaacttactaaacaaaaatcatcctcttcaatatctgatcataattctgaaggaacaggaaaagtgaaatataagaaagaacaaaccgaccatatcaaaatagataaagcagaagtagaagtttgcaagaaacacaatcagcaacaaaatcatcctaaatattcagggcagaaaaatactgaaaatgccaagcagagtgattggcctgttgaatctgaaactacttttaaatcggttctcctaaataagacaattgaagaatcgctgatatataggaagaaatacatattgtcaaaagatgtgaatactgctacttgcgataaaaatccatctgctagcaaaaatgtgcaaagtcatagaaaagcagagaaagaattgacttctgagcttaattcctgggattcgaaacaaaaaaaaatgagagaaaagtcaaaagggaaagaatttaccaatgtagcagaatccttgataagccaaatcaataaaagatacaaaacaaaagatgacatcaagtctacaagaaaattaaaggagtctttgattaacagtggtttttcaaacaaacctgttgtacaactcagtaaggaaaaagttcagaaaaaaagctacagaaaactgaagactacctttgttaatgttacttctgaatgcccagtgaatgatgtttacaattttaatttgaatggagctgatgaccctatcataaaacttggaatccaagagtttcaagctacagctaaagaagcttgtgcggataggtcaattagattggtaggtccaaggaatcatgatgaacttaaatcttctgtcaaaacaaaagataaaaaaattataacaaatcatcaaaagaaaaatctgtttagtgatactgaaacagagtacagatgtgatgacagcaagactgatattagctggctaagagaaccgaaatcaaaaccacagctaatagactatagcagaaataaaaatgtgaagaatcataaaagtggaaaatcaagatcatccttggaaaagggacagccaagctctaaaatgacacccagtaaaaatatcacaaaaaagatggacaagacaattccggaaggaagaatcagacttccacgaaaagcaaccaaaacaaaaaaaaa

SEQ ID NO: 30602 - DNA, 1068 bp, Homo sapiens
  source 1..1068: mol_type = unassigned DNA
cgcgcttgtggaggagttgtggaggacgcctgtcgacgaccagtaactggtcctcggccattgcggaagcatctaaatatggtgtcctccggaaaaaagtattccaggaaatctgggaagccgtctgtggaagatcagtttacgagagcctatgactttgagactgaagataagaaagatctgagtggatcagaggaagatgttattgaagggaagactgcagtcattgagaaacgtaggaagaaaaggtcttctgcaggagtagttgaagatatggggggtgaagtgcagaatatgctggaaggagttggagttgacattaacaaggctcttcttgccaagagaaagagactagaaatgtataccaaggcttctctcaaaactagtaaccagaaaattgaacatgtttggaaaacacaacaagatcaaaggcagaagcttaaccaagaatattctcagcagtttctgactttgtttcagcagtgggatttagatatgcagaaagctgaggaacaagaagaaaaaatacttaatatgtttcgacagcaacaaaagattcttcaacaatctagaattgttcagagccagagattgaaaacaattaaacagttatatgagcagttcataaagagtatggaagagttggagaagaatcatgataatctacttactggtgcacaaaatgaatttaaaaaagaaatggctatgttgcaaaaaaaaattatgatggaaactcagcagcaagagatagcaagtgttcggaagtctcttcaatccatgttattctgatgactctttgaagaaagaacttgaacctaagtaatatgatacaattataacgttagctaagaagcatattgtaagtctttagaatagtttaattgtaacatctttaatcataaacctgtttcattgtaagacctccctttctgttaagtcaaatctaaatagttatgagttagttagcaactattcctaaagaatatgtattaagctttcagctctttagtaatgatagtgaatttttctctctaacactgtcaattaaataaagacgatttaatttta

SEQ ID NO: 30603 - DNA, 845 bp, Homo sapiens
  source 1..845: mol_type = unassigned DNA
gagttgtggaggacgcctgtcgacgaccagtaactggtcctcggccattgcggtgtgtttcagtcaggaagcatctaaatatggtgtcctccggaaaaaagtattccaggaaatctgggaagccgtctgtggaagatcagtttacgagagcctatgactttgagactgaagataagaaagatctgagtggatcagaggaagatgttattgaagggaagactgcagtcattgagaaacgtaggaagaaaaggtcttctgcaggagtagttgaagatatggggggtgaagtgcagaatatgctggaaggagttggagttgacattaacaaggctcttcttgccaagagaaagagactagaaatgtataccaaggcttctctcaaaactagtaaccagaaaattgaacatgtttggaaaacacaacaagatcaaaggcagaagcttaaccaagaatattctcagcagtttctgactttgtttcagcagtgggatttagatatgcagaaagctgaggaacaagaagaaaaaatacttaatatgtttcgacagcaacaaaagattcttcaacaatctagaattgttcagagccagagattgaaaacaattaaacagttatatgagcagttcataaagagtatggaagagttggagaagaatcatgataatctacttactggtgcacaaaatgaatttaaaaaagaaatggctatgttgcaaaaaaaaattatgatggaaactcagcagcaagagatagcaagtgttcggaagtctcttcaatccatgttattctgatgactctttgaagaaagaacttgaacctaagtaatatgatacaattataacgtt

SEQ ID NO: 30604 - DNA, 1120 bp, Homo sapiens
  source 1..1120: mol_type = unassigned DNA
ttgcctcagaagcgtcgcggagaaggggccacctcaggtgaagcgcgcttgtggaggagttgtggaggacgcctgtcgacgaccagtaactggtcctcggccattgcggtgtgtttcaggaagcatctaaatatggtgtcctccggaaaaaagtattccaggaaatctgggaagccgtctgtggaagatcagtttacgagagcctatgactttgagactgaagataagaaagatctgagtggatcagaggaagatgttattgaagggaagactgcagtcattgagaaacgtaggaagaaaaggtcttctgcaggagtagttgaagatatggggggtgaagtgcagaatatgctggaaggagttggagttgacattaacaaggctcttcttgccaagagaaagagactagaaatgtataccaaggcttctctcaaaactagtaaccagaaaattgaacatgtttggaaaacacaacaagatcaaaggcagaagcttaaccaagaatattctcagcagtttctgactttgtttcagcagtgggatttagatatgcagaaagctgaggaacaagaagaaaaaatacttaatatgtttcgacagcaacaaaagattcttcaacaatctagaattgttcagagccagagattgaaaacaattaaacagttatatgagcagttcataaagagtatggaagagttggagaagaatcatgataatctacttactggtgcacaaaatgaatttaaaaaagaaatggctatgttgcaaaaaaaaattatgatggaaactcagcagcaagagatagcaagtgttcggaagtctcttcaatccatgttattctgatgactctttgaagaaagaacttgaacctaagtaatatgatacaattataacgttagctaagaagcatattgtaagtctttagaatagtttaattgtaacatctttaatcataaacctgtttcattgtaagacctccctttctgttaagtcaaatctaaatagttatgagttagttagcaactattcctaaagaatatgtattaagctttcagctctttagtaatgatagtgaatttttctctctaacactgtcaattaaataaagacgatttaattt

SEQ ID NO: 30605 - DNA, 2486 bp, Homo sapiens
  source 1..2486: mol_type = unassigned DNA
aacgagcgcgcgccgcccccgccgcgccccgcgccgcccttgctagccgagcctcccgccccctgcattgctgatgctgctgctggcggacatggacgtggtgaatcagctggtggctgggggtcagttccgggtggtcaaggagcccctcggctttgtgaaggtgctgcaatgggtcttcgccatcttcgcctttgccacatgcggcagctacagtggggagctccagctgagcgtggattgtgccaacaagaccgagagtgacctcagcatcgaggtcgagttcgagtaccccttcaggctgcaccaagtgtactttgatgcacccacctgccgagggggcaccaccaaggtcttcttagttggggactactcctcgtcagccgaattctttgtcaccgtggccgtgtttgccttcctctactccatgggggctctggccacctacatcttcctgcagaacaagtaccgagagaataacaaagggcccatgctggactttctggccacggctgtgttcgccttcatgtggctagttagctcatcggcatgggccaaggggctgtcagatgtgaagatggccacagacccagagaacattatcaaggagatgcctgtctgccgccagacagggaacacatgcaaggagctgagagaccctgtgacctcgggactcaacacctcggtggtgttcggcttcctgaacctggtgctctgggtcggcaacctgtggttcgtgtttaaggagacaggctgggccgccccgttcctgcgcgcgcctcccggcgcccccgagaaacaaccggcacccggggacgcctacggcgatgcaggctacgggcagggccccggcgggtacgggccccaggattcctacgggcctcagggcggctaccagcctgactatggtcaaccagccggcagcggtggcagtggctacgggcctcagggcgactatgggcagcaaggctacggcccgcagggtgcacccacctccttctccaatcagatgtagtctggtcagtgaagcccaggaggacctggggggggcaagagctcaggagaaggcctgccccccttcccacccctataccctaggtctccacccctcaagccaggagaccctgtctttgctgtttatatatatatatattatatataaatatctatttatctgtctgagccctgccctcactccactcccctcatccactaggtgcccagtcttgagtgggccccctctcttaccccgtccctttccctgcatcccttggcccctctctgtttaccctccctgtcccctgaggttaaggggatctaaaaggaggacagggagggaacagacctcggctgtgtggggagggtgggcgtgacttcagactctctcctctctctccctccactcctcccaactctggccttggttcctccagcaatgcctgcctgaacaaaggccgttagggaaatccaactccagggttaaagaaaggcagagattgggggggcttggggtagagaggacagtttaggacccaaggtggtcttggagaggaggtgtggagtggaggggtcagcaggggggttgggttccagacagagtggatctggagtctgaaggagaggagtgcgctagagcattctggggtggggcttggaagggcgctgagggcagggttctagaaggggcgaggctttaagcgaggcagaatggtgggctccagagtaggtgggtcttggattggtaccagagcctatggaaagggtgtggcttggaacatttgggagactgagcttgattctaaaggggacagatcttgagcaaggcaagaagtgggattcaggaatgggccaagccagggttccagacagggtggggcttagaatggggcttccatggtggtttcagaaagggcagcccctccccatggtgcagtgaagaaaatgttttacaatggctgggtttgggcagtggagaggggacttggataggagcttccagatgggttttgttaggggtgggggagaatggctctggctacgacttgggacggaagtggcctgagaagagtcgagtgatatggcttgtagggtgaggcgtgggatccagagagaagcaccccaccacacacacccttccccactcccgtgatgaaacagctaggttaataggaggacagaaccaacgggtctgtgggactggcccacccctcttcccccttcccctgcgccctccctccctccacacctccacccgtcctggggtggttggaggcctggtctggagcccctatcctgcaccctctgctatgtctgtgatgtcagtagtgcctgtgatcgtgtgttgccattttgtctggctgtggcccctccttctcccctccagacccctaccctttcccaaacccttcggtattgttcaaagaacccccctccccaaggaagaacaaatatgattctcctctcccaaataaactccttaaccacct

SEQ ID NO: 30606 - DNA, 1850 bp, Homo sapiens
  source 1..1850: mol_type = unassigned DNA
ccctgcattgctgatgctgctgctggcggacatggacgtggtgaatcagctggtggctgggggtcagttccgggtggtcaaggagcccctcggctttgtgaaggtgctgcaatgggtcttcgccatcttcgcctttgccacatgcggcagctacagtggggagctccagctgagcgtggattgtgccaacaagaccgagagtgacctcagcatcgaggtcgagttcgagtaccccttcaggctgcaccaagtgtactttgatgcacccacctgccgagggggcaccaccaaggtcttcttagttggggactactcctcgtcagccgaattctttgtcaccgtggccgtgtttgccttcctctactccatgggggctctggccacctacatcttcctgcagaacaagtaccgagagaataacaaagggcccatgctggactttctggccacggctgtgttcgccttcatgtggctagttagctcatcggcatgggccaaggggctgtcagatgtgaagatggccacagacccagagaacattatcaaggagatgcctgtctgccgccagacagggaacacatgcaaggagctgagagaccctgtgacctcgggactcaacacctcggtggtgttcggcttcctgaacctggtgctctgggtcggcaacctgtggttcgtgtttaaggagacaggctgggccgccccgttcctgcgcgcgcctcccggcgcccccgagaaacaaccggcacccggggacgcctacggcgatgcaggctacgggcagggccccggcgggtacgggccccaggattcctacgggcctcagggcggctaccagcctgactatggtcaaccagccggcagcggtggcagtggctacgggcctcagggcgactatgggcagcaaggctacggcccgcagggtgcacccacctccttctccaatcagatgtagtctggtgagtgaccggcgagcggtgcggccaaggagggtacaaggaaggagacgagcgggtcagtgaaccaataagagtcaggggtagagagtacgtaaggcgtttactggggcaagtaaggactgaagtttgaaggagccaatcaagaggcagaactacctgctaagagctgaaaaactagctaatgaatggagaaaagaagaatggtgcttcaagatggacagaatgaagagccaatgggagggaggtagaagggcaactcggcggaaaggcagggggagagaagcagagcaaccaataaagggagggaatatcgggggacttgcgcagtggcgaatcagcggagcgcaagagccacggaagcgacgaggaggtgggtcttagaagtgactgataagccaataggtgataaggccaatagatggtgagggtaaatgggcgtggatcttgaaggtcagacgagctcaccaatccgggaggaggggatagatctgccgcctctccccaacgctggaggggagggaagtagtgtggaatttcaaaggaggaagagggatagggtggggttctggaaaggtttgccggccttcttgctgggccttaaaagagaagtgagggtcggggcttggtggctcatgcctgtaatctcagcactttgggagaccgaggcgggcgggccgcttgagcccaagagttcgagaccagcctgggcaacatgatgaaatcccacctctacaaaaaatacaaaaattagccgggcgtggtggcatgcatctgtggacccatctactcaggaggctgaagtgggaggatcacttaagcccaggaggttgaggctgccgtgagctatgatcctgccactgcactccagcctgggcaacagagcgagacctt

SEQ ID NO: 30607 - DNA, 870 bp, Homo sapiens
  source 1..870: mol_type = unassigned DNA
attgctgatgctgctgctggcggacatggacgtggtgaatcagctggtggctgggggtcagttccgggtggtcaaggagcccctcggctttgtgaaggtgctgcaatgggctgcaccaagtgtactttgatgcacccacctgccgagggggcaccaccaaggtcttcttagttggggactactcctcgtcagccgaattctttgtcaccgtggccgtgtttgccttcctctactccatgggggctctggccacctacatcttcctgcagaacaagtaccgagagaataacaaagggcccatgctggactttctggccacggctgtgttcgccttcatgtggctagttagctcatcggcatgggccaaggggctgtcagatgtgaagatggccacagacccagagaacattatcaaggagatgcctgtctgccgccagacagggaacacatgcaaggagctgagagaccctgtgacctcgggactcaacacctcggtggtgttcggcttcctgaacctggtgctctgggtcggcaacctgtggttcgtgtttaaggagacaggctgggccgccccgttcctgcgcgcgcctcccggcgcccccgagaaacaaccggcacccggggacgcctacggcgatgcaggctacgggcagggccccggcgggtacgggccccaggattcctacgggcctcagggcggctaccagcctgactatggtcaaccagccggcagcggtggcagtggctacgggcctcagggcgactatgggcagcaaggctacggcccgcagggtgcacccacctccttctccaatcagatgtagtctggtcagtgaagcccaggaggacctggggggggcaagagctcag

SEQ ID NO: 30608 - DNA, 5374 bp, Homo sapiens
  source 1..5374: mol_type = unassigned DNA
ctgataaagagctgggctgagtcatctgtggaggagaaaagtcacatccagctccttcatgttgctgccgatgtgggattttcctggcttcgtcagccaagcaattggctgcctttgccggaggctttgagaaccaaggcttgaaggccggcaggagcatccagggggaagcttggcttcagggaggacctagcagacgttgggccggagcactagcctcacggagaaggatctgaaagaagccaaggcgcggagccagcagattgcagcccagctgaccacccctcccagctccaattcccgtggcgtccagctcttcaacaggcgccggcagagggtgaacgagttcaccttggagagccacggccagaggggacagaagcccagccaggagtccctcagagtgctcccttcaagcctcccaggccatgcaccggggctcagcctgagttccacctcgctgccggagccaggccctccacggcaccccagtccccagagccccgacagaggggtccctggccacagcatggaggggtactcagaggaggctagcttgctgcggcacctggagaaggtggccagtgaggaggaagaggtaccactggtggtttatctaaaggagaatgcagcactgctgacagccaatgggctgcacctgtcccaaaaccgagaggcccagcagtcctcaccggccccacctccagctgaggtccacagcccagctgcagatgtcaaccaaaaccttgcctcgcccagtgccacgctcaccacaccaacttctaacagcagccacaatccgccagccaccgatgtcaatcagaacccaccggcaactgttgtcccacagagcctgccactttctagcatccaacagaattcctcagaggcccaactcccatctaatggcacagggcctgcttccaaacccagcaccctgtgtgctgatgggcaaccccaggcaccggctgaggaggtgagatgcagcacactcctaattgacaaggtatcaactccagctaccaccaccagcaccttctccagagaagctacgctcatccccagctccaggcccccagcctcagatttcatgtccagctccctgctcattgacatccagcccaacaccctagtggtgtcagcagatcaagagatgtctgggcgagcagctgccaccacgcccaccaaggtctacagtgaggtccacttcacactggccaagcccccatcagtggtcaacaggacggccaggccttttgggatccaggcgccagggggcaccagccagatggagaggagccccatgctagagagacgacattttggggagaaggccccggctccccagccccccagtttgccagacaggagcccccggccacagagacacataatgtcccgcagccccatggtggaaaggaggatgatggggcagcgaagcccggcctcagagagacgccccttggggaacttcactgcaccccccacctacactgagaccttgtccacagcccctctggcttcctgggtgaggtctcctccctcatattctgtcctgtatcccagctccgaccccaagtcttctcatctgaagggccaggcggttcctgccagcaagacgggcattctggaggagtcgatggcccgccggggcagccgcaaatccatgtttactttcgtggagaagcccaaggtgaccccgaatccagacttgctggatctggtacagacagcggatgagaagcggcggcagagggaccagggggaggtaggcgtggaggaggagcccttcgcactgggggccgaggcctccaacttccagcaggagccagcacctcgtgacagggccagccccgcggcggcggaggaggtggtaccagagtgggcctcctgcctcaagtcaccccgcatccaggccaagccgaagcccaaacccaaccagaacctctccgaggcctctgggaagggagctgagctctacgcccgccgccagtcacggatggagaaatatgtcatcgagtcttcaagccacacgccagagctggcccgctgcccatcacctaccatgtccctgccttcctcctggaaataccccactaacgcccccggggccttccgagtggcatcccgaagcccagcccggaccccgcctgcctccctctaccatggctacctgcctgagaacggggtcctgcgcccagagcccaccaagcagccgccataccagctgcgcccctcgctctttgtcctctcacctatcaaggagcctgccaaggtctcaccaagagctgcctcgcccgccaagcccagctccttggacctggtgcccaacctgcccaagggggctctccctccatctcctgccctgcctcggccctcgcgctcctcaccgggcctctacacctcccccggccaggacagcctgcagcccactgccgtgagccctccttacggcggtgacatctcccccgtgtctccctccagggcgtggtctccccgagccaagcaggcccccaggccctccttctctacccggaacgccgggatcgaggctcaggaccgccgggagagcctgcccacctccccaccctggacgccgggcgcgtcccggccccccagcagcctagacggctgggtgagcccgggcccgtgggagccaggtcgcgggagcagcatgagcagccccccgccgctgccgccgccaccgcccatgtctccctcgtggagcgagcgctcggtgtccccgctgcgacctgagaccgaggcgcggccccccagccgccagctgcaggcgcttctggcgcgaaacatcatcaatgcggcccggcgcaagagcgcctccccgcggtcggcgggcgccgagaacccgcggcccttctccccgccgagggcgccaccgcccccgcccccgcccccgcccccgcccccgcgcatgcgctcgccacagcccgcccgccccggctcggctgctgtgccgggggcagccttcgcgcccatcccgcggagcccgttgcccgccggtccttcgtcctgcaccagtccccggagcccgctgcccgcgcctcccaggcccttcctctaccgccgctcgcccacggactccgacgtgtccctcgactccgaggactccggggctaagtctccaggcatcctgggctacaatatctgtccccgcgggtggaatggcagccttcggctcaagcgtggcagcctccccgccgaggcctcctgcaccacctagagccccacccccgaccccaccccgggagggcagagccagaagaaggctcattagacctgggggacccaaagggtctggcctctttgggcagccccagagatgaggggtcagcagaggagagctctggggttggggatgggttagggacgcaagcttgagttctagcccttgctctcattcagctgttgtgtgaccctgggtaagacccttccttgtttgaccctcagctttcccatctgtttaatggtggctttggccaaggcaatccacaaacgtcaaaattccccttcccatcagtacacacaccgatgcacacacactctctctttctctctctctctctctcacacacacacacacacacacacacacacacacacacacacacactagttagtgccttggatgaggcggggcagtgtgtatatggacccctggacttgctaccttcagggttccatactcgtccctcccctcctggctctgctgtctggagtctggcaagcggggtgtgttcagaaggtcctaggcctgtgtcgcatgtccaggcactggcctgaccatccggctccctggcaccaagtcccaggcaggagcagctgttttccatcccttcccagacaagctctatttttatcacaatgacctttagagaggtctcccaggccagctcaaggtgtcccactatcccctctggagggaagaggcaggaaaattctccccgggtccctgtcatgctactttctccatcccagttcagactgtccaggacatcttatctgcagccataagagaattataaggcagtgatttcccttaggcccaggacttgggcctccagctcatctgttccttctgggcccattcatggcaggttctgggctcaaagctgaactggggagagaagagatacagagctaccatgtgactttacctgattgccctcagtttggggttgcttattgggaaagagagagacaaagagttacttgttacgggaaatatgaaaagcatggccaggatgcatagaggagattctagcaggggacaggattggctcagatgacccctgagggctcttccagtcttgaaatgcattccatgatattaggaagtcgggggtgggtggtggtggtgggctagttgggcttgaatttaggggccgatgagcttgggtacgtgagcagggtgttaagttagggtctgcctgtatttctggtccccttggaaatgtccccttcttcagtgtcagacctcagtcccagtgtccatatcgtgcccagaaaagtagacattatcctgccccatcccttccccagtgcactctgacctagctagtgcctggtgcccagtgacctgggggagcctggctgcaggccctcactggttccctaaaccttggtggctgtgattcaggtccccaggggggactcagggaggaatatggctgagttctgtagtttccagagttggctggtagagccttctagaggttcagaatattagcttcaggatcagctgggggtatggaattggctgaggatcaaacgtatgtaggtgaaaggataccaggatgttgctaaaggtgagggacagtttgggtttgggacttaccggggtgatgttagatctggaacccccaagtgaggctggagggagttaaggtcagtatggaagatagggttgggacagggtgctttggaatgaaagagtgaccttagagggctccttgggcctcaggaatgctcctgctgctgtgaagatgagaaggtgctcttactcagttaatgatgagtgactatatttaccaaagcccctacctgctgctgggtcccttgtagcacaggagactggggctaagggcccctcccagggaagggacaccatcaggcctctggctgaggcagtagcatagaggatccatttctacctgcatttcccagaggactagcaggaggcagccttgagaaaccggcagttcccaagccagcgcctggctgttctctcattgtcactgccctctccccaacctctcctctaacccactagagattgcctgtgtcctgcctcttgcctcttgtagaatgcagctctggccctcaataaatgcttcctgcattcttctgcctcctg

SEQ ID NO: 30609 - DNA, 7063 bp, Homo sapiens
  source 1..7063: mol_type = unassigned DNA
agagcgcgagtgaggagcaggcgggcaggcggcgggcagccgggcagccgtggacagaggcccgggcacagccagttgctgtgccagagggtgtggtgtccggctacagattgccccaaagcggcctcacaccagagacgggttaagaagagggattggaggtccaccactccactagcccaggaaggacttatctttcgtctcagccagacctcaccccaattctgtgaatcagcggaggaaggcaaaagtgcagagagtcagaggaggctgtgtaaggagcagagaccagggctcacacagctggccccagcccaggccctggcccaggcccaggagcctgcttccctgcatcgctgaggaagaacagcaccatgctgggtcctcacctcccacctccgccccttgcacccagcgaagggaggcctaccccctgcgccttccagatccctgatggaagctacaggtgtctggctctggaagccgaggagagcagcggtgaggagggcctgcagggagaggtggggcctaccgacctggaagaggatgagggggtcagcaggagtggggacgactctgcctgcagagtcacccaggggacaccgcagctgcccaaagccctgggcatccaaccacccagctgctccagagaggaacaaggggcgtcccagcacgacgacagggccagccaggactgggatgtagtgaaggccgggcagatgatgacagccagccccagccctggccctgggcccagagtggcccagaaaccagcgttgggccggagcactagcctcacggagaaggatctgaaagaagccaaggcgcggagccagcagattgcagcccagctgaccacccctcccagctccaattcccgtggcgtccagctcttcaacaggcgccggcagagggtgaacgagttcaccttggagagccacggccagaggggacagaagcccagccaggagtccctcagagtgctcccttcaagcctcccaggccatgcaccggggctcagcctgagttccacctcgctgccggagccaggccctccacggcaccccagtccccagagccccgacagaggggtccctggccacagcatggaggggtactcagaggaggctagcttgctgcggcacctggagaaggtggccagtgaggaggaagaggtaccactggtggtttatctaaaggagaatgcagcactgctgacagccaatgggctgcacctgtcccaaaaccgagaggcccagcagtcctcaccggccccacctccagctgaggtccacagcccagctgcagatgtcaaccaaaaccttgcctcgcccagtgccacgctcaccacaccaacttctaacagcagccacaatccgccagccaccgatgtcaatcagaacccaccggcaactgttgtcccacagagcctgccactttctagcatccaacagaattcctcagaggcccaactcccatctaatggcacagggcctgcttccaaacccagcaccctgtgtgctgatgggcaaccccaggcaccggctgaggaggtgagatgcagcacactcctaattgacaaggtatcaactccagctaccaccaccagcaccttctccagagaagctacgctcatccccagctccaggcccccagcctcagatttcatgtccagctccctgctcattgacatccagcccaacaccctagtggtgtcagcagatcaagagatgtctgggcgagcagctgccaccacgcccaccaaggtctacagtgaggtccacttcacactggccaagcccccatcagtggtcaacaggacggccaggccttttgggatccaggcgccagggggcaccagccagatggagaggagccccatgctagagagacgacattttggggagaaggccccggctccccagccccccagtttgccagacaggagcccccggccacagagacacataatgtcccgcagccccatggtggaaaggaggatgatggggcagcgaagcccggcctcagagagacgccccttggggaacttcactgcaccccccacctacactgagaccttgtccacagcccctctggcttcctgggtgaggtctcctccctcatattctgtcctgtatcccagctccgaccccaagtcttctcatctgaagggccaggcggttcctgccagcaagacgggcattctggaggagtcgatggcccgccggggcagccgcaaatccatgtttactttcgtggagaagcccaaggtgaccccgaatccagacttgctggatctggtacagacagcggatgagaagcggcggcagagggaccagggggaggtaggcgtggaggaggagcccttcgcactgggggccgaggcctccaacttccagcaggagccagcacctcgtgacagggccagccccgcggcggcggaggaggtggtaccagagtgggcctcctgcctcaagtcaccccgcatccaggccaagccgaagcccaaacccaaccagaacctctccgaggcctctgggaagggagctgagctctacgcccgccgccagtcacggatggagaaatatgtcatcgagtcttcaagccacacgccagagctggcccgctgcccatcacctaccatgtccctgccttcctcctggaaataccccactaacgcccccggggccttccgagtggcatcccgaagcccagcccggaccccgcctgcctccctctaccatggctacctgcctgagaacggggtcctgcgcccagagcccaccaagcagccgccataccagctgcgcccctcgctctttgtcctctcacctatcaaggagcctgccaaggtctcaccaagagctgcctcgcccgccaagcccagctccttggacctggtgcccaacctgcccaagggggctctccctccatctcctgccctgcctcggccctcgcgctcctcaccgggcctctacacctcccccggccaggacagcctgcagcccactgccgtgagccctccttacggcggtgacatctcccccgtgtctccctccagggcgtggtctccccgagccaagcaggcccccaggccctccttctctacccggaacgccgggatcgaggctcaggtgtggaagccttccttctgcttcaagtaacgaaccccacgggggtcccactgccggtcaagttcccctccttgagggccagatggagagcagatgtggcaggaaatggcacagagctgagtgaggagaatggggagtccatggttcaaggtcagatgcggccaccagctggctttgtgaccttgggcgagtcgcctcccctctctgagctgaagccgcccctcccctactacaacaggggtcggactccatgtctgagcggggaggagggtcatggagagagaactgtctggcagccctgatgcggtagaggggcatcctctggcctttgtgagctgtagggatgcagagtctgatgccagcgtcttgctgggggagtggcctagaaggggatcctaacagggacttctggagcagacagagcctgccagtgcctgtggagtcagccagccgagggtctgcctcctcagctgccccaggggggcctccctcctgaggctcaagctcctggcgtctttcttcctgttgctggattctcacctccatgggcctgtctcttctgcctctgccttctggacaccgtttcctctccgctgcttcagagagctttgcctcgcctccgcctgcgctcccctccagggtccttctgctggctgcggactcggcccaccactgctgtctgacgcttttcttcctgccccctctgaggcctggctctgttttagggagatcactgggcccaggcctcagccccagttctacctggcttgctgtcaccgctctaggggtgggggacgtcccaggggatccccaggagaaggagagccctgtagggggctgtgcagatgtgggtgtgccacagggagggtggcccctagccatgtatccattggctgttttggcttcagattcaaccaagatctgcctgactaaaagaagccacctcagcgcagtggaacggggcccagggggaggcaggagaggagggttccggtcccatgtcaccttctcatttgctgtgtgactttggcccactcacattctctttgggcctcagttttatcatttatacaaggagggcttttctagctgtaacaatctgtgaggattgagaggataggctggtgctttgaagaaaggccttgtaagtgacaagacagtcccctgggaagaaagagaaaggaaatgggctattgccaaaggacaggtggcgttagatggctgtgagggtgacctggtgagggaagggttggaatgagctgctgcaggaggccaagggatgcctgggctgggctgggctgggctggcttaggctcaggattgcctggggacagtaggagcatggcaggagctggggcaggtgcatagcagtgcagtgggaagggacagaggagatcttagaattttgaggaaaatctgggacttgagacctggattctaacagaccaactgcatgtgtgtctgtaggtctcagtttccacattcatacagtgagggtgttaagtcaggtagctggagacttcccatcgcctctgacacttttggaggtgatatgatacagcccccgaccaaaccaggctttgtggggggtgagagaatacagacacaagtggcaggattcagatggaagcttcgcaaggctgggggccgaggaccacccacttctctttcccagccctagttctgggttccccagtggggcaaggggtggtggaggcagtgcccatgctgggctgagcctgcagtttttgtgagctctgggcttgtctccatgggaacaggggtgccttcttagtgagctcatttcacacagatcgagggggtatgcgtgggggagttgtgagtgagctcagctccttcaggcctggcctctcccagaacagagtgaagcccctgccctggacccctgctcccttctacccttgagggccaccaatggaagagcccgcccttcattctgcagctcctgcggccaggctgagctctgcccccaactttgttttctctcatgttctcaatacactctgcctcaaatccgtcttgcttctttctttcttccgtgctgctaggggtcagggttcccttcctcctgcctgattctagcctgggaagtggagtgggcctgctcaattactgtgtgtgaaagtgtggctgtgtcctgcgtgctgcctgcacctgccgtgtgtctggttctgcactggtacagacgtgtgctgggttggaaatgagggcttcctctctacagcactcagggagccagaaccctgtgcaaatcgcaaccttttgttctttccttccctcagagtttggccaaaaatactttagaggatttttggggaaaatgcactacctcttctcgttgaggtttgtttgggttctttacaagtggaatagaaattcctctagccagcattcgctctccagttccctcaggtcccctccctgctccccattatctaaatttggccatttcccacatttgccattgttttcactgtctggatcctaaaagcatggagtttctgcccctggtggggaggaaagaactgccatcaagggtcaggagagctgggttctagccccaggtctgcatctgattcgtgtgtgacctcagacaacctcttccaatctctgggcctcagtttccccttctgtgcagtgaaaggattacagaaggaggtcagagaccatttggtctccgacagtccaggtttgactgtgttctacttatgtattcaccccacacatgtgccctgctttgggtctggggttgggttgagtggatgctactttttgaattttcacccaccgcattcccaaggagctctggtgtgcacggtgcattgagctctctgtcagaaagtgaacagttctgatttcctgcagccttttcgtactgtgcacacccccgactcaaaaacatacacacagagtcagtgcccaggcatggctgttagggtgaggtcaggctctggcccatctccagatgatggggatctgcttaccactgccctcaacattcaatcccgtttgagcccttctgttttgtagtcttggctgaattgttatttcttccacttgttggcctcagcattccccttgtggccaccaaaggcagaaacaatgctttagagatttttaggtagttatcatagctctcctgtgcagcctactctcctggctgaagaccccaggttccgctgccttgggtggttattgactggcttgggtcatgaactctaggccctacctccctgctcagggtggcactgtggtcaggtgttgggtcatgccagagcccaccctgatttggcatttggccctagccctcctcttctagccctggagctgggaccttcctcccagctcctctccctaaactgtggggtctgccttctgcggccagcctgactgggatgttccactggcacagagaagctcccagtgtctctggctcatgtatacacaattctgaccctgggaagaaaacagtgggatcccaggctgagccttaactttcagcttgatgactgggagcttggatgtccctagggagtctctaagggtcactccagcattagtatcccatgaaaaatgtcctgctcaggctgttgtataacattcttctttaggttaaagggctccagtttggagtctgggctcatctagcagctgctacattctgtttggataaaacatacaattggtgtctatttcctttggattgggaggaattagaagactctcagttggatgagaggatgactggcttggttatggctgatcactgattggatgaaagaataaatctttggatggttctagattttgatcgggtaggaagcatggaatggactggctagctctgaactctggtggatgactgctagtgaatttggattggattaaatggcaaggtggactggtta

SEQ ID NO: 30610 - DNA, 4571 bp, Homo sapiens
  source 1..4571: mol_type = unassigned DNA
gtcatctgtggaggagaaaagtcacatccagctccttcatgttgctgccgatgtgggattttcctggcttcgtcagccaagcaattggctgcctttgccggaggctttgagaaccaaggcttgaaggccggcaggagcatccagggggaagcttggcttcagggaggacctagcagacgttgggccggagcactagcctcacggagaaggatctgaaagaagccaaggcgcggagccagcagattgcagcccagctgaccacccctcccagctccaattcccgtggcgtccagctcttcaacaggcgccggcagagggtgaacgagttcaccttggagagccacggccagaggggacagaagcccagccaggagtccctcagagtgctcccttcaagcctcccaggccatgcaccggggctcagcctgagttccacctcgctgccggagccaggccctccacggcaccccagtccccagagccccgacagaggggtccctggccacagcatggaggggtactcagaggaggctagcttgctgcggcacctggagaaggtggccagtgaggaggaagaggtaccactggtggtttatctaaaggagaatgcagcactgctgacagccaatgggctgcacctgtcccaaaaccgagaggcccagcagtcctcaccggccccacctccagctgaggtccacagcccagctgcagatgtcaaccaaaaccttgcctcgcccagtgccacgctcaccacaccaacttctaacagcagccacaatccgccagccaccgatgtcaatcagaacccaccggcaactgttgtcccacagagcctgccactttctagcatccaacagaattcctcagaggcccaactcccatctaatggcacagggcctgcttccaaacccagcaccctgtgtgctgatgggcaaccccaggcaccggctgaggaggtgagatgcagcacactcctaattgacaaggtatcaactccagctaccaccaccagcaccttctccagagaagctacgctcatccccagctccaggcccccagcctcagatttcatgtccagctccctgctcattgacatccagcccaacaccctagtggtgtcagcagatcaagagatgtctgggcgagcagctgccaccacgcccaccaaggtctacagtgaggtccacttcacactggccaagcccccatcagtggtcaacaggacggccaggccttttgggatccaggcgccagggggcaccagccagatggagaggagccccatgctagagagacgacattttggggagaaggccccggctccccagccccccagtttgccagacaggagcccccggccacagagacacataatgtcccgcagccccatggtggaaaggaggatgatggggcagcgaagcccggcctcagagagacgccccttggggaacttcactgcaccccccacctacactgagaccttgtccacagcccctctggcttcctgggtgaggtctcctccctcatattctgtcctgtatcccagctccgaccccaagtcttctcatctgaagggccaggcggttcctgccagcaagacgggcattctggaggagtcgatggcccgccggggcagccgcaaatccatgtttactttcgtggagaagcccaaggtgaccccgaatccagacttgctggatctggtacagacagcggatgagaagcggcggcagagggaccagggggaggtaggcgtggaggaggagcccttcgcactgggggccgaggcctccaacttccagcaggagccagcacctcgtgacagggccagccccgcggcggcggaggaggtggtaccagagtgggcctcctgcctcaagtcaccccgcatccaggccaagccgaagcccaaacccaaccagaacctctccgaggcctctgggaagggagctgagctctacgcccgccgccagtcacggatggagaaatatgtcatcgagtcttcaagccacacgccagagctggcccgctgcccatcacctaccatgtccctgccttcctcctggaaataccccactaacgcccccggggccttccgagtggcatcccgaagcccagcccggaccccgcctgcctccctctaccatggctacctgcctgagaacggggtcctgcgcccagagcccaccaagcagccgccataccagctgcgcccctcgctctttgtcctctcacctatcaaggagcctgccaaggtctcaccaagagctgcctcgcccgccaagcccagctccttggacctggtgcccaacctgcccaagggggctctccctccatctcctgccctgcctcggccctcgcgctcctcaccgggcctctacacctcccccggccaggacagcctgcagcccactgccgtgagccctccttacggcggtgacatctcccccgtgtctccctccagggcgtggtctccccgagccaagcaggcccccaggccctccttctctacccggaacgccgggatcgaggctcaggtgtggaagccttccttctgcttcaagtaacgaaccccacgggggtcccactgccggtcaagttcccctccttgagggccagatggagagcagatgtggcaggaaatggcacagagctgagtgaggagaatggggagtccatggttcaaggtcagatgcggccaccagctggctttgtgaccttgggcgagtcgcctcccctctctgagctgaagccgcccctcccctactacaacaggggtcggactccatgtctgagcggggaggagggtcatggagagagaactgtctggcagccctgatgcggtagaggggcatcctctggcctttgtgagctgtagggatgcagagtctgatgccagcgtcttgctgggggagtggcctagaaggggatcctaacagggacttctggagcagacagagcctgccagtgcctgtggagtcagccagccgagggtctgcctcctcagctgccccaggggggcctccctcctgaggctcaagctcctggcgtctttcttcctgttgctggattctcacctccatgggcctgtctcttctgcctctgccttctggacaccgtttcctctccgctgcttcagagagctttgcctcgcctccgcctgcgctcccctccagggtccttctgctggctgcggactcggcccaccactgctgtctgacgcttttcttcctgccccctctgaggcctggctctgttttagggagatcactgggcccaggcctcagccccagttctacctggcttgctgtcaccgctctaggggtgggggacgtcccaggggatccccaggagaaggagagccctgtagggggctgtgcagatgtgggtgtgccacagggagggtggcccctagccatgtatccattggctgttttggcttcagattcaaccaagatctgcctgactaaaagaagccacctcagcgcagtggaacggggcccagggggaggcaggagaggagggttccggtcccatgtcaccttctcatttgctgtgtgactttggcccactcacattctctttgggcctcagttttatcatttatacaaggagggcttttctagctgtaacaatctgtgaggattgagaggataggctggtgctttgaagaaaggccttgtaagtgacaagacagtcccctgggaagaaagagaaaggaaatgggctattgccaaaggacaggtggcgttagatggctgtgagggtgacctggtgagggaagggttggaatgagctgctgcaggaggccaagggatgcctgggctgggctgggctgggctggcttaggctcaggattgcctggggacagtaggagcatggcaggagctggggcaggtgcatagcagtgcagtgggaagggacagaggagatcttagaattttgaggaaaatctgggacttgagacctggattctaacagaccaactgcatgtgtgtctgtaggtctcagtttccacattcatacagtgagggtgttaagtcaggtagctggagacttcccatcgcctctgacacttttggaggtgatatgatacagcccccgaccaaaccaggctttgtggggggtgagagaatacagacacaagtggcaggattcagatggaagcttcgcaaggctgggggccgaggaccacccacttctctttcccagccctagttctgggttccccagtggggcaaggggtggtggaggcagtgcccatgctgggctgagcctgcagtttttgtgagctctgggcttgtctccatgggaacaggggtgccttcttagtgagctcatttcacacagatcgagggggtatgcgtgggggagttgtgagtgagctcagctccttcaggcctggcctctcccagaacagagtgaagcccctgccctggacccctgctcccttctacccttgagggccaccaatggaagagcccgcccttcattctgcagctcctgcggccaggctgagctctgcccccaactttgttttctctcatgttctcaatacactctgcctcaaa

SEQ ID NO: 30611 - DNA, 5098 bp, Homo sapiens
  source 1..5098: mol_type = unassigned DNA
agtttgcatcttaggtcacaccactcctgtgattcctgtggtattgccccaaagcggcctcacaccagagacgggttaagaagagggattggaggtccaccactccactagcccaggaaggacttatctttcgtctcagccagacctcaccccaattctgtgaatcagcggaggaaggcaaaagtgcagagagtcagaggaggctgtgtaaggagcagagaccagggctcacacagctggccccagcccaggccctggcccaggcccaggagcctgcttccctgcatcgctgaggaagaacagcaccatgctgggtcctcacctcccacctccgccccttgcacccagcgaagggaggcctaccccctgcgccttccagatccctgatggaagctacaggtgtctggctctggaagccgaggagagcagcggtgaggagggcctgcagggagaggtggggcctaccgacctggaagaggatgagggggtcagcaggagtggggacgactctgcctgcagagtcacccaggggacaccgcagctgcccaaagccctgggcatccaaccacccagctgctccagagaggaacaaggggcgtcccagcacgacgacagggccagccaggactgggatgtagtgaaggccgggcagatgatgacagccagccccagccctggccctgggcccagagtggcccagaaaccagcgttgggccggagcactagcctcacggagaaggatctgaaagaagccaaggcgcggagccagcagattgcagcccagctgaccacccctcccagctccaattcccgtggcgtccagctcttcaacaggcgccggcagagggtgaacgagttcaccttggagagccacggccagaggggacagaagcccagccaggagtccctcagagtgctcccttcaagcctcccaggccatgcaccggggctcagcctgagttccacctcgctgccggagccaggccctccacggcaccccagtccccagagccccgacagaggggtccctggccacagcatggaggggtactcagaggaggctagcttgctgcggcacctggagaaggtggccagtgaggaggaagaggtaccactggtggtttatctaaaggagaatgcagcactgctgacagccaatgggctgcacctgtcccaaaaccgagaggcccagcagtcctcaccggccccacctccagctgaggtccacagcccagctgcagatgtcaaccaaaaccttgcctcgcccagtgccacgctcaccacaccaacttctaacagcagccacaatccgccagccaccgatgtcaatcagaacccaccggcaactgttgtcccacagagcctgccactttctagcatccaacagaattcctcagaggcccaactcccatctaatggcacagggcctgcttccaaacccagcaccctgtgtgctgatgggcaaccccaggcaccggctgaggaggtgagatgcagcacactcctaattgacaaggtatcaactccagctaccaccaccagcaccttctccagagaagctacgctcatccccagctccaggcccccagcctcagatttcatgtccagctccctgctcattgacatccagcccaacaccctagtggtgtcagcagatcaagagatgtctgggcgagcagctgccaccacgcccaccaaggtctacagtgaggtccacttcacactggccaagcccccatcagtggtcaacaggacggccaggccttttgggatccaggcgccagggggcaccagccagatggagaggagccccatgctagagagacgacattttggggagaaggccccggctccccagccccccagtttgccagacaggagcccccggccacagagacacataatgtcccgcagccccatggtggaaaggaggatgatggggcagcgaagcccggcctcagagagacgccccttggggaacttcactgcaccccccacctacactgagaccttgtccacagcccctctggcttcctgggtgaggtctcctccctcatattctgtcctgtatcccagctccgaccccaagtcttctcatctgaagggccaggcggttcctgccagcaagacgggcattctggaggagtcgatggcccgccggggcagccgcaaatccatgtttactttcgtggagaagcccaaggtgaccccgaatccagacttgctggatctggtacagacagcggatgagaagcggcggcagagggaccagggggaggtaggcgtggaggaggagcccttcgcactgggggccgaggcctccaacttccagcaggagccagcacctcgtgacagggccagccccgcggcggcggaggaggtggtaccagagtgggcctcctgcctcaagtcaccccgcatccaggccaagccgaagcccaaacccaaccagaacctctccgaggcctctgggaagggagctgagctctacgcccgccgccagtcacggatggagaaatatgtcatcgagtcttcaagccacacgccagagctggcccgctgcccatcacctaccatgtccctgccttcctcctggaaataccccactaacgcccccggggccttccgagtggcatcccgaagcccagcccggaccccgcctgcctccctctaccatggctacctgcctgagaacggggtcctgcgcccagagcccaccaagcagccgccataccagctgcgcccctcgctctttgtcctctcacctatcaaggagcctgccaaggtctcaccaagagctgcctcgcccgccaagcccagctccttggacctggtgcccaacctgcccaagggggctctccctccatctcctgccctgcctcggccctcgcgctcctcaccgggcctctacacctcccccggccaggacagcctgcagcccactgccgtgagccctccttacggcggtgacatctcccccgtgtctccctccagggcgtggtctccccgagccaagcaggcccccaggccctccttctctacccggaacgccgggatcgaggctcaggtgtggaagccttccttctgcttcaagtaacgaaccccacgggggtcccactgccggtcaagttcccctccttgagggccagatggagagcagatgtggcaggaaatggcacagagctgagtgaggagaatggggagtccatggttcaaggtcagatgcggccaccagctggctttgtgaccttgggcgagtcgcctcccctctctgagctgaagccgcccctcccctactacaacaggggtcggactccatgtctgagcggggaggagggtcatggagagagaactgtctggcagccctgatgcggtagaggggcatcctctggcctttgtgagctgtagggatgcagagtctgatgccagcgtcttgctgggggagtggcctagaaggggatcctaacagggacttctggagcagacagagcctgccagtgcctgtggagtcagccagccgagggtctgcctcctcagctgccccaggggggcctccctcctgaggctcaagctcctggcgtctttcttcctgttgctggattctcacctccatgggcctgtctcttctgcctctgccttctggacaccgtttcctctccgctgcttcagagagctttgcctcgcctccgcctgcgctcccctccagggtccttctgctggctgcggactcggcccaccactgctgtctgacgcttttcttcctgccccctctgaggcctggctctgttttagggagatcactgggcccaggcctcagccccagttctacctggcttgctgtcaccgctctaggggtgggggacgtcccaggggatccccaggagaaggagagccctgtagggggctgtgcagatgtgggtgtgccacagggagggtggcccctagccatgtatccattggctgttttggcttcagattcaaccaagatctgcctgactaaaagaagccacctcagcgcagtggaacggggcccagggggaggcaggagaggagggttccggtcccatgtcaccttctcatttgctgtgtgactttggcccactcacattctctttgggcctcagttttatcatttatacaaggagggcttttctagctgtaacaatctgtgaggattgagaggataggctggtgctttgaagaaaggccttgtaagtgacaagacagtcccctgggaagaaagagaaaggaaatgggctattgccaaaggacaggtggcgttagatggctgtgagggtgacctggtgagggaagggttggaatgagctgctgcaggaggccaagggatgcctgggctgggctgggctgggctggcttaggctcaggattgcctggggacagtaggagcatggcaggagctggggcaggtgcatagcagtgcagtgggaagggacagaggagatcttagaattttgaggaaaatctgggacttgagacctggattctaacagaccaactgcatgtgtgtctgtaggtctcagtttccacattcatacagtgagggtgttaagtcaggtagctggagacttcccatcgcctctgacacttttggaggtgatatgatacagcccccgaccaaaccaggctttgtggggggtgagagaatacagacacaagtggcaggattcagatggaagcttcgcaaggctgggggccgaggaccacccacttctctttcccagccctagttctgggttccccagtggggcaaggggtggtggaggcagtgcccatgctgggctgagcctgcagtttttgtgagctctgggcttgtctccatgggaacaggggtgccttcttagtgagctcatttcacacagatcgagggggtatgcgtgggggagttgtgagtgagctcagctccttcaggcctggcctctcccagaacagagtgaagcccctgccctggacccctgctcccttctacccttgagggccaccaatggaagagcccgcccttcattctgcagctcctgcggccaggctgagctctgcccccaactttgttttctctcatgttctcaatacactctgcctc

SEQ ID NO: 30612 - DNA, 2344 bp, Homo sapiens
  source 1..2344: mol_type = unassigned DNA
aagtgagcaggcgcgcgggctcggcgcgcgcaggcgcgactagggtgcagcgccaggtccggtgttggggtgtccgagttgccgccggagaggagtggcctcgcccgcttgagttttgattcatcatggataatctgtcatcagaagaaattcaacagagagctcaccagattactgatgagtctctggaaagtacgaggagaatcctgggtttagccattgagtctcaggatgcaggaatcaagaccatcactatgctggatgaacaaaaggaacaactaaaccgcatagaagaaggcttggaccaaataaataaggacatgagagagacagagaagactttaacagaactcaacaaatgctgtggcctttgtgtctgcccatgtaatagaacaaagaactttgagtctggcaaggcttataagacaacatggggagatggtggagaaaactcaccttgcaatgtagtatctaaacagccaggcccggtgacaaatggtcagcttcagcaaccaacaacgggagcagccagtggtggatacattaaacgcataactaatgatgccagagaagatgaaatggaagagaacctgactcaagtgggcagtatcctgggaaatctaaaagacatggccctgaacataggcaatgagattgatgctcaaaatccacaaataaaacgaatcacagacaaggctgacaccaacagagatcgtattgatattgccaatgccagagcaaagaaactcattgacagctaaagctactgctgttcttctttatcatttattcacttccgtagctcctccttgaaagttattaccttttcagagtttaagttttcggttccacgctcttctaattgggagataatatggaagaagggccagagcagttacagccctccttcttttttgttttctgttgagggccgactgctgctctgccttccttctagtattttctttctcaattcatacgcttagattggttttcatatgtcatgtttagtgttttcatcctcctcatatacttcagcaggttcttttgctttcaagatttggaagcattgccaaagacagccatgaagaaggaagctgtagaggtgttttttgttgttgtttatttttgcttttgtggttgagggaaggacaagagataagaggttgttacctcagtaaaaaccttcaggccacaaagcaaaaagttgcatagccacaacgaagatctagttggatatagtttttgatttaagttgcagttatagccaatttaggctaatgcttggttttggagcttttatacacaacgtttttgttaggcatcacagttttgcaacctctgctccaaagagaaaaatagaatgagttttctttcttttttttttttttggagtcagagtctcgctctcttgtccaggctggagtgcaatagcgcgatctgggctcactgcaacctccgcctccctggttcaagcaattctcctgccttgcctcctgagtagctgggattacaggcgtgtgtcaccacgctcggctaatttttgtatttttagtagagacagggtttcaccatgtcaagctggtcttggactcctgacgtcgtgatccacccgccttggcctcccaaagtactgggattacaggcgtgagccactgtgcctggctgagttttcttaaagtgagcttaatttctgaactcttagtgattcatatatgtacataaatctgtgatcccatttcttattgcaccattcaggaacactttatataaatgagtggctttttatttcatattattagtagtatcatggttccattacaggcctattaacatcatacattgtcattagtctttgaagaaaaaatatgtaaatatatatgtgtaacatgagaatttctctctaaagcagggcttaaaattttttggaaaagtttgacaaagcataccacatgaattcagatttacctcaatgctaagaattatgtttagttaggaaaaaggaaagtcattttgacctcaggtagaaaaatagattgctttgagttttatgtagctttagactttaaaaagttagaatttattctgtaactaaaaattatttgaaaaaattatgcctctggtttaattattggtgattacacactctttctcttacccttgtgtattgaactatgtccataatcaagttgatgtggatcctgaaaagtgttatgaacatctgattggtatttgtcacatttattttaaaattagcatctgaacacttcaaagctgtcagtgtgtattggtttcaccaataaccactgcttgatccttacaattaaattttttaactaactaa

SEQ ID NO: 30613 - DNA, 2148 bp, Homo sapiens
  source 1..2148: mol_type = unassigned DNA
cgcgactagggtgcagcgccaggtccggtgttggggtgtccgagttgccgccggagaggagtggcctcgcccgcttgagttttgattcatcatggataatctgtcatcagaagaaattcaacagagagctcaccagattactgatgagtctctggaaagtacgaggagaatcctgggtttagccattgagtctcaggatgcaggaatcaagaccatcactatgctggatgaacaaaaggaacaactaaaccgcatagaagaaggcttggaccaaataaataaggacatgagagagacagagaagactttaacagaactcaacaaatgctgtggcctttgtgtctgcccatgtaatagcataactaatgatgccagagaagatgaaatggaagagaacctgactcaagtgggcagtatcctgggaaatctaaaagacatggccctgaacataggcaatgagattgatgctcaaaatccacaaataaaacgaatcacagacaaggctgacaccaacagagatcgtattgatattgccaatgccagagcaaagaaactcattgacagctaaagctactgctgttcttctttatcatttattcacttccgtagctcctccttgaaagttattaccttttcagagtttaagttttcggttccacgctcttctaattgggagataatatggaagaagggccagagcagttacagccctccttcttttttgttttctgttgagggccgactgctgctctgccttccttctagtattttctttctcaattcatacgcttagattggttttcatatgtcatgtttagtgttttcatcctcctcatatacttcagcaggttcttttgctttcaagatttggaagcattgccaaagacagccatgaagaaggaagctgtagaggtgttttttgttgttgtttatttttgcttttgtggttgagggaaggacaagagataagaggttgttacctcagtaaaaaccttcaggccacaaagcaaaaagttgcatagccacaacgaagatctagttggatatagtttttgatttaagttgcagttatagccaatttaggctaatgcttggttttggagcttttatacacaacgtttttgttaggcatcacagttttgcaacctctgctccaaagagaaaaatagaatgagttttctttcttttttttttttttggagtcagagtctcgctctcttgtccaggctggagtgcaatagcgcgatctgggctcactgcaacctccgcctccctggttcaagcaattctcctgccttgcctcctgagtagctgggattacaggcgtgtgtcaccacgctcggctaatttttgtatttttagtagagacagggtttcaccatgtcaagctggtcttggactcctgacgtcgtgatccacccgccttggcctcccaaagtactgggattacaggcgtgagccactgtgcctggctgagttttcttaaagtgagcttaatttctgaactcttagtgattcatatatgtacataaatctgtgatcccatttcttattgcaccattcaggaacactttatataaatgagtggctttttatttcatattattagtagtatcatggttccattacaggcctattaacatcatacattgtcattagtctttgaagaaaaaatatgtaaatatatatgtgtaacatgagaatttctctctaaagcagggcttaaaattttttggaaaagtttgacaaagcataccacatgaattcagatttacctcaatgctaagaattatgtttagttaggaaaaaggaaagtcattttgacctcaggtagaaaaatagattgctttgagttttatgtagctttagactttaaaaagttagaatttattctgtaactaaaaattatttgaaaaaattatgcctctggtttaattattggtgattacacactctttctcttacccttgtgtattgaactatgtccataatcaagttgatgtggatcctgaaaagtgttatgaacatctgattggtatttgtcacatttattttaaaattagcatctgaacacttcaaagctgtcagtgtgtattggtttcaccaataaccactgcttgatccttacaattaaattttttaactaac

SEQ ID NO: 30614 - DNA, 477 bp, Homo sapiens
  source 1..477: mol_type = unassigned DNA
atggataatctgtcatcagaagaaattcaacagagagctcaccagattactgatgagtctctggaaagtacgaggagaatcctgggtttagccattgagtctcaggatgcaggaatcaagaccatcactatgctggatgaacaaaaggaacaactaaaccgcatagaagaaggcttggaccaaataaataaggacatgagagagacagagaagactttaacagaactcaacaaatgctgtggcctttgtgtctgcccatgtaatagcataactaatgatgccagagaagatgaaatggaagagaacctgactcaagtgggcagtatcctgggaaatctaaaagacatggccctgaacataggcaatgagattgatgctcaaaatccacaaataaaacgaatcacagacaaggctgacaccaacagagatcgtattgatattgccaatgccagagcaaagaaactcattgacagctaa

SEQ ID NO: 30615 - DNA, 2053 bp, Homo sapiens
  source 1..2053: mol_type = unassigned DNA
atctttgatgagggcagagctcacgttgcattgaagacgaaacctcggggaggtcaggcgctgtctttccttccctccctgctcggcggctccaccacagttgcaacctgcagaggcccggagaacacaaccctcccgagaagcccaggtccagagccaaacccgtcactgaccccccagcccaggcgcccagccactccccaccgctaccatggccgaagacgcagacatgcgcaatgagctggaggagatgcagcgaagggctgaccagttggctgatgagtcgctggaaagcacccgtcgtatgctgcaactggttgaagagagtaaagatgctggtatcaggactttggttatgttggatgaacaaggagaacaactggaacgcattgaggaagggatggaccaaatcaataaggacatgaaagaagcagaaaagaatttgacggacctaggaaaattctgcgggctttgtgtgtgtccctgtaacaagcttaaatcaagtgatgcttacaaaaaagcctggggcaataatcaggacggagtggtggccagccagcctgctcgtgtagtggacgaacgggagcagatggccatcagtggcggcttcatccgcagggtaacaaatgatgcccgagaaaatgaaatggatgaaaacctagagcaggtgagcggcatcatcgggaacctccgtcacatggccctggatatgggcaatgagatcgatacacagaatcgccagatcgacaggatcatggagaaggctgattccaacaaaaccagaattgatgaggccaaccaacgtgcaacaaagatgctgggaagtggttaagtgtgcccacccgtgttctcctccaaatgctgtcgggcaagatagctccttcatgcttttctcatggtattatctagtaggtctgcacacataacacacatcagtccacccccattgtgaatgttgtcctgtgtcatctgtcagcttcccaacaatactttgtgtcttttgttctctcttggtctctttctttccaaaggttgtacatagtggtcatttggtggctctaactccttgaggtcttgagtttcatttttcattttctctcctcggtggcatttgctgaataacaacaatttaggaatgctcaatgtgctgttgattctttcaatccacagtattgttcttgtaaaactgtgacattccacagagttactgccacggtcctttgagtgtcaggctctgaatctctcaaaatgtgccgtctttggttcctcatggctgttatctgtctttatgatttcatgattagacaatgtggaattacataacaggcattgcactaaaagtgatgtgatttatgcatttatgcatgagaactaaatagatttttagattcctacttaaacaaaaactttccatgacagtagcatactgatgagacaacacacacacacacaaaacaacagcaacaacaacagaacaacaacaaagcatgctcagtattgagacactgtcaagattaagttataccagcaaaagtgcagtagtgtcacttttttcctgtcaatatatagagacttctaaatcataatcatccttttttaaaaaaaagaattttaaaaaagatggatttgacacactcaccatttaatcatttccagcaaaatatatgtttggctgaaattatgtcaaatggatgtaatatagggtttgtttgctgcttttgatggctatgttttggagagagcaatcttgctgtgaaacagtgtggatgtaaattttataaggctgactcttactaaccaccatttcccctgtggtttgttatcagtacaattctttgttgcttaatctagagctatgcacaccaaattgctgagatgtttagtagctgataaagaaaccttttaaaaaaataatataaatgaatgaaatataaactgtgagataaatatcattatagcatgtaatattaaattcctcctgtctcctctgtcagtttgtgaagtgattgacattttgtagctagtttaaaattattaaaaattatagactcca

SEQ ID NO: 30616 - DNA, 2050 bp, Homo sapiens
  source 1..2050: mol_type = unassigned DNA
tttgatgagggcagagctcacgttgcattgaagacgaaacctcggggaggtcaggcgctgtctttccttccctccctgctcggcggctccaccacagttgcaacctgcagaggcccggagaacacaaccctcccgagaagcccaggtccagagccaaacccgtcactgaccccccagcccaggcgcccagccactccccaccgctaccatggccgaagacgcagacatgcgcaatgagctggaggagatgcagcgaagggctgaccagttggctgatgagtcgctggaaagcacccgtcgtatgctgcaactggttgaagagagtaaagatgctggtatcaggactttggttatgttggatgaacaaggagaacaactcgatcgtgtcgaagaaggcatgaaccatatcaaccaagacatgaaggaggctgagaaaaatttaaaagatttagggaaatgctgtggccttttcatatgtccttgtaacaagcttaaatcaagtgatgcttacaaaaaagcctggggcaataatcaggacggagtggtggccagccagcctgctcgtgtagtggacgaacgggagcagatggccatcagtggcggcttcatccgcagggtaacaaatgatgcccgagaaaatgaaatggatgaaaacctagagcaggtgagcggcatcatcgggaacctccgtcacatggccctggatatgggcaatgagatcgatacacagaatcgccagatcgacaggatcatggagaaggctgattccaacaaaaccagaattgatgaggccaaccaacgtgcaacaaagatgctgggaagtggttaagtgtgcccacccgtgttctcctccaaatgctgtcgggcaagatagctccttcatgcttttctcatggtattatctagtaggtctgcacacataacacacatcagtccacccccattgtgaatgttgtcctgtgtcatctgtcagcttcccaacaatactttgtgtcttttgttctctcttggtctctttctttccaaaggttgtacatagtggtcatttggtggctctaactccttgaggtcttgagtttcatttttcattttctctcctcggtggcatttgctgaataacaacaatttaggaatgctcaatgtgctgttgattctttcaatccacagtattgttcttgtaaaactgtgacattccacagagttactgccacggtcctttgagtgtcaggctctgaatctctcaaaatgtgccgtctttggttcctcatggctgttatctgtctttatgatttcatgattagacaatgtggaattacataacaggcattgcactaaaagtgatgtgatttatgcatttatgcatgagaactaaatagatttttagattcctacttaaacaaaaactttccatgacagtagcatactgatgagacaacacacacacacacaaaacaacagcaacaacaacagaacaacaacaaagcatgctcagtattgagacactgtcaagattaagttataccagcaaaagtgcagtagtgtcacttttttcctgtcaatatatagagacttctaaatcataatcatccttttttaaaaaaaagaattttaaaaaagatggatttgacacactcaccatttaatcatttccagcaaaatatatgtttggctgaaattatgtcaaatggatgtaatatagggtttgtttgctgcttttgatggctatgttttggagagagcaatcttgctgtgaaacagtgtggatgtaaattttataaggctgactcttactaaccaccatttcccctgtggtttgttatcagtacaattctttgttgcttaatctagagctatgcacaccaaattgctgagatgtttagtagctgataaagaaaccttttaaaaaaataatataaatgaatgaaatataaactgtgagataaatatcattatagcatgtaatattaaattcctcctgtctcctctgtcagtttgtgaagtgattgacattttgtagctagtttaaaattattaaaaattatagactcca

SEQ ID NO: 30617 - DNA, 492 bp, Homo sapiens
  source 1..492: mol_type = unassigned DNA
gggtaaatacaagtattggtgcacttagggtgcggtattccgtgtgtgcacgtctggtgggggctttataaagtgttttcgaggtgagctgctggggaaaagggaaacgggagccctgcaaatggagcgacggggaggaagagcgagggtccagagccaaacccgtcactgaccccccagcccaggcgcccagccactccccaccgctaccatggccgaagacgcagacatgcgcaatgagctggaggagatgcagcgaagggctgaccagttggctgatgagtcgctggaaagcacccgtcgtatgctgcaactggttgaagagagtaaagatgctggtatcaggactttggttatgttggatgaacaaggagaacaactggaacgcattgaggaagggatggaccaaatcaataaggacatgaaagaagcagaaaagaatttgacggacctaggaaaattctgcgggctttgtgtgtgtccctgtaacaa

SEQ ID NO: 30618 - DNA, 4283 bp, Homo sapiens
  source 1..4283: mol_type = unassigned DNA
acctgcgcgcgacgcgcggaaggagttcgcgcgacgaccgcggggtcggcgggcggggcgaggccctggacggcggcggcagtggggctcctccttctgtttcccagaccgagagccgcgccggcaccatgtcagcttaccctaaaagctacaatccgttcgacgacgacggggaggacgaaggcgcccggccggccccttggagggacgcccgagacctccccgacgggcccgacgcgcccgcggacaggcagcagtacttgcggcaggaggtcctccgcagggctgaggccacggccgccagcaccagcaggtccctggccctcatgtacgagtccgagaaggttggggtcgcctcttccgaggagctcgcccgtcagcgaggagtcctggagcgcacagagaagatggtggacaagatggaccaagatttgaagatcagccagaaacacatcaatagcattaagagcgtgtttggggggctggtcaattacttcaaatccaaaccagtagagaccccacctgaacagaatggcaccctcacctcccagcccaacaacagattgaaagaagctataagtacaagtaaagaacaggaagcaaagtaccaggccagccacccaaaccttagaaagctggatgatacagaccctgtccccagaggggctggttctgccatgagtactgatgcttacccaaagaacccacaccttcgagcctatcaccagaagatcgacagcaacctagatgagctgtccatgggactgggtcgtctgaaggacatagccctggggatgcagacagaaattgaggagcaagatgacattcttgaccggctgacaaccaaagtggacaagttagatgtcaacataaaaagcacagaaagaaaagttcgacaactctgaagacagacggatttccactctattgtgatgaaaagatttgaaagatctttttttgaacttccaagaaatttcatttactattttagtatgtaaattaatgtgtgtttgcaaatgttataatagagtaggtcttaagacatttttgctgttataaggaagtgtttgtcccacattttcctagggttaacacctcaccaagttcttccagcaaaatgcttattagagtttttgtctgagcacagtagcctggccctgcatatcttgggcgtttgattaccatgctggaataagaagagttgcatttctcattttaatgagcatatggaaagatgggaacagaatttcagtcttgcagccatgagcctctatttctcattcctaagccttaccatgagtcagagtgttaagggggcctgtgaaccagtcgtttggtggaggagggtccttcccacacctttgtttaggagtcatcattcacacacacacacacacacacacacacacacacacacacacacactctctgagcacattatctgtgattctttcatcctcccagaaaggatcagtgttagaatgggaaatagagtgtgccatcttgctcttttgttggcagatgtccccgcttccctccagccccccatccttggcatgtatattagtaggagggcttcacaccagcactgctcactgcgactcctggaaatgtgtggggaattgggtgagcccctcttccccacgtgctcccatctgtaactctccatctgtgatttgcaacaggtcttccactggctcgaggctgcgaggctgaccgacaggggcgcccaatagagtttgtgggaatggagtattgcacagatgcagctgcacaatggtcttcctccacccctctgggaatcaccattaggcaggcctcagtagggcaaaatgtttatttggtaccgggggtctcctgacctgtctagcattcccacccactcttctgcacttcttgcaaggtaacttgaatcatcacttatttctctgccacctggttttaggactggcactctataaatgacgctgactttgtatagaaggattttgctaagggggcaaaaagcccagataccattttaactggcccagttcattttctcctttcattttacaaaagaaatcatgcagaagcatcaattaaaactgatttatttatgttggtacatccaacaaaatagttggagccacaaggcccttgtctttttaaaaaaacaaaatattttgaagatggtgaaagtgactgattttaataatgagataggtcacttaaaataacagtgcctttgaccttaaaacatggcactggcccatgtgacctttgccatttcccagtacttccctttacagtctgcagcctataaacagtggtgtctcaaagcaaaggaaacctccacaagtgctgcaacagtgcattagtttttatgtagcaatttgtttataaaaattcccatcccataatgcatgaccttcctaaaaatatccacagcctccataggcaaggtgagctttctgtgctacccacttgttagattccagccacctcagggattctgatccatgtcattaacgaccatcccagggtgtgagggcctgattaaagcttatcgaactagacatttgtttattagatgagctcggcattattattttctcaataactggtagaagggaaattttaaacataacactcaacccaaacaaaactacttcgtgaggctttcagcaaaaaggctgcttaaaagcatgaacccgggatgcagagcagcttttgtgcacggttccacttactgtaattgtttctggttctttcctctaacaccttccatgtatgtcaactttttatcaccgtcaggcatagactcgtggagattagtcattatagctcagacctaagctaattatttaaaataaatacatgtaaaggccactgccacattctcagcagacttccacttgcctaatgagattagtgattcaactgacttgaagcacagtaacatcttattttatgcacattccctgtcttttgctggactgatgaagccagtcacccgcccttctctgttttttggttttttttttcttaaccccaggtatatggaaggggagttgccttcacttttctggaaatttgtcttcgtctgacatattagagggcctcgttttgtcctgttcttgttcagaccctctcgttctacgtcctgtgctgaggggactgtccgtaagctacaggacagcgagctggtcctttctgccacttcttccccactcccatgcccaggaaggcctggttgctgatgctactttataaatgagttgcttgcattttcacagagaatgaaggaagacgtaacatggctccagaaacttttcacatgatgattgggatcgacaaaaaaatgctaccctctagactagacacatttcatggagacaagcaaaatggtgccagggctgggctgactgtgggatgggatttggtactgcagacagattttgatttccacagttgagctggaaacaaactgtgccttcaaaaaatgacttttctaacttaaggttggttatatgttaagtgtgctactaacttaaaaaatagtggctgggcgcggtggctcatgcctgtaatcccagtgctttgggaggccaaggcggggggatcacgaggtcaggagatcgagaccatcctggctaacacggtgaaaccccatctctactaaaaacacacaaaaaattagctgggcgtggtggtgggcgcctgtagtcccagctactcaggaggctgaggcaggagaatggcatgaacctgggaggcagagcttgcagtgagccgagacagcgccattgcactccagcctgggcaacagagcaagactccgtctcaaaaaaaaaaaaaaaaaaaaaatagtgcactctctggctggtcacggtggctcacgcctgtaatctcagcactttggaaggccaaggcaggcggatcacgaggtcagaagatcgagaccatcctggctaacacagtgaaaccccgtctctactaaaaatataaaaaattagtcgggcatggtggcgggcgcctgtagtcccaactactcgggagactgaggcagaagaatggcgtgaactcaggaggcggagcttgcagtgagccaaggcgacagagcaagactctgtctcaaaaaataaaaaatagtgcactgtccttcgagaaagttttctaacatctagtaatttgtaacttagaagtggagttgccttgtggatgtcttttttgcattctgtaggaaatgaaacgtgaatttaactcgggttgcaagaaataaaaatgtcagtgcatttaaa

SEQ ID NO: 30619 - DNA, 4808 bp, Homo sapiens
  source 1..4808: mol_type = unassigned DNA
caatcaggatgctggggctcggagatgatgggcggccgcctcctcactggagggattcctggagaagctgcagtgtggggatgctctagaccgagtactgcccccagtgtctttccacctcctcctgcagcagcggcagcggcagcagcagttagcagcggcaacttgaggctgcaccccgggcaagtccccagggtggtgctcagccgagaggggggcttggcgccccgaaggggtgtgtgtagggtgggggcgaccacgtgggaccagctggtggccctggaaaacctcccacacacccacacccacacaccccttttgtgttgcaggctgcccctccaagagcggaggcagcgagagtacgcgtgtgcctcgcgccggtccacgcggggagagcactggggaccgagacccggcaccacctcccggtccgccctccagggaaaacgggaaaactagcaagagctagcaagaactagcaagagcttgaacaaacgcctggactcagattggaagactgctcatttgtctactgcctcattcctggaaattgcactggaactgtctgattaagaaaaacagaataattctgaaagaaagaaaacaaagaaaaacatactccagaattcctaatagaacacttcacctgaacctaaaatggtgagcgagagtcaccatgaggccctggcagccccgcctgtcaccactgtcgcgactgttctgccaagcaacgccacagagccagccagtcctggagaaggaaaggaagatgcattttctaagctgaaggagaagtttatgaatgagttgcataaaattccattgccaccgtgggccttaattgcaatagccatagtcgcagtccttttagtcctgacctgctgcttttgtatctgtaagaaatgtttgttcaaaaagaaaaacaagaagaagggaaaggaaaaaggagggaagaatgccattaacatgaaagatgtaaaagacttagggaagacgatgaaagatcaggccctcaaggatgatgatgctgaaactggattgacagatggagaagaaaaagaagaacccaaagaagaggagaaactgggaaaacttcagtattcactggattatgatttccaaaataaccagctgctggtagggatcattcaggctgccgaactgcccgccttggacatggggggcacatctgatccttacgtgaaagtgtttctgctacctgataagaagaagaaatttgagacaaaagtccaccgaaaaacccttaatcctgtcttcaatgagcaatttactttcaaggtaccatactcggaattgggtggcaaaaccctagtgatggctgtatatgattttgatcgtttctctaagcatgacatcattggagaatttaaagtccctatgaacacagtggattttggccatgtaactgaggaatggcgtgacctgcaaagtgctgagaaggaagagcaagagaaattgggtgatatctgcttctcccttcgctacgtacctactgctggtaagctgactgttgtcattctggaggcaaagaacctgaagaagatggatgtgggtggcttatccgatccttatgtgaagattcatctgatgcagaatggtaagaggctgaagaagaaaaagacaacaattaaaaagaacacacttaacccctactacaatgagtcattcagctttgaagtaccttttgaacaaatccagaaagtgcaggtggtggtaactgttttggactatgacaagattggcaagaacgatgccatcggcaaagtctttgtgggctacaacagcaccggcgcggagctgcgacactggtcagacatgctggccaaccccaggcgacctattgcccagtggcacaccctgcaggtagaggaggaagttgatgccatgctggccgtcaagaagtaaaggaaagaagaagcctttctgcatttgcccatatagtgctctttagccagtatctgtaaatacctcagtaatatgggtcctttcatttttccagccatgcattcctaacacaattcagtggtacttggaatcctgttttaatttgcacaaatttaaatgtagagagcccctaagtccttcatcataccactgccctccaaatctactcttcttttaagcaatatgatgtgtagatagagcatgaatgaaattatttattgtatcacactgttgtatataccagtatgctaaagatttatttctagtttgtgtatttgtatgttgtaagcgtttcctaatctgtgtatatctagatgtttttaataagatgttctattttaaactatgtaaattgactgagatataggagagctgataatatattatacggtaaatatagtatcgtctgcattccagcaaaaatatcaactcgtaaggcactagtacagttaaactgacatcttaaaggacaacttaaacctgagctttctattgaatcatttgagtaccaagataaacttacaccacatacttggtgggtgaatccaattttgtagaattcctacacaggcaaaatagcatgatctgagcagcagcatccaggctgacctcaaggaagcatagccacaaaacagaatagcacctgtctgtacatatttacaaagctaaaataatggcttcactcttatatttgaggaagcaactgaacaggagtcaatgatttcatattactgcatatagaataacaacaaggtgttccgtgtgtgtgtgtgtgtgtgtgtgtgtgtgtgtgtgcacatttgtttggggatgggggagaagaagctaaggggagaagtcaacatttatgaaatattgcctgactatttaaaaagaaaaaagtagctctccattatcacctttatacaaaatgtacatcctgtgaattctgttccagatttcacacctacaataattccaaaaggtttgcacattagagtttgtaacaaaatattttattatataaaaccaggttagaaggaatgcaggatatttttaacacaacaatctgtgcttattacacaaaattactttgtggtaaacagacagtattgtaatcccatcaaaagatgaaagaaaaacaaaaacaaaaaccaacaacaattagccatagttctgaatgcacttcaattaagccaaaacagacagctagtgatctttttatatgctctttttacttaagttttaatttgtcctttaaaaaaaggtgaaacaaaccaagaacaagttctagaaaactgaagcaacctcttatgtatactagatgcttgatttaggaggagtttttaaacgttttcaatgttattatgtagtaaatgacactattatgaagctactagtcattccataagagtcttaaaggactgctctgtgtaacactgtgactgccgtgtgtgcttagacccgtagtttcctcagtggatagcactcaatttattccgtagtgatattgtaacaatactgccattcccttctactgcactgcccaaggtgtgtgtagcacaaacagttctcattacaaaggaccaattcagaactgaaaagctatgcataggacaaggaagatacatagaatggggtggaacacagcattttgtcaagcactgtgcaatattccatatttttccccactatggtagacaaccatttcgtggaagggcagcctattatcccacactgcatctagccttttgtcccattcacttctgtgatccattttaatttccaggccacaagacagtagtgatgctctgaaatgaaagtttgtcttcacaaatatcaaaacaaaatggaggaaaactaagcattggcctcatgttcagtcttcaggatatcacaccacgtcttttcaaaaactaaagagaattcaaaaagggctgatggtaggctttgaacatggggttggctgtttcccagtaaaactggaattcctgtcgttactgtttccttatcaaagaaggggcaagctcttttgccttttaggccagacatagcaaacgctttataattggcatagacataaaggataaaaggaaaataaccgtctgccgatggtccgtacttcttaaaaaacataggtaatagaaaatatacacaagtcagaatgtgaaattaaataatggtttgaacagaaaattcaaacaagactctttccaatttaaagggccaaaccctaccaaagagagggagttgactggcttttaaaaagtatttaaataccacaaatgacatttaatttcactgtattcagctttaagttgttcacaatgaaaccacactttcaaacaagcaggttcaagctgctgaatagacattatttcttgcattaaaataccactaatgcattctcttgcaacactgccagacatgggattgtcaccatagaattagttggtactatgccatctttcactctttcacaagtcagtgatggaacctgctttatgaccaagattcatcctcaaataagccacatgtacccttctgacaaagctgtgtaaagtattagaatctgatgctctagaaagatcctagttgcctttgtgtatatttactgcctgcttgagtgtttctatgtgtgggttttccctgtatcttgtagaaatgttggggtgttttcctctgccatatggctcgtggcctgcgagccaactatttcagctgtattttaccttcatttttgatgaggtgatttaaattttgtttcactttgtgtagtgaattccacagtagttttctgattgttgttaaaaatgacttaacatattacacagatattcaataaaaatgttttatttcctgtt

SEQ ID NO: 30620 - DNA, 3095 bp, Homo sapiens
  source 1..3095: mol_type = unassigned DNA
atctcggctccaccgcacccttcgcgggaagtccccaggcttccagcaaagctcagcttatcccgcccccgcttccaacccggaaccccagaagaacagcatgatgagcctccggcagccaggtgggccacctccccgcggctcagtttgaggacacttgtgcggaaccctttcacatccccaccctacccagctttcacaactccgccgggttaaatggccaaagacaaacttctacctctcctgtccccggtcccagcttttcaaaaacccacagctggcgaacccacacacatcgaaactcctaggtcgctgttgcagtctgggcatgctcagtatcagggctgcccctccaagagcggaggcagcgagagtacgcgtgtgcctcgcgccggtccacgcggggagagcactggggaccgagacccggcaccacctcccggtccgccctccagggaaaacgggaaaactagcaagagctagcaagaactagcaagagcttgaacaaacgcctggactcagattggaagactgctcatttgtctactgcctcattcctggaaattgcactggaactgtctgattaagaaaaacagaataattctgaaagaaagaaaacaaagaaaaacatactccagaattcctaatagaacacttcacctgaacctaaaatggtgagcgagagtcaccatgaggccctggcagccccgcctgtcaccactgtcgcgactgttctgccaagcaacgccacagagccagccagtcctggagaaggaaaggaagatgcattttctaagctgaaggagaagtttatgaatgagttgcataaaattccattgccaccgtgggccttaattgcaatagccatagtcgcagtccttttagtcctgacctgctgcttttgtatctgtaagaaatgtttgttcaaaaagaaaaacaagaagaagggaaaggaaaaaggagggaagaatgccattaacatgaaagatgtaaaagacttagggaagacgatgaaagatcaggccctcaaggatgatgatgctgaaactggattgacagatggagaagaaaaagaagaacccaaagaagaggagaaactgggaaaacttcagtattcactggattatgatttccaaaataaccagctgctggtagggatcattcaggctgccgaactgcccgccttggacatggggggcacatctgatccttacgtgaaagtgtttctgctacctgataagaagaagaaatttgagacaaaagtccaccgaaaaacccttaatcctgtcttcaatgagcaatttactttcaaggtaccatactcggaattgggtggcaaaaccctagtgatggctgtatatgattttgatcgtttctctaagcatgacatcattggagaatttaaagtccctatgaacacagtggattttggccatgtaactgaggaatggcgtgacctgcaaagtgctgagaaggaagagcaagagaaattgggtgatatctgcttctcccttcgctacgtacctactgctggtaagctgactgttgtcattctggaggcaaagaacctgaagaagatggatgtgggtggcttatccgatccttatgtgaagattcatctgatgcagaatggtaagaggctgaagaagaaaaagacaacaattaaaaagaacacacttaacccctactacaatgagtcattcagctttgaagtaccttttgaacaaatccagaaagtgcaggtggtggtaactgttttggactatgacaagattggcaagaacgatgccatcggcaaagtctttgtgggctacaacagcaccggcgcggagctgcgacactggtcagacatgctggccaaccccaggcgacctattgcccagtggcacaccctgcaggtagaggaggaagttgatgccatgctggccgtcaagaagtaaaggaaagaagaagcctttctgcatttgcccatatagtgctctttagccagtatctgtaaatacctcagtaatatgggtcctttcatttttccagccatgcattcctaacacaattcagtggtacttggaatcctgttttaatttgcacaaatttaaatgtagagagcccctaagtccttcatcataccactgccctccaaatctactcttcttttaagcaatatgatgtgtagatagagcatgaatgaaattatttattgtatcacactgttgtatataccagtatgctaaagatttatttctagtttgtgtatttgtatgttgtaagcgtttcctaatctgtgtatatctagatgtttttaataagatgttctattttaaactatgtaaattgactgagatataggagagctgataatatattatacggtaaatatagtatcgtctgcattccagcaaaaatatcaactcgtaaggcactagtacagttaaactgacatcttaaaggacaacttaaacctgagctttctattgaatcatttgagtaccaagataaacttacaccacatacttggtgggtgaatccaattttgtagaattcctacacaggcaaaatagcatgatctgagcagcagcatccaggctgacctcaaggaagcatagccacaaaacagaatagcacctgtctgtacatatttacaaagctaaaataatggcttcactcttatatttgaggaagcaactgaacaggagtcaatgatttcatattactgcatatagaataacaacaaggtgttccgtgtgtgtgtgtgtgtgtgtgtgtgtgtgtgtgtgcacatttgtttggggatgggggagaagaagctaaggggagaagtcaacatttatgaaatattgcctgactatttaaaaagaaaaaagtagctctccattatcacctttatacaaaatgtacatcctgtgaattctgttccagatttcacacctacaataattccaaaaggtttgcacattagagtttgtaacaaaatattttattatataaaaccaggttagaaggaatgcaggatatttttaacacaacaatctgtgcttattacacaaaattactttgtggtaaacagacagtattgtaatcccatcaaaagatgaaag

SEQ ID NO: 30621 - DNA, 762 bp, Homo sapiens
  source 1..762: mol_type = unassigned DNA
agatgccatgagaactcttaaaaacagagtaacatacttattataagacctattttaaatatttcattctttcctcattttcatgatacctaaattttttgaagactgaaaatgatgagaacttatataaaaagaaaaacagaataattctgaaagaaagaaaacaaagaaaaacatactccagaattcctaatagaacacttcacctgaacctaaaatggtgagcgagagtcaccatgaggccctggcagccccgcctgtcaccactgtcgcgactgttctgccaagcaacgccacagagccagccagtcctggagaaggaaaggaagatgcattttctaagctgaaggagaagtttatgaatgagttgcataaaattccattgccaccgtgggccttaattgcaatagccatagtcgcagtccttttagtcctgacctgctgcttttgtatctgtaagaaatgtttgttcaaaaagaaaaacaagaagaagggaaaggaaaaaggagggaagaatgccattaacatgaaagatgtaaaagacttagggaagacgatgaaagatcaggccctcaaggatgatgatgctgaaactggattgacagatggagaagaaaaagaagaacccaaagaagaggagaaactgggaaaacttcagtattcactggattatgatttccaaaataaccagctgctggtagggatcattcaggctgccgaactgcccgccttggacatggggggcacatctgatccttacgt

SEQ ID NO: 30622 - DNA, 506 bp, Homo sapiens
  source 1..506: mol_type = unassigned DNA
attttggaggaatctttggcattctgaatcatcctcctataacactttcccatccaggccccacccaactaatttttaatcataatttagatctcaacacaaaggctggcacaaagggaaaacgggaaaactagcaagagctagcaagaactagcaagagcttgaacaaacgcctggactcagattggaagactgctcatttgtctactgcctcattcctggaaattgcactggaactgtctgattaagaaaaacagaataattctgaaagaaagaaaacaaagaaaaacatactccagaattcctaatagaacacttcacctgaacctaaaatggtgagcgagagtcaccatgaggccctggcagccccgcctgtcaccactgtcgcgactgttctgccaagcaacgccacagagccagccagtcctggagaaggaaaggaagatgcattttctaagctgaaggagaagtttatgaatgagttgcataaaattccattgccaccg

SEQ ID NO: 30623 - DNA, 710 bp, Homo sapiens
  source 1..710: mol_type = unassigned DNA
aacagaagatgtcagaatgatatgaaaaagttgctcttttgaaatgtttgttcttctagatttttttaaaatgtcagcatgattcatacctattggttcttagcctggagcacccagcacaaccaggaattgaggaagctagagcaggatgtgaataacgaatgggctgcataagcagaagtctatacccagtcaataagcagaagtctatacccagtcagtgtgcagagttgcaggctagcattttcacagattctattattctctctctctcaagggaaaacgggaaaactagcaagagctagcaagaactagcaagagcttgaacaaacgcctggactcagattggaagactgctcatttgtctactgcctcattcctggaaattgcactggaactgtctgattaagaaaaacagaataattctgaaagaaagaaaacaaagaaaaacatactccagaattcctaatagaacacttcacctgaacctaaaatggtgagcgagagtcaccatgaggccctggcagccccgcctgtcaccactgtcgcgactgttctgccaagcaacgccacagagccagccagtcctggagaaggaaaggaagatgcattttctaagctgaaggagaagtttatgaatgagttgcataaaattccattgccaccgtgggccttaattgcaatagccatagtcgcagtccttttagtcc

SEQ ID NO: 30624 - DNA, 579 bp, Homo sapiens
  source 1..579: mol_type = unassigned DNA
ctctctctctcaagggaaaacgggaaaactagcaagagctagcaagaactagcaagagcttgaacaaacgcctggactcagattggaagactgctcatttgtctactgcctcattcctggaaattgcactggaactgtctgattaagcctcctttcactccgtgcccaattcctgcagttgttgctgaggtttaccagatggattaaaagaaaaaataagaagtggctccaaacataaaaacagaataattctgaaagaaagaaaacaaagaaaaacatactccagaattcctaatagaacaatacagaaactgaggtacacagagccatttaccccaggtcaacttcacctgaacctaaaatggtgagcgagagtcaccatgaggccctggcagccccgcctgtcaccactgtcgcgactgttctgccaagcaacgccacagagccagccagtcctggagaaggaaaggaagatgcattttctaagctgaaggagaagtttatgaatgagttgcataaaattccattgccaccgtgggccttaattgcaatagccatagtcgcagtccttttagtcct

SEQ ID NO: 30625 - DNA, 702 bp, Homo sapiens
  source 1..702: mol_type = unassigned DNA
tttaaagaaagatgacggtgtcttaggaatgcttttaagggttctttggttgaaagtctgggaatactcagagataatattaatgagagcctagagtttttttcttttaaaatggggttccatggctttgggcagaaatgatttttatatgtatcatgattgaaaaaactctcagtacaagatgatgcacttctttatacagggaaaacgggaaaactagcaagagctagcaagaactagcaagagcttgaacaaacgcctggactcagattggaagactgctcatttgtctactgcctcattcctggaaattgcactggaactgtctgattaagaaaaacagaataattctgaaagaaagaaaacaaagaaaaacatactccagaattcctaatagaacacttcacctgaacctaaaatggtgagcgagagtcaccatgaggccctggcagccccgcctgtcaccactgtcgcgactgttctgccaagcaacgccacagagccagccagtcctggagaaggaaaggaagatgcattttctaagctgaaggagaagtttatgaatgagttgcataaaattccattgccaccgtgggccttaattgcaatagccatagtcgcagtccttttagtcctgacctgctgcttttgtatctgtaagaaatgtttgttcaaaaagaaaaacaagaagaagggaaagga

SEQ ID NO: 30626 - DNA, 2718 bp, Homo sapiens
  source 1..2718: mol_type = unassigned DNA
atcttggctcctccctgattctaccaccaagaataaaatagttgtttgtcccctacagtagaacaagtttgcccattcatccttgtgatagatatgcatgcaaaaccaaaatgaaatcaaatccccacagatggctcgtaagtcaaaaacactgtttaattctttcactgcatccctttgggaagcctggcccttgaaaaacagaataattctgaaagaaagaaaacaaagaaaaacatactccagaattcctaatagaacacttcacctgaacctaaaatggtgagcgagagtcaccatgaggccctggcagccccgcctgtcaccactgtcgcgactgttctgccaagcaacgccacagagccagccagtcctggagaaggaaaggaagatgcattttctaagctgaaggagaagtttatgaatgagttgcataaaattccattgccaccgtgggccttaattgcaatagccatagtcgcagtccttttagtcctgacctgctgcttttgtatctgtaagaaatgtttgttcaaaaagaaaaacaagaagaagggaaaggaaaaaggagggaagaatgccattaacatgaaagatgtaaaagacttagggaagacgatgaaagatcaggccctcaaggatgatgatgctgaaactggattgacagatggagaagaaaaagaagaacccaaagaagaggagaaactgggaaaacttcagtattcactggattatgatttccaaaataaccagctgctggtagggatcattcaggctgccgaactgcccgccttggacatggggggcacatctgatccttacgtgaaagtgtttctgctacctgataagaagaagaaatttgagacaaaagtccaccgaaaaacccttaatcctgtcttcaatgagcaatttactttcaaggtaccatactcggaattgggtggcaaaaccctagtgatggctgtatatgattttgatcgtttctctaagcatgacatcattggagaatttaaagtccctatgaacacagtggattttggccatgtaactgaggaatggcgtgacctgcaaagtgctgagaaggaagagcaagagaaattgggtgatatctgcttctcccttcgctacgtacctactgctggtaagctgactgttgtcattctggaggcaaagaacctgaagaagatggatgtgggtggcttatccgatccttatgtgaagattcatctgatgcagaatggtaagaggctgaagaagaaaaagacaacaattaaaaagaacacacttaacccctactacaatgagtcattcagctttgaagtaccttttgaacaaatccagaaagtgcaggtggtggtaactgttttggactatgacaagattggcaagaacgatgccatcggcaaagtctttgtgggctacaacagcaccggcgcggagctgcgacactggtcagacatgctggccaaccccaggcgacctattgcccagtggcacaccctgcaggtagaggaggaagttgatgccatgctggccgtcaagaagtaaaggaaagaagaagcctttctgcatttgcccatatagtgctctttagccagtatctgtaaatacctcagtaatatgggtcctttcatttttccagccatgcattcctaacacaattcagtggtacttggaatcctgttttaatttgcacaaatttaaatgtagagagcccctaagtccttcatcataccactgccctccaaatctactcttcttttaagcaatatgatgtgtagatagagcatgaatgaaattatttattgtatcacactgttgtatataccagtatgctaaagatttatttctagtttgtgtatttgtatgttgtaagcgtttcctaatctgtgtatatctagatgtttttaataagatgttctattttaaactatgtaaattgactgagatataggagagctgataatatattatacggtaaatatagtatcgtctgcattccagcaaaaatatcaactcgtaaggcactagtacagttaaactgacatcttaaaggacaacttaaacctgagctttctattgaatcatttgagtaccaagataaacttacaccacatacttggtgggtgaatccaattttgtagaattcctacacaggcaaaatagcatgatctgagcagcagcatccaggctgacctcaaggaagcatagccacaaaacagaatagcacctgtctgtacatatttacaaagctaaaataatggcttcactcttatatttgaggaagcaactgaacaggagtcaatgatttcatattactgcatatagaataacaacaaggtgttccgtgtgtgtgtgtgtgtgtgtgtgtgtgtgtgtgtgcacatttgtttggggatgggggagaagaagctaaggggagaagtcaacatttatgaaatattgcctgactatttaaaaagaaaaaagtagctctccattatcacctttatacaaaatgtacatcctgtgaattctgttccagatttcacacctacaataattccaaaaggtttgcacattagagtttgtaacaaaatattttattatataaaaccaggttagaaggaatgcaggatatttttaacacaacaatctgtgcttattacacaaaattactttgtggtaaacagacagtattgtaatcccatcaaaagatgaaagaaaaacaaaaacaaa

SEQ ID NO: 30627 - DNA, 2913 bp, Homo sapiens
  source 1..2913: mol_type = unassigned DNA
actctatgtctcctctcgttggattgtgacaccgggaggtcagggaactccaggaccttgttctctgctggattcgcagcaaccagcacagcacgtagggcgtagttggtgctggatggatgtttgttgaatgaatgaatgatgaatggctggcaccttgtctgctcatccctaactcctgttccttcatctgtgcagccctaatctttgtttcctcatctgtccatccctttatttgtgcatcctcattcttagccccttcactgcccttctccatctcttcctccttgttcatttgtccctgttctctgtcctctactccactcatgcccatctctgtccccttgacttacccagtccctgctactatctccatccctaatttctgccctcttgtctgtctactcctaattccttttccttgtccatccctaatacctgtcaccttgtccttcttcctcgaatctccatccctaatccatctgcccctaatctctgtcccctttgcccatccttccttttctcggtgtctctttccacccttatctccacacctgcccaccctgcactcccattctgtttcccatctgcacccttgccccatccctcccacacacaggaccagacggccaccatgtcaggagactacgaggatgacctctgccggcgggcactcatcctggtctcggacctctgtgcgcgggtccgagatgctgacaccaacgacaggtgccaggagttcaatgaccgaatccgaggctatccccggggtccagatgcagacatctccgtgagcctgctgtcggtcatcgtgacattctgtggcattgtccttctgggtgtctctctcttcgtgtcctggaagttgtgctgggtgccctggcgggacaagggaggctcggcagtgggcggtggccccctgcgcaaagacctaggccctggtgtcgggctggcaggcctggtaggcggaggcgggcaccacctggcggctggcctgggtggccatcctctgctgggcggcccacaccaccatgcccatgccgcccaccatccaccctttgctgagctgctggagccaggcagcctggggggttctgacacccctgagccctcctacttggacatggactcgtatccagaggctgcagcagcagcagtggccgctggggtcaaaccgagccaaacatcccctgagctgccctctgaggggggagcaggctctgggttgctcctgctgccccccagtggtgggggcttgcccagtgcccagtcacatcagcaggtcacaagcctggcacccactaccaggtacccagccctgccccgacccctcacccagcagactctgacctcccagccggaccccagcagtgaggagcggccacctgccctgcccttacccctgcctggaggcgaggaaaaagccaaactcattgggcagattaagccagagctgtaccaggggactggccctggtggccggcggagcggtgggggcccaggctctggagaggcaggcacaggggcaccctgtggccgtatcagcttcgccctgcggtacctctatggctcggaccagctggtggtgaggatcctgcaggccctggacctccctgccaaggactccaacggcttctcagacccctacgtcaagatctacctgctgcctgaccgcaagaaaaagtttcagaccaaggtgcacaggaagaccctgaaccccgtcttcaatgagacgtttcaattctcggtgcccctggccgagctggcccaacgcaaactgcacttcagcgtctatgactttgaccgcttctcgcggcacgacctcatcggccaggtggtgctggacaacctcctggagctggccgagcagccccctgaccgcccgctctggagggacatcgtggagggcggctcggaaaaagcagatcttggggagctcaacttctcactctgctacctccccacggccgggcgcctcaccgtgaccatcatcaaagcctctaacctcaaagcgatggacctcactggcttctcagacccctacgtgaaggcctccctgatcagcgaggggcggcgtctgaagaagcggaaaacctccatcaagaagaacacgctgaaccccacctataatgaggcgctggtgttcgacgtggcccccgagagcgtggagaacgtggggctcagcatcgccgtggtagactacgactgcatcgggcacaacgaggtgatcggcgtgtgccgtgtgggccccgacgctgccgacccgcacggccgcgagcactgggcagagatgctggccaatccccgcaagcccgtggagcactggcatcagctagtggaggaaaagactgtgaccagcttcacaaaaggcagcaaaggactatcagagaaagagaactccgagtgaggggtctggcctaggcccgggatcggaccaggctccctcaggaccccatcctttcctgcccggaccgtgaattcatctccttgaagccataacgtccgagctgctggtgcggggcagccctggccctaggcttcctaaccctggaagcgagaggatgagaggaggccggcccagctccttctttcagggtgggggtcattcagcctccactgtgtctgtcttttcttccctggggctccccctcgaggcgaggggccatgcatgtctgggggacccctgccccccaaaaccctctgtctgtctctgtctctttgctgtttgtccaagactcagtgtcccgacccttgttctcgccgtgaatgtcaatgggccaatcctctctgtcctttcagacacacacacacctgtgtccaccccttctgttcgccacacccctgcgtctggccggtccccccactgctgctgctatcaacgccagaataaacacactctgtgggtctcactcc

SEQ ID NO: 30628 - DNA, 2838 bp, Homo sapiens
  source 1..2838: mol_type = unassigned DNA
gaggcggcggcggcggcggctcctcgcccagccccgccccggcccctagatcagacattctctctcattacccggcgcgtgggaacgggtccacagccccttgtccgccctagaacccccatgggctgccgcccgccgccgcctcggctgccacccaggacacggcagagataagcgcagccccttcactgcccttctccatctcttcctccttgttcatttgtccctgttctctgtcctctactccactcatgcccatctctgtccccttgacttacccagtccctgctactatctccatccctaatttctgccctcttgtctgtctactcctaattccttttccttgtccatccctaatacctgtcaccttgtccttcttcctcgaatctccatccctaatccatctgcccctaatctctgtcccctttgcccatccttccttttctcggtgtctctttccacccttatctccacacctgcccaccctgcactcccattctgtttcccatctgcacccttgccccatccctcccacacacaggaccagacggccaccatgtcaggagactacgaggatgacctctgccggcgggcactcatcctggtctcggacctctgtgcgcgggtccgagatgctgacaccaacgacaggtgccaggagttcaatgaccgaatccgaggctatccccggggtccagatgcagacatctccgtgagcctgctgtcggtcatcgtgacattctgtggcattgtccttctgggtgtctctctcttcgtgtcctggaagttgtgctgggtgccctggcgggacaagggaggctcggcagtgggcggtggccccctgcgcaaagacctaggccctggtgtcgggctggcaggcctggtaggcggaggcgggcaccacctggcggctggcctgggtggccatcctctgctgggcggcccacaccaccatgcccatgccgcccaccatccaccctttgctgagctgctggagccaggcagcctggggggttctgacacccctgagccctcctacttggacatggactcgtatccagaggctgcagcagcagcagtggccgctggggtcaaaccgagccaaacatcccctgagctgccctctgaggggggagcaggctctgggttgctcctgctgccccccagtggtgggggcttgcccagtgcccagtcacatcagcaggtcacaagcctggcacccactaccaggtacccagccctgccccgacccctcacccagcagactctgacctcccagccggaccccagcagtgaggagcggccacctgccctgcccttacccctgcctggaggcgaggaaaaagccaaactcattgggcagattaagccagagctgtaccaggggactggccctggtggccggcggagcggtgggggcccaggctctggagaggcaggcacaggggcaccctgtggccgtatcagcttcgccctgcggtacctctatggctcggaccagctggtggtgaggatcctgcaggccctggacctccctgccaaggactccaacggcttctcagacccctacgtcaagatctacctgctgcctgaccgcaagaaaaagtttcagaccaaggtgcacaggaagaccctgaaccccgtcttcaatgagacgtttcaattctcggtgcccctggccgagctggcccaacgcaaactgcacttcagcgtctatgactttgaccgcttctcgcggcacgacctcatcggccaggtggtgctggacaacctcctggagctggccgagcagccccctgaccgcccgctctggagggacatcgtggagggcggctcggaaaaagcagatcttggggagctcaacttctcactctgctacctccccacggccgggcgcctcaccgtgaccatcatcaaagcctctaacctcaaagcgatggacctcactggcttctcagacccctacgtgaaggcctccctgatcagcgaggggcggcgtctgaagaagcggaaaacctccatcaagaagaacacgctgaaccccacctataatgaggcgctggtgttcgacgtggcccccgagagcgtggagaacgtggggctcagcatcgccgtggtagactacgactgcatcgggcacaacgaggtgatcggcgtgtgccgtgtgggccccgacgctgccgacccgcacggccgcgagcactgggcagagatgctggccaatccccgcaagcccgtggagcactggcatcagctagtggaggaaaagactgtgaccagcttcacaaaaggcagcaaaggactatcagagaaagagaactccgagtgaggggtctggcctaggcccgggatcggaccaggctccctcaggaccccatcctttcctgcccggaccgtgaattcatctccttgaagccataacgtccgagctgctggtgcggggcagccctggccctaggcttcctaaccctggaagcgagaggatgagaggaggccggcccagctccttctttcagggtgggggtcattcagcctccactgtgtctgtcttttcttccctggggctccccctcgaggcgaggggccatgcatgtctgggggacccctgccccccaaaaccctctgtctgtctctgtctctttgctgtttgtccaagactcagtgtcccgacccttgttctcgccgtgaatgtcaatgggccaatcctctctgtcctttcagacacacacacacctgtgtccaccccttctgttcgccacacccctgcgtctggccggtccccccactgctgctgctatcaacgccagaataaacacactctgtgggtctcactcc

SEQ ID NO: 30629 - DNA, 2836 bp, Homo sapiens
  source 1..2836: mol_type = unassigned DNA
ggcggcggcggcggcagcggcggcagcggcggctccggcccctagatcagacattctctctcattacccggcgcgtgggaacgggtccacagccccttgtccgccctagaacccccatgggctgccgcccgccgccgcctcggctgccacccaggacacggcagagataagcgcagccccttcactgcccttctccatctcttcctccttgttcatttgtccctgttctctgtcctctactccactcatgcccatctctgtccccttgacttacccagtccctgctactatctccatccctaatttctgccctcttgtctgtctactcctaattccttttccttgtccatccctaatacctgtcaccttgtccttcttcctcgaatctccatccctaatccatctgcccctaatctctgtcccctttgcccatccttccttttctcggtgtctctttccacccttatctccacacctgcccaccctgcactcccattctgtttcccatctgcacccttgccccatccctcccacacacaggaccagacggccaccatgtcaggagactacgaggatgacctctgccggcgggcactcatcctggtctcggacctctgtgcgcgggtccgagatgctgacaccaacgacaggtgccaggagttcaatgaccgaatccgaggctatccccggggtccagatgcagacatctccgtgagcctgctgtcggtcatcgtgacattctgtggcattgtccttctgggtgtctctctcttcgtgtcctggaagttgtgctgggtgccctggcgggacaagggaggctcggcagtgggcggtggccccctgcgcaaagacctaggccctggtgtcgggctggcaggcctggtaggcggaggcgggcaccacctggcggctggcctgggtggccatcctctgctgggcggcccacaccaccatgcccatgccgcccaccatccaccctttgctgagctgctggagccaggcagcctggggggttctgacacccctgagccctcctacttggacatggactcgtatccagaggctgcagcagcagcagtggccgctggggtcaaaccgagccaaacatcccctgagctgccctctgaggggggagcaggctctgggttgctcctgctgccccccagtggtgggggcttgcccagtgcccagtcacatcagcaggtcacaagcctggcacccactaccaggtacccagccctgccccgacccctcacccagcagactctgacctcccagccggaccccagcagtgaggagcggccacctgccctgcccttacccctgcctggaggcgaggaaaaagccaaactcattgggcagattaagccagagctgtaccaggggactggccctggtggccggcggagcggtgggggcccaggctctggagaggcaggcacaggggcaccctgtggccgtatcagcttcgccctgcggtacctctatggctcggaccagctggtggtgaggatcctgcaggccctggacctccctgccaaggactccaacggcttctcagacccctacgtcaagatctacctgctgcctgaccgcaagaaaaagtttcagaccaaggtgcacaggaagaccctgaaccccgtcttcaatgagacgtttcaattctcggtgcccctggccgagctggcccaacgcaaactgcacttcagcgtctatgactttgaccgcttctcgcggcacgacctcatcggccaggtggtgctggacaacctcctggagctggccgagcagccccctgaccgcccgctctggagggacatcgtggagggcggctcggaaaaagcagatcttggggagctcaacttctcactctgctacctccccacggccgggcgcctcaccgtgaccatcatcaaagcctctaacctcaaagcgatggacctcactggcttctcagacccctacgtgaaggcctccctgatcagcgaggggcggcgtctgaagaagcggaaaacctccatcaagaagaacacgctgaaccccacctataatgaggcgctggtgttcgacgtggcccccgagagcgtggagaacgtggggctcagcatcgccgtggtagactacgactgcatcgggcacaacgaggtgatcggcgtgtgccgtgtgggccccgacgctgccgacccgcacggccgcgagcactgggcagagatgctggccaatccccgcaagcccgtggagcactggcatcagctagtggaggaaaagactgtgaccagcttcacaaaaggcagcaaaggactatcagagaaagagaactccgagtgaggggtctggcctaggcccgggatcggaccaggctccctcaggaccccatcctttcctgcccggaccgtgaattcatctccttgaagccataacgtccgagctgctggtgcggggcagccctggccctaggcttcctaaccctggaagcgagaggatgagaggaggccggcccagctccttctttcagggtgggggtcattcagcctccactgtgtctgtcttttcttccctggggctccccctcgaggcgaggggccatgcatgtctgggggacccctgccccccaaaaccctctgtctgtctctgtctctttgctgtttgtccaagactcagtgtcccgacccttgttctcgccgtgaatgtcaatgggccaatcctctctgtcctttcagacacacacacacctgtgtccaccccttctgttcgccacacccctgcgtctggccggtccccccactgctgctgctatcaacgccagaataaacacactctgtgggtctcactccaa

SEQ ID NO: 30630 - DNA, 2463 bp, Homo sapiens
  source 1..2463: mol_type = unassigned DNA
ggcggcagcggcggcagcggcggctccggcccctagatcagacattctctctcattacccggcgcgtgggaacgggtccacagccccttgtccgccctagaacccccatgggctgccgcccgccgccgcctcggctgccacccaggacacggcagagataagcgcaggaccagacggccaccatgtcaggagactacgaggatgacctctgccggcgggcactcatcctggtctcggacctctgtgcgcgggtccgagatgctgacaccaacgacaggtgccaggagttcaatgaccgaatccgaggctatccccggggtccagatgcagacatctccgtgagcctgctgtcggtcatcgtgacattctgtggcattgtccttctgggtgtctctctcttcgtgtcctggaagttgtgctgggtgccctggcgggacaagggaggctcggcagtgggcggtggccccctgcgcaaagacctaggccctggtgtcgggctggcaggcctggtaggcggaggcgggcaccacctggcggctggcctgggtggccatcctctgctgggcggcccacaccaccatgcccatgccgcccaccatccaccctttgctgagctgctggagccaggcagcctggggggttctgacacccctgagccctcctacttggacatggactcgtatccagaggctgcagcagcagcagtggccgctggggtcaaaccgagccaaacatcccctgagctgccctctgaggggggagcaggctctgggttgctcctgctgccccccagtggtgggggcttgcccagtgcccagtcacatcagcaggtcacaagcctggcacccactaccaggtacccagccctgccccgacccctcacccagcagactctgacctcccagccggaccccagcagtgaggagcggccacctgccctgcccttacccctgcctggaggcgaggaaaaagccaaactcattgggcagattaagccagagctgtaccaggggactggccctggtggccggcggagcggtgggggcccaggctctggagaggcaggcacaggggcaccctgtggccgtatcagcttcgccctgcggtacctctatggctcggaccagctggtggtgaggatcctgcaggccctggacctccctgccaaggactccaacggcttctcagacccctacgtcaagatctacctgctgcctgaccgcaagaaaaagtttcagaccaaggtgcacaggaagaccctgaaccccgtcttcaatgagacgtttcaattctcggtgcccctggccgagctggcccaacgcaaactgcacttcagcgtctatgactttgaccgcttctcgcggcacgacctcatcggccaggtggtgctggacaacctcctggagctggccgagcagccccctgaccgcccgctctggagggacatcgtggagggcggctcggaaaaagcagatcttggggagctcaacttctcactctgctacctccccacggccgggcgcctcaccgtgaccatcatcaaagcctctaacctcaaagcgatggacctcactggcttctcagacccctacgtgaaggcctccctgatcagcgaggggcggcgtctgaagaagcggaaaacctccatcaagaagaacacgctgaaccccacctataatgaggcgctggtgttcgacgtggcccccgagagcgtggagaacgtggggctcagcatcgccgtggtagactacgactgcatcgggcacaacgaggtgatcggcgtgtgccgtgtgggccccgacgctgccgacccgcacggccgcgagcactgggcagagatgctggccaatccccgcaagcccgtggagcactggcatcagctagtggaggaaaagactgtgaccagcttcacaaaaggcagcaaaggactatcagagaaagagaactccgagtgaggggtctggcctaggcccgggatcggaccaggctccctcaggaccccatcctttcctgcccggaccgtgaattcatctccttgaagccataacgtccgagctgctggtgcggggcagccctggccctaggcttcctaaccctggaagcgagaggatgagaggaggccggcccagctccttctttcagggtgggggtcattcagcctccactgtgtctgtcttttcttccctggggctccccctcgaggcgaggggccatgcatgtctgggggacccctgccccccaaaaccctctgtctgtctctgtctctttgctgtttgtccaagactcagtgtcccgacccttgttctcgccgtgaatgtcaatgggccaatcctctctgtcctttcagacacacacacacctgtgtccaccccttctgttcgccacacccctgcgtctggccggtccccccactgctgctgctatcaacgccagaataaacacactctgtgggtctcactccaa

SEQ ID NO: 30631 - DNA, 4094 bp, Homo sapiens
  source 1..4094: mol_type = unassigned DNA
gatgagcatgtgttgaatcctcaagagaggagggaggaagcaagaaggaaagcttgaagggaggaggggaggggggcaggtgctgatttcagccctgtagcgtcaggattgcgtcaattcgggttccagccacgtctggagtctcggagacgagcttctcagaagagccaaaacaggaaccgaggtggcaaatcactgtgcgagggcgagtggacctccctctttgcctcctccctgttccaggagctggtgccctgggctctgcgctgttgttttcagcgctccgaaagccggcgcttgagatccaggcaagtgaatccagccaggcagttttcccttcagcacctcggacagaacacgcagtaaaaaatggctccgatcaccaccagccgggaagaatttgatgaaatccccacagtggtggggatcttcagtgcatttggcctggtcttcacagtctctctctttgcatggatctgctgtcagagaaaatcatccaagtctaacaagactcctccatacaagtttgtgcatgtgcttaagggagttgatatttaccctgaaaacctaaatagcaaaaagaagtttggagcagatgataaaaatgaagtaaagaataagccagctgtgccaaagaattcattgcatctggatcttgaaaagagagatctcaatggcaattttcccaaaaccaacctcaaacctggcagtccttctgatctggagaatgcaaccccgaagctctttttagaaggggaaaaagagtcagtttcccctgagagtttaaagtccagcacttcccttacttcagaagagaaacaagagaagctgggaactctcttcttctccttagaatacaacttcgagagaaaagcatttgtggtcaatatcaaggaagcccgtggcttgccagccatggatgagcagtcgatgacctctgacccatatatcaaaatgacgatcctcccagagaagaagcataaagtgaaaactagagtgctgagaaaaaccttggatccagcttttgatgagacctttacattctatgggataccctacacccaaatccaagaattggccttgcacttcacaattttgagttttgacaggttttcaagagatgatatcattggggaagttctaattcctctctcgggaattgaattatctgaaggaaaaatgttaatgaatagagagatcatcaagagaaatgttaggaagtcttcaggacggggtgagttactgatctctctctgctatcagtccaccacaaacactctaactgtggttgtcttaaaagctcgacatctgcctaaatctgatgtgtccggactttcagatccctatgtcaaagtgaacctgtaccatgccaaaaagagaatctccaagaagaagactcatgtgaagaaatgcacccccaatgcagtgttcaatgagctgtttgtctttgatattccttgtgagggccttgaagatataagtgttgaatttttggttttggattctgaaagggggtcccgaaatgaggtaatcgggcagttagtcttgggtgcagcagcagaaggaactggtggagagcactggaaagagatctgtgactaccccaggagacaaattgccaagtggcacgtgctctgtgatggttagcatcctagccgtgagttggaacttaaaggtttttactaggcaaggagaaattttctttctttctatattggattgcaagcttgggaaatcaagctacctttttgttgttgttgttgttgctagaaatggattgaattagtagaccagaaagtaacttcaaatgtgtattatgataatttccctatttattagaagagttggataaattttcataagatattcaatatctccttcagattaccagtgatataactaggaatagtcagacattttatgaatactgtgccagaatcccaaattataaatgtgacaatctcattggaacatgtcacaaaaagttaatgtgattaagatttaaaaacgaaaagtatgccttgccttgtgaaaatttatccatttatcttcaggttggggaaatcaatttttctttaaatccaaagatactaaaaaaatgtcctccagtttgtatttattaattctgtcatgtgcaaatggttgtcctgcatataaaagtatctggtcatttcagtttggtttgtaattatttgatgcaattttatcataagagtaactcagattcatttcaaaaggacagtgaacaagctgagaaattattttatcaaagggctgagttgagaacactgtggctgaaatataatttttctcccccctaaggttacatgtgagtcaaaattttgtaaaatataacctcacataagaaccatggccttggattattcactgcctgtcacaagcctcagtgtggcctgagaaatccctatgtacctttgtgaaattgttgaattagttagtgaataaagaaataaacttcaactagaaatccagttagaagtgcaattttcttataggaaataggtatagtgtgcaagtgtacttttaaggccatcgtttgtacccagagtcggcatggccacctaagtcttcatttaatttattgtcccccagaaaagattaagatgctacttgaaaagactgtgaagattttttacattgccagataaaaagtgttacttaaccaacaaacaaatgtaagactacaaaatcgttcaagagcaattctaatataatttacatatgttcacgcaaaatatgcttaggctgtcaaattagcacaacaaagaatgtgtttcactatcttttctaggctaatttgtcttgagctgttgtctatagagcagtttacagacttgtgtcttgtatcattttccagtgccagggttctgaaattcattcagaacctgttagattaaagctgcaccctgtgattatttgaaaagaattagcttgagagtaatgtcactatatttgagttcttagagaagtatgagtggaacttgagtacagttgaattattaaatatgcaagttagaaattaagtctactgaaaaatttacattttgagtcaggttttgtgtcagtactttagcagtttttgagaatgtgtttgatatcacagtgtttgtaaattctatgaaaaatgcattttccaaacaacttatacatgctttttatgactatgcctaatgtaaagaaaatgtattacattctgtatgtacaaagattaaaaatcaacctcttttttgtgctttaaaatgactttgggattaaaaaagcatatttcccaatcattgtcttcattccactacaaagtcacctcacagcatcttgctccactcggcatctctgtgaaagcaacatgaaatgaactgtagtaggtgtgtagtttggggaagtcaaatggccattttatgtatgtgcatttggtatcatgggccgtggaacagaatatatgttggacctctgaaaagttgtaaggggccaattctaagtattcttcacggcagccagaagttaatggtggtagcagctgaggtatggttgttggacgaggccgatttttttttttttaacatggaacaatgaaaccaacaacaaacatttttaaaattaaaatggataatttgtaaatagtttttagcttttaaaatttaaagtgtttttgagtgtgaaaagttgagtaaaactatttgcaactggttttcagaaaagagaaaagaaacaacaaaggaattgaaacaggcagggagatcttaatacctaatttcatcatttctgaaaatgtactgttttagaatgtattacaatatcaatgtgaatatcttgaatcctgttacaaatcctgcactgtattaaacatgtaaattaattgtttgtctgattagccaatctcaccacccaaatggggaggtatacatgtttgaagaactgtgtaactcagtaattgatttgttctgatgttgtaactcaatagaagtgttttggaaggaagcatggtgtgtgagacagtgtctgttcttttgtgccagctctgtatgatgtttgtaagaccatgtttgtaagacatgaataaattgctgcttttgccc

SEQ ID NO: 30632 - DNA, 1513 bp, Homo sapiens
  source 1..1513: mol_type = unassigned DNA
ttcagcgctccgaaagccggcgcttgagatccaggcaagtgaatccagccaggcagttttcccttcagcacctcggacagaacacgcagtaaaaaatggctccgatcaccaccagccgggaagaatttgatgaaatccccacagtggtggggatcttcagtgcatttggcctggtcttcacagtctctctctttgcatggatctgctgtcagagaagaagcataaagtgaaaactagagtgctgagaaaaaccttggatccagcttttgatgagacctttacattctatgggataccctacacccaaatccaagaattggccttgcacttcacaattttgagttttgacaggttttcaagagatgatatcattggggaagttctaattcctctctcgggaattgaattatctgaaggaaaaatgttaatgaatagagagatcatcaagagaaatgttaggaagtcttcaggacggggtgagttactgatctctctctgctatcagtccaccacaaacactctaactgtggttgtcttaaaagctcgacatctgcctaaatctgatgtgtccggactttcagatccctatgtcaaagtgaacctgtaccatgccaaaaagagaatctccaagaagaagactcatgtgaagaaatgcacccccaatgcagtgttcaatgagctgtttgtctttgatattccttgtgagggccttgaagatataagtgttgaatttttggttttggattctgaaagggggtcccgaaatgaggtaatcgggcagttagtcttgggtgcagcagcagaaggaactggtggagagcactggaaagagatctgtgactaccccaggagacaaattgccaagtggcacgtgctctgtgatggttagcatcctagccgtgagttggaacttaaaggtttttactaggcaaggagaaattttctttctttctatattggattgcaagcttgggaaatcaagctacctttttgttgttgttgttgttgctagaaatggattgaattagtagaccagaaagtaacttcaaatgtgtattatgataatttccctatttattagaagagttggataaattttcataagatattcaatatctccttcagattaccagtgatataactaggaatagtcagacattttatgaatactgtgccagaatcccaaattataaatgtgacaatctcattggaacatgtcacaaaaagttaatgtgattaagatttaaaaacgaaaagtatgccttgccttgtgaaaatttatccatttatcttcaggttggggaaatcaatttttctttaaatccaaagatactaaaaaaatgtcctccagtttgtatttattaattctgtcatgtgcaaatggttgtcctgcatataaaagtatctggtcatttcagtttggtttgtaattatttgatgcaattttatcataagagtaactcagattcatttcaaaaggacagtgaacaagctgagaaattattttatcaaa

SEQ ID NO: 30633 - DNA, 3955 bp, Homo sapiens
  source 1..3955: mol_type = unassigned DNA
cggagggaccgggcgggagagagagaaagcctgaccgaccggctggcgaagagctgcatgcaaccggtgggaggccgggccggctgggtctggggctcgggctcaggctcgcaccgtttctcggcaggtccctggcggtgagcgcggacggcccggaggcggcggctctgagctggcaggcggagggctgtctcctgcgcccgcctgcccggcgcggtccgaggatgcgggggggcgatgcccggggccagggacgcgctctgtcaccaggcgctgcagctgctggccgagctctgtgcccgtggggccctggagcacgacagctgccaggatttcatttaccacctgcgggaccgtgccagaccccggctccgcgacccagatatctcagtgagcctgctgacccttgtggtcactgcctgtggtctcgctctctttggcgtgtctctcttcgtatcttggaaactctgctgggttccgtggcgagaacgaggcctgccctctggtagcaaagacaacaaccaggagccccttaactacatggacacagagaccaatgagcaggagaacagtgaggacttcctagatcctcccacgccctgccctgactcctccatgaagatcagccacacctcccctgacattcccctctccacccagacggggatccaggagaactgtgcccatggcgtccgcgtgcagcgccaagtcacagagccaacctcgtcggcccggcataattcaatccgaagacaactcaacttgtcaaacccggacttcaatatccagcagcttcaaaaacaggaacagttgactggaattggtagaattaaaccagagttatataagcagaggtcattggataatgatgacgggagacggagtaacagcaaggcttgtgggaaactgaacttcattttaaaatatgactgtgacttagagcagctcatagtgaagattcacaaagctgtcaatttgcccgccaaggacttttctgggacttcagatccttatgtcaagatctatttgcttcctgatcggaaaacaaaacaccagactaaagttcacagaaagaccctgaaccctgtgtttgatgaagtgtttttatttccggttccctacaatgaccttgaagcacggaagcttcacttctctgtgtacgactttgacaggttctctcgtcatgacttaatcggccaagtggtggtggatcacttcctagacttggctgatttccccagggagtgcatcctttggaaggatatcgaatatgtcaccaatgacaacgtggatctgggagagctgatgttttccctgtgctatcttccaacggctggcaggctgaccattaccattataaaagcaaggaatttaaaggcaatggacataacaggagcatcagatccctatgtgaaagtctcgctgatgtgtgatggcagacgactgaagaagaggaaaacatccaccaagaggaacaccttgaatcctgtttacaacgaagccatagtctttgatgtccctcccgagaacattgaccaaatccacttgtccatagcagtcatggactatgaccgtgtaggtcacaatgagatcatcggcgtgtgtcaagtaggcaacgaggctgagaggctgggcagagaccactggagtgaaatgttgtcatatcctcggaagcccattgcacactggcattccctggtggagaaacgatgaccatgggtaagaggactgcttgtgccaaggacaaaataggacaaccatctcacaaagatcttaagtaactttttccatccagcaacatccagacgatttcagtgaccaaatgctcagctgtaaccacagcactaactggccttctttccagattgggtttggtgaacctgaatggtccagccaccttctgcaggtggcccaaggtgatgtgctgcagggaagcatgtctctcatgccaagaaccaagatcggactatgaacaaaaacaaatgatagatatagtgacagtaccaagagtaccaggactcaatgtttcatatgaagcccttggtgatgaggacatagcatctgccctggaaatcgttattccaacataatattattttctagaatgccctggaaggacagaatatttaaaaatatatccaggtgctaaataggcagcagatctcaattcacacatgactacctttgagctaatgactgtctccagaaaataactgtgccccaagaagtgctccagatttgcaaggaatagccccaagagaataccaagacaagcaggctgttccctggaaaaaatctaatgcaaggagggctagttcacagcaaattcactgcctcctcccatgcacgtggtagagagtaccagtatcaacatggccctgttttctgctaaaaccagattttgaggaatcagagacccccaacactactcactcagtagctagcagccccttcctttcaactgggagtgttattagaatgaaaagtaattagttagaagggcatacatctcagtggcatgagcattgtggaatatcctttcctaggcacattcgtccactaagggaacagcctcagaaactggtacagcaatgggtgagatgagatcatggagagagaacacagccatcccctatagaaaggcacagcttttgggcttctctggcctgaatgccttctggggtatttccatatgcaacagcccagagtcatagccttgggcaaccacacatagaggtttccttctcacttcagacacatacatcactttcacaccacttggggatggaaatacctacaagagtgaaggtcaagggccctccccaggcatctcattcattactcagcttccttcctgaccaagtctgccaaccaatggccagctatgcgcctcatcctcattgcttctgcctccacgtaaatgaaaccaaaggcctcagcatatcctgggaggactgggggctgttacctaatggtcctctctgtcccattataggtgcaaggcaccccatccacacatttgcaccactactccaagatagtatttttcttttcacacaatctctttacagcagaatccagagttggattgtagtttaccttcctggaaagctcattatctctgtttgaattaacatttcagcatggaactaactgggcggaggaaggatcgttatacgtcttcagaaagttctcattgccccagctgcctagtactatacaagaagctctactttgatggcagatctaagaaggctataggcctttgtttgtaggaagcagtgtcattacattcaagcttcacttctctgattggcttccaaccactgggattcaaagagaatccaaggttctgcctatgtctgatgacataaggaaaacttggcttcctctgctcaaggttcccctctgctcatccctcctcattcagacatcctccaccataccagtgtttagaagcaaaacatgaagggctagcgccaccaggatagttagcagaaatattgtctgtaaagctaggcagatgagcccagaagaatggtcccagagaaagcagactggctccaatagatatcaggcagcaatcccaataaattctgacatgtccttggcaatggaagcctgggttggagatcctgaggcagctgtgcctactgttccccacctcagaagcttcctgcccagagagccagcagccttgggatactaatgaggatgcaactggcttattggtatgaaatagaaggtggctttgtaggggcaagcaggcaaagagtactatccacatggcaggcaggtggctttgtgtctggaaagctttgcctagccagtacagctgtgagcagaggctggttataaatttgaactccctcagcccatttgcaactctgcctctgttctcttgcattctgtttggttgccctttagtttcctagtaaatgctccttttgaaaaa

SEQ ID NO: 30634 - DNA, 960 bp, Homo sapiens
  source 1..960: mol_type = unassigned DNA
atgctggcgaaggtggtggagggagatttagctttcaaaggaggcagagatatctcagtgagcctgctgacccttgtggtcactgcctgtggtctcgctctctttggcgtgtctctcttcgtatcttggaaactctgctgggttccgtggcgagaacgaggcctgccctctggtagcaaagacaacaaccaggagccccttaactacatggacacagagaccaatgagcaggagaacagtgaggacttcctagatcctcccacgccctgccctgactcctccatgaagatcagccacacctcccctgacattcccctctccacccagacggggatccaggagaactgtgcccatggcgtccgcgtgcagcgccaagtcacagagccaacctcgtcggcccggcataattcaatccgaagacaactcaacttgtcaaacccggacttcaatatccagcagcttcaaaaacaggaacagttgactggaattggtagaattaaaccagagttatataagcagaggtcattggataatgatgacgggagacggagtaacagcaaggcttgtgggaaactgaacttcattttaaaatatgactgtgacttagagcagctcatagtgaagattcacaaagctgtcaatttgcccgccaaggacttttctgggacttcagatccttatgtcaagatctatttgcttcctgatcggaaaacaaaacaccagactaaagttcacagaaagaccctgaaccctgtgtttgatgaagtgtttttatttccggttccctacaatgaccttgaagcacggaagcttcacttctctgtgtacgactttgacaggttctctcgtcatgacttaatcggccaagtggtggtggatcacttcctagacttggctgatttccccagggagtgcatcctttggaaggatatcgaatatgtcaccaatattcttagctag

SEQ ID NO: 30635 - DNA, 1825 bp, Homo sapiens
  source 1..1825: mol_type = unassigned DNA
tttccgcctacccgagaccaaatacgggcacacacaatacacaccacacacgcgcgcacacgcacacgggcacacacgcgcgcacgggatcctgctccgctccgcggctcccccgccccggagagctccgcgatcagcacccgggacagcgccaccgcccacgtgcagggggtggggtccgggcggggctggcgcctcggcgtctcccgggagtgtcccgtccagccgccgagcagggtgcttgagtgtctctgcagaaaagactccaggaccccgccaccatgttcccggagcccccaaccccggggcctccatcgcccgacacgcctcccgactccagtcgcatcagccacggcccagtgcccccctgggccctggccaccatcgtgctggtctcaggcctcctcatcttcagctgctgtttctgtctctaccggaagagctgtcggaggcggacaggcaagaagagccaggcccaagcccaggtccaccttcaggaagtgaaggggctgggccagagttacatagacaaggtgcagccagaagtagaggagctggagccagcaccatccgggccagggcagcaggtggcagacaagcatgagctaggacgactgcagtactccctggattatgacttccagagtggccagctgctggtgggcattctgcaagcaatgggattggcagccttggatcttggtggctcctcggacccctatgtgcgggtctacctgctgccggacaaacggaggcggtacgagaccaaggtgcatcggcagacgctgaaccctcactttggggagaccttcgccttcaaggtcccctacgtggagctggggggcagggtgctggtcatggcggtgtacgacttcgaccgcttctctcgcaatgacgccatcggggaggtgcgggtccctatgagctccgtggacctggggcggccagtgcaggcctggcgggagctgcaggcggctccgcgggaggagcaggagaagcttggggacatctgcttctccctccgctatgtccccacggccgggaagctcaccgtcatcgtcctggaggctaaaaacctgaagaagatggacgtaggaggactgtcagatccatacgtcaaggtccacctgctgcagggcggcaaaaaggtgcggaagaagaaaaccaccatcaagaagaacactctgaacccctattacaacgaagctttcagcttcgaggtgccctgtgaccaagtccagaaggtgcaggtggagctgaccgtgctggactacgacaagctgggcaagaacgaggccatcgggagggtggccgtgggggcggccgccggcggggctggcctgcggcactgggcggacatgctggccaacccgcggcggcccattgcccagtggcactcgctgcggcccccggaccgagtgaggctgctgcctgcgccctgactcccaccccaagcccccggccaagcctggactctagcccctgaccccagactcccgagaccggccaaagccaagccagccccacccttaagcttcctctgacggttaccctccccccaccttccaccccaaccatctgaaccattcctgtcttctcacccccaacgatgccaatcacgacaactttccagcacactcccccgaccctcgcggacacacccagatgccccagggaccccgggaagggaaggcagcctggtttctcctgcccccgggtcctgccccctgctttgacaatcagccatcctcgtctgctctcctctctcttccaacacagcccatccctgcactgctcctggggccaaataaatattcagcagctc

SEQ ID NO: 30636 - DNA, 2612 bp, Homo sapiens
  source 1..2612: mol_type = unassigned DNA
gggacccccgccctcagcccatccgcatccgcatccctagaggaaaggggtgtgcgagtgggggctggggcactggggagacaaccagagggagggcagcagcctgaagcggagagacagggatctggggacgcgagacaggtatggagaagacaaagagccgagggcggggagtggggcgcaggcggaggggagagggagagaccctggagacagaggccaggcgatagggaagagagacaggcgggttggggaggcagacacagggaagacgcctatgtggggtcaagaggcagcgtggagaccgaggcggtcacgagagcagcacggatgcgtggagagaccaacaggccaagaaggatgagggggctcagcacaggcaccgggcagcccccgacccgccctccagcaaaattggggagagggaagagggaacctgcgtctcagctcccaggaccaggtgcggagggagcagtcggctgtgggcgctcggaccacaggctgcccgctccccacctcgcgggacctcaggatcccagtcgggctattggggggttcccaggcaccggtgggccccggagcgagcctgccccgccgggactccgcgtctgtgcgtcagccccgcccgttgtcctggcaacaacccgttgcccgggcaaccagctttgctctcaccccgcttgagaggagcccggctgttgctctgggcaacgcggtctgctggttcccacgtctgccttcgcccgcttccggttcagaccctgcggaggggcgaggacgaggcagaagtcagcgggatgcctgtggggccgtggaggaagagggtatccctttaggatggaactaggtcctggacaccccctctcaagtgcggggaggctgatactacaactcccagcatgactcgcggtggctgtccggtttctgcgcggctgttcgcgcaaaggcctcatgggagttggagttctttgttgtgcgtggggctcaaaggacgtctggggtgggaatgggggactagggtgcttgagtgtctctgcagaaaagactccaggaccccgccaccatgttcccggagcccccaaccccggggcctccatcgcccgacacgcctcccgactccagtcgcatcagccacggcccagtgcccccctgggccctggccaccatcgtgctggtctcaggcctcctcatcttcagctgctgtttctgtctctaccggaagagctgtcggaggcggacaggcaagaagagccaggcccaagcccaggtccaccttcaggaagtgaaggggctgggccagagttacatagacaaggtgcagccagaagtagaggagctggagccagcaccatccgggccagggcagcaggtggcagacaagcatgagctaggacgactgcagtactccctggattatgacttccagagtggccagctgctggtgggcattctgcaagcaatgggattggcagccttggatcttggtggctcctcggacccctatgtgcgggtctacctgctgccggacaaacggaggcggtacgagaccaaggtgcatcggcagacgctgaaccctcactttggggagaccttcgccttcaaggtcccctacgtggagctggggggcagggtgctggtcatggcggtgtacgacttcgaccgcttctctcgcaatgacgccatcggggaggtgcgggtccctatgagctccgtggacctggggcggccagtgcaggcctggcgggagctgcaggcggctccgcgggaggagcaggagaagcttggggacatctgcttctccctccgctatgtccccacggccgggaagctcaccgtcatcgtcctggaggctaaaaacctgaagaagatggacgtaggaggactgtcagatccatacgtcaaggtccacctgctgcagggcggcaaaaaggtgcggaagaagaaaaccaccatcaagaagaacactctgaacccctattacaacgaagctttcagcttcgaggtgccctgtgaccaagtccagaaggtgcaggtggagctgaccgtgctggactacgacaagctgggcaagaacgaggccatcgggagggtggccgtgggggcggccgccggcggggctggcctgcggcactgggcggacatgctggccaacccgcggcggcccattgcccagtggcactcgctgcggcccccggaccgagtgaggctgctgcctgcgccctgactcccaccccaagcccccggccaagcctggactctagcccctgaccccagactcccgagaccggccaaagccaagccagccccacccttaagcttcctctgacggttaccctccccccaccttccaccccaaccatctgaaccattcctgtcttctcacccccaacgatgccaatcacgacaactttccagcacactcccccgaccctcgcggacacacccagatgccccagggaccccgggaagggaaggcagcctggtttctcctgcccccgggtcctgccccctgctttgacaatcagccatcctcgtctgctctcctctctcttccaacacagcccatccctgcactgctcctggggccaaataaatattcagcagctccggtg

SEQ ID NO: 30637 - DNA, 1671 bp, Homo sapiens
  source 1..1671: mol_type = unassigned DNA
ggtctgctggttcccacgtctgccttcgcccgcttccggttcagaccctgcggaggggcgaggacgaggcagaagtcagcgggatgcctgtggggccgtggaggaagagggtatccctttaggatggaactaggtcctggacaccccctctcaagtgcggggaggctgatactacaactcccagcatgactcgcggtggctgtccggtttctgcgcggctgttcgcgcaaaggcctcatgggagttggagttctttgttgtgcgtggggctcaaaggacgtctggggtgggaatgggggactagggtgcttgagtgtctctgcagaaaagactccaggaccccgccaccatgttcccggagcccccaaccccggggcctccatcgcccgacacgcctcccgactccagtcgcatcagccacggcccaggtgcagccagaagtagaggagctggagccagcaccatccgggccagggcagcaggtggcagacaagcatgagctaggacgactgcagtactccctggattatgacttccagagtggccagctgctggtgggcattctgcaagcaatgggattggcagccttggatcttggtggctcctcggacccctatgtgcgggtctacctgctgccggacaaacggaggcggtacgagaccaaggtgcatcggcagacgctgaaccctcactttggggagaccttcgccttcaaggtcccctacgtggagctggggggcagggtgctggtcatggcggtgtacgacttcgaccgcttctctcgcaatgacgccatcggggaggtgcgggtccctatgagctccgtggacctggggcggccagtgcaggcctggcgggagctgcaggcggctccgcgggaggaggagaagcttggggacatctgcttctccctccgctatgtccccacggccgggaagctcaccgtcatcgtcctggaggctaaaaacctgaagaagatggacgtaggaggactgtcagatccatacgtcaaggtccacctgctgcagggcggcaaaaaggtgcggaagaagaaaaccaccatcaagaagaacactctgaacccctattacaacgaagctttcagcttcgaggtgccctgtgaccaagtccagaaggtgcaggtggagctgaccgtgctggactacgacaagctgggcaagaacgaggccatcgggagggtggccgtgggggcggccgccggcggggctggcctgcggcactgggcggacatgctggccaacccgcggcggcccattgcccagtggcactcgctgcggcccccggaccgagtgaggctgctgcctgcgccctgactcccaccccaagcccccggccaagcctggactctagcccctgaccccagactcccgagaccggccaaagccaagccagccccacccttaagcttcctctgacggttaccctccccccaccttccaccccaaccatctgaaccattcctgtcttctcacccccaacgatgccaatcacgacaactttccagcacactcccccgaccctcgcggacacacccagatgccccagggaccccgggaagggaaggcagcctggtttctcctgcccccgggtcctgccccctgctttgacaatcagccatcctcgtctgctctcctctctcttccaacacag

SEQ ID NO: 30638 - DNA, 1705 bp, Homo sapiens
  source 1..1705: mol_type = unassigned DNA
ggggaccctgcggggaagtgattaaaagcagagcggagccgcagggggccgctgcagggagggtcttcttggggccgtcgtgccccgccccagtgcggccggggcgcgggttcgagctgctgctcggcaagcctgggtgtctagggcatgagcggagtgtggggggccggcgggcctcggtgccaggaggcgctcgcggtcctcgcctcgctgtgccgggcccggccgccccctctcgggctggacgtggagacttgtcggagcttcgagctgcagcccccagagcggagtcccagcgcggcaggcgcaggcacctctgtcagcctcctcgcagttgtagttattgtgtgtggcgtggccctggtggcagtttttctctttctcttttggaagctgtgctggatgccctggaggaacaaggaggcctccagtccctcttctgctaatccccccttggaagccctccagagccccagcttcagaggcaacatggcggacaagctgaaggaccccagcaccctgggcttcctggaggcggccgtgaagatcagccacacgtccccagatatcccagctgaggtgcagatgtcggtcaaggagcacatcatgcgtcacacccggctgcagcggcaaactacagagccagcgtcatccaccaggcacacgtccttcaagcgccacctgccaaggcagatgcatgtctccagtgtagactatggcaatgagcttccaccagcagcagagcagcccaccagcattggccgcatcaagcctgagctctacaagcagaagtcggtggatggggaggatgccaagtctgaggccaccaagagctgcgggaagatcaacttcagcctacgctacgattacgagaccgagaccctgattgtgcgtatcctgaaggcttttgacctccctgccaaggacttttgtggaagctctgacccttatgtcaagatctacctcctgcctgaccgcaaatgcaagctgcagacccgggtgcaccgcaagaccctgaaccccacctttgatgagaacttccacttccctgtgccctatgaggagctggctgaccgcaagctgcatctcagtgtcttcgactttgaccgcttctcccgccatgacatgattggcgaggtcatcctggacaacctctttgaggcctctgacctgtctcgggaaacctccatctggaaggatatccaatatgccacaagtgaaagcgtggacttgggagagatcatgttctccctttgctacctgcccactgcaggcaggctcaccctcacagtgattaagtgtcggaacctcaaggcgatggacatcacaggctattcagatccctatgtgaaagtgtccttgctctgtgatgggcggaggctgaagaagaagaaaacaaccataaagaaaaacactctcaatcctgtctacaatgaggccatcatctttgacattcccccggaaaacatggatcaagtcagcctgctcatctcagtcatggactatgatcgagtgggccacaatgagatcataggagtctgtcgtgtggggatcactgctgaaggcctgggcagggaccactggaacgagatgctggcatacccccggaagcccatcgcacactggcactccttggtggaggtaaagaaatccttcaaagagggaaaccctcggttgtgatttcattcacgtggatgctgcaagc

SEQ ID NO: 30639 - DNA, 3133 bp, Homo sapiens
  source 1..3133: mol_type = unassigned DNA
aaggaccaggacgccggggttccaggagactctgcaggctccatccctccttattcccccaccccgaccccagtagcgctgggcctaggagcactcgggagttgctcagtggctctgcaccgctggcgcgggaaggggagaaaggggctgccagaggcgggaatttggtccccacgcgctgctccagggacgagaagccagggaccggcggttctgggagcagctgtgctggatgccctggaggaacaaggaggcctccagtccctcttctgctaatccccccttggaagccctccagagccccagcttcagaggcaacatggcggacaagctgaaggaccccagcaccctgggcttcctggaggcggccgtgaagatcagccacacgtccccagatatcccagctgaggtgcagatgtcggtcaaggagcacatcatgcgtcacacccggctgcagcggcaaactacagagccagcgtcatccaccaggcacacgtccttcaagcgccacctgccaaggcagatgcatgtctccagtgtagactatggcaatgagcttccaccagcagcagagcagcccaccagcattggccgcatcaagcctgagctctacaagcagaagtcggtggatggggaggatgccaagtctgaggccaccaagagctgcgggaagatcaacttcagcctacgctacgattacgagaccgagaccctgattgtgcgtatcctgaaggcttttgacctccctgccaaggacttttgtggaagctctgacccttatgtcaagatctacctcctgcctgaccgcaaatgcaagctgcagacccgggtgcaccgcaagaccctgaaccccacctttgatgagaacttccacttccctgtgccctatgaggagctggctgaccgcaagctgcatctcagtgtcttcgactttgaccgcttctcccgccatgacatgattggcgaggtcatcctggacaacctctttgaggcctctgacctgtctcgggaaacctccatctggaaggatatccaatatgccacaagtgaaagcgtggacttgggagagatcatgttctccctttgctacctgcccactgcaggcaggctcaccctcacagtgattaagtgtcggaacctcaaggcgatggacatcacaggctattcagatccctatgtgaaagtgtccttgctctgtgatgggcggaggctgaagaagaagaaaacaaccataaagaaaaacactctcaatcctgtctacaatgaggccatcatctttgacattcccccggaaaacatggatcaagtcagcctgctcatctcagtcatggactatgatcgagtgggccacaatgagatcataggagtctgtcgtgtggggatcactgctgaaggcctgggcagggaccactggaacgagatgctggcatacccccggaagcccatcgcacactggcactccttggtggaggtaaagaaatccttcaaagagggaaaccctcggttgtgatttcattcacgtggatgctgcaagcagagagactgccacctggagttaggatggcagggccgagctgctagcttcgacagtgagagctcgtgcccatctccgaaaccacctccaacaccatgagatgtgcagccaaataacacaaatgggactcagcaatgttctctttgcacttgttcaaccgtctaaacagtgttgtgcagtcgcagtggcggcagcagcggcagccgtccgtcactccagagtcttacctgctcctgtgtaggtcaaagctgagacacttgtcatgtggtcagatctgtcttagtcttttgtgtctcccaaggtgatgtttttgtggtttttcactttttatgggtctgctggtaagaaaagggaaaaaaaaaaagagtaggaaaagacaaagggtggaaagcccagaagttggttctagaaaatacaaggtacagttttttggaaagaggtggattgagtttctgaaatgctgcgtctccagcaagctccacaaccctggaaaaggaggaggcgtggtgggactgcggctgcattttcagtgccctgcaggaatggggtgaatccatggaagagcctttgtgaggtgaattactagtctttgaagctcttcgctggcaggacataaaccacgctgggaccctcagtcccgtgttgaaatcacaagacctctgaggcgcttgtgagccttcagctgatgtgcagggttcctcgctccccttcctcgctggctttccccatgaattgaaaacgtcttgattcctcatgggaacttagtcactttctttaggaatgattcagttcagccgaaactaaacacgccatatgttttctgatgcgccacagttaatgatcacatttgtttgaaaacaggatctttgtcctcagaaataatcttgattgtaaagtaagagagaaacatatgttctggaatgatttctgcattatacatagctttataattccatgaagtatcaagctgctgtttaaaatgcctaaacagattaaagaaaaacctagattaaatgttcttttccaaatggggagttttgaaatccaaatagcagtttgagtccatctttctatgaagagtatgtttttgattgaaaccgagtcagcgtaagcctatttcagcccctttggctctttgacaatattcatcttaaactttagttctataaattactaagtacttcagtgttgtttgtttcagtggttgtgagggtttcttgtttcctttagatctttaccttaggccaaactcagtttaggaaaaaaaaaattgtttgaactattctgtgttgtaatagcacatttctgttgagttaatagtggtcttcccaccaacccctaaaaccaggttgatttgctcaatctcagtttgtataaccccagtaagcgcatggaggtgagtttctacttcgacttgtggcgacacagtgccagtttcctgagctgtgtgtactacttgcaagaggcaagtctgctgaagaaccccttcttttaacagtggaaaatcaagaacagaaaatctgttcacacacctgtgtcttattctttatatatgctacatggtagaggagcagcgaccaataaagtatccctcatttt

SEQ ID NO: 30640 - DNA, 4370 bp, Homo sapiens
  source 1..4370: mol_type = unassigned DNA
tggggccgtcgtgccccgccccagtgcggccggggcgcgggttcgagctgctgctcggcaagcctgggtgtctagggcatgagcggagtgtggggggccggcgggcctcggtgccaggaggcgctcgcggtcctcgcctcgctgtgccgggcccggccgccccctctcgggctggacgtggagacttgtcggagcttcgagctgcagcccccagagcggagtcccagcgcggcaggcgcagctgtgctggatgccctggaggaacaaggaggcctccagtccctcttctgctaatccccccttggaagccctccagagccccagcttcagaggcaacatggcggacaagctgaaggaccccagcaccctgggcttcctggaggcggccgtgaagatcagccacacgtccccagatatcccagctgaggtgcagatgtcggtcaaggagcacatcatgcgtcacacccggctgcagcggcaaactacagagccagcgtcatccaccaggcacacgtccttcaagcgccacctgccaaggcagatgcatgtctccagtgtagactatggcaatgagcttccaccagcagcagagcagcccaccagcattggccgcatcaagcctgagctctacaagcagaagtcggtggatggggaggatgccaagtctgaggccaccaagagctgcgggaagatcaacttcagcctacgctacgattacgagaccgagaccctgattgtgcgtatcctgaaggcttttgacctccctgccaaggacttttgtggaagctctgacccttatgtcaagatctacctcctgcctgaccgcaaatgcaagctgcagacccgggtgcaccgcaagaccctgaaccccacctttgatgagaacttccacttccctgtgccctatgaggagctggctgaccgcaagctgcatctcagtgtcttcgactttgaccgcttctcccgccatgacatgattggcgaggtcatcctggacaacctctttgaggcctctgacctgtctcgggaaacctccatctggaaggatatccaatatgccacaagtgaaagcgtggacttgggagagatcatgttctccctttgctacctgcccactgcaggcaggctcaccctcacagtgattaagtgtcggaacctcaaggcgatggacatcacaggctattcagatccctatgtgaaagtgtccttgctctgtgatgggcggaggctgaagaagaagaaaacaaccataaagaaaaacactctcaatcctgtctacaatgaggccatcatctttgacattcccccggaaaacatggatcaagtcagcctgctcatctcagtcatggactatgatcgagtgggccacaatgagatcataggagtctgtcgtgtggggatcactgctgaaggcctgggcagggaccactggaacgagatgctggcatacccccggaagcccatcgcacactggcactccttggtggaggtaaagaaatccttcaaagagggaaaccctcggttgtgatttcattcacgtggatgctgcaagcagagagactgccacctggagttaggatggcagggccgagctgctagcttcgacagtgagagctcgtgcccatctccgaaaccacctccaacaccatgagatgtgcagccaaataacacaaatgggactcagcaatgttctctttgcacttgttcaaccgtctaaacagtgttgtgcagtcgcagtggcggcagcagcggcagccgtccgtcactccagagtcttacctgctcctgtgtaggtcaaagctgagacacttgtcatgtggtcagatctgtcttagtcttttgtgtctcccaaggtgatgtttttgtggtttttcactttttatgggtctgctggtaagaaaagggaaaaaaaaaaagagtaggaaaagacaaagggtggaaagcccagaagttggttctagaaaatacaaggtacagttttttggaaagaggtggattgagtttctgaaatgctgcgtctccagcaagctccacaaccctggaaaaggaggaggcgtggtgggactgcggctgcattttcagtgccctgcaggaatggggtgaatccatggaagagcctttgtgaggtgaattactagtctttgaagctcttcgctggcaggacataaaccacgctgggaccctcagtcccgtgttgaaatcacaagacctctgaggcgcttgtgagccttcagctgatgtgcagggttcctcgctccccttcctcgctggctttccccatgaattgaaaacgtcttgattcctcatgggaacttagtcactttctttaggaatgattcagttcagccgaaactaaacacgccatatgttttctgatgcgccacagttaatgatcacatttgtttgaaaacaggatctttgtcctcagaaataatcttgattgtaaagtaagagagaaacatatgttctggaatgatttctgcattatacatagctttataattccatgaagtatcaagctgctgtttaaaatgcctaaacagattaaagaaaaacctagattaaatgttcttttccaaatggggagttttgaaatccaaatagcagtttgagtccatctttctatgaagagtatgtttttgattgaaaccgagtcagcgtaagcctatttcagcccctttggctctttgacaatattcatcttaaactttagttctataaattactaagtacttcagtgttgtttgtttcagtggttgtgagggtttcttgtttcctttagatctttaccttaggccaaactcagtttaggaaaaaaaaaattgtttgaactattctgtgttgtaatagcacatttctgttgagttaatagtggtcttcccaccaacccctaaaaccaggttgatttgctcaatctcagtttgtataaccccagtaagcgcatggaggtgagtttctacttcgacttgtggcgacacagtgccagtttcctgagctgtgtgtactacttgcaagaggcaagtctgctgaagaaccccttcttttaacagtggaaaatcaagaacagaaaatctgttcacacacctgtgtcttattctttatatatgctacatggtagaggagcagcgaccaataaagtatccctcattttaaaccaagttgtcagatttctctgctgatagaacgctgcatagtatcttctagccctaaaaatgaccaggttgggcatgagttaacaggatattgtggcaaaaggaattttctgcttagaaaagtaaatgtagataaacctaaactccaccctgtactgagccttaggctagggactcatgtgtaaagatgacttttctccccagatatcttgtcattgacaggccttcctagtctggtagtcctacatttgggtgttctcctgagagtgagaaaaaacccaaggtcatgacaagattcctggcaggtgacagacttcattatgattctgactctagactgaccccatcaagatagtcgtttccgtcagtgaacagatgctgaaggccttgccattacaaaggagacaactgagttccctgggtcataaggagtccagaaattagtgtgagaaggtccttctggaagtgaactcaaaattcatgtccagctgtcatcgttaaacccttaggcaggtgagtataacccattctaacctcttggagaagggagtgtgatcaatgtgaatcacaatagtattgctcatctgagacattcctcttatatccaagcagctatctcccatgagtgaacatcccagtggtttcagaaaatcatgtcctgaacagattctagccagccccacaccaccctggccaactgcaaccgctgctgctctagcagtctgggtcaattcctacaggcttgggagcccaccccagggaggcttttatctcctgcagcctcatccccagcaccctcaaggtagactactcctcagcctgaatcatgaatgaaacctgaacatctgccaacttcattatctagcccagtatctcttccctcacagagaagaagaaaatgaaatacaaagttgatccatttgttggctttctctggccggagaaacctctcgggttgttgctgtgagctttgatgaagttgtgataaccagggccatttgcacataggtttttttaaaaaacatgaaaagttcccttctcctttatttagcagtgtttccgggctgaaagacgccctcctccccctctgcgcttacccaggacgttaattaattgcactgtcatttaaaatattatgttgttaattactcgtttgtgtcttcccacccgtgtcacagcctggagtttttattcaattaaatctctgtctcttgccca

SEQ ID NO: 30641 - DNA, 4453 bp, Homo sapiens
  source 1..4453: mol_type = unassigned DNA
tggggccgtcgtgccccgccccagtgcggccggggcgcgggttcgagctgctgctcggcaagcctgggtgtctagggcatgagcggagtgtggggggccggcgggcctcggtgccaggaggcgctcgcggtcctcgcctcgctgtgccgggcccggccgccccctctcgggctggacgtggagacttgtcggagcttcgagctgcagcccccagagcggagtcccagcgcggcaggcgcaggcacctctgtcagcctcctcgcagttgtagttattgtgtgtggcgtggccctggtggcagtttttctctttctcttttggaagctgtgctggatgccctggaggaacaaggaggcctccagtccctcttctgctaatccccccttggaagccctccagagccccagcttcagaggcaacatggcggacaagctgaaggaccccagcaccctgggcttcctggaggcggccgtgaagatcagccacacgtccccagatatcccagctgaggtgcagatgtcggtcaaggagcacatcatgcgtcacacccggctgcagcggcaaactacagagccagcgtcatccaccaggcacacgtccttcaagcgccacctgccaaggcagatgcatgtctccagtgtagactatggcaatgagcttccaccagcagcagagcagcccaccagcattggccgcatcaagcctgagctctacaagcagaagtcggtggatggggaggatgccaagtctgaggccaccaagagctgcgggaagatcaacttcagcctacgctacgattacgagaccgagaccctgattgtgcgtatcctgaaggcttttgacctccctgccaaggacttttgtggaagctctgacccttatgtcaagatctacctcctgcctgaccgcaaatgcaagctgcagacccgggtgcaccgcaagaccctgaaccccacctttgatgagaacttccacttccctgtgccctatgaggagctggctgaccgcaagctgcatctcagtgtcttcgactttgaccgcttctcccgccatgacatgattggcgaggtcatcctggacaacctctttgaggcctctgacctgtctcgggaaacctccatctggaaggatatccaatatgccacaagtgaaagcgtggacttgggagagatcatgttctccctttgctacctgcccactgcaggcaggctcaccctcacagtgattaagtgtcggaacctcaaggcgatggacatcacaggctattcagatccctatgtgaaagtgtccttgctctgtgatgggcggaggctgaagaagaagaaaacaaccataaagaaaaacactctcaatcctgtctacaatgaggccatcatctttgacattcccccggaaaacatggatcaagtcagcctgctcatctcagtcatggactatgatcgagtgggccacaatgagatcataggagtctgtcgtgtggggatcactgctgaaggcctgggcagggaccactggaacgagatgctggcatacccccggaagcccatcgcacactggcactccttggtggaggtaaagaaatccttcaaagagggaaaccctcggttgtgatttcattcacgtggatgctgcaagcagagagactgccacctggagttaggatggcagggccgagctgctagcttcgacagtgagagctcgtgcccatctccgaaaccacctccaacaccatgagatgtgcagccaaataacacaaatgggactcagcaatgttctctttgcacttgttcaaccgtctaaacagtgttgtgcagtcgcagtggcggcagcagcggcagccgtccgtcactccagagtcttacctgctcctgtgtaggtcaaagctgagacacttgtcatgtggtcagatctgtcttagtcttttgtgtctcccaaggtgatgtttttgtggtttttcactttttatgggtctgctggtaagaaaagggaaaaaaaaaaagagtaggaaaagacaaagggtggaaagcccagaagttggttctagaaaatacaaggtacagttttttggaaagaggtggattgagtttctgaaatgctgcgtctccagcaagctccacaaccctggaaaaggaggaggcgtggtgggactgcggctgcattttcagtgccctgcaggaatggggtgaatccatggaagagcctttgtgaggtgaattactagtctttgaagctcttcgctggcaggacataaaccacgctgggaccctcagtcccgtgttgaaatcacaagacctctgaggcgcttgtgagccttcagctgatgtgcagggttcctcgctccccttcctcgctggctttccccatgaattgaaaacgtcttgattcctcatgggaacttagtcactttctttaggaatgattcagttcagccgaaactaaacacgccatatgttttctgatgcgccacagttaatgatcacatttgtttgaaaacaggatctttgtcctcagaaataatcttgattgtaaagtaagagagaaacatatgttctggaatgatttctgcattatacatagctttataattccatgaagtatcaagctgctgtttaaaatgcctaaacagattaaagaaaaacctagattaaatgttcttttccaaatggggagttttgaaatccaaatagcagtttgagtccatctttctatgaagagtatgtttttgattgaaaccgagtcagcgtaagcctatttcagcccctttggctctttgacaatattcatcttaaactttagttctataaattactaagtacttcagtgttgtttgtttcagtggttgtgagggtttcttgtttcctttagatctttaccttaggccaaactcagtttaggaaaaaaaaaattgtttgaactattctgtgttgtaatagcacatttctgttgagttaatagtggtcttcccaccaacccctaaaaccaggttgatttgctcaatctcagtttgtataaccccagtaagcgcatggaggtgagtttctacttcgacttgtggcgacacagtgccagtttcctgagctgtgtgtactacttgcaagaggcaagtctgctgaagaaccccttcttttaacagtggaaaatcaagaacagaaaatctgttcacacacctgtgtcttattctttatatatgctacatggtagaggagcagcgaccaataaagtatccctcattttaaaccaagttgtcagatttctctgctgatagaacgctgcatagtatcttctagccctaaaaatgaccaggttgggcatgagttaacaggatattgtggcaaaaggaattttctgcttagaaaagtaaatgtagataaacctaaactccaccctgtactgagccttaggctagggactcatgtgtaaagatgacttttctccccagatatcttgtcattgacaggccttcctagtctggtagtcctacatttgggtgttctcctgagagtgagaaaaaacccaaggtcatgacaagattcctggcaggtgacagacttcattatgattctgactctagactgaccccatcaagatagtcgtttccgtcagtgaacagatgctgaaggccttgccattacaaaggagacaactgagttccctgggtcataaggagtccagaaattagtgtgagaaggtccttctggaagtgaactcaaaattcatgtccagctgtcatcgttaaacccttaggcaggtgagtataacccattctaacctcttggagaagggagtgtgatcaatgtgaatcacaatagtattgctcatctgagacattcctcttatatccaagcagctatctcccatgagtgaacatcccagtggtttcagaaaatcatgtcctgaacagattctagccagccccacaccaccctggccaactgcaaccgctgctgctctagcagtctgggtcaattcctacaggcttgggagcccaccccagggaggcttttatctcctgcagcctcatccccagcaccctcaaggtagactactcctcagcctgaatcatgaatgaaacctgaacatctgccaacttcattatctagcccagtatctcttccctcacagagaagaagaaaatgaaatacaaagttgatccatttgttggctttctctggccggagaaacctctcgggttgttgctgtgagctttgatgaagttgtgataaccagggccatttgcacataggtttttttaaaaaacatgaaaagttcccttctcctttatttagcagtgtttccgggctgaaagacgccctcctccccctctgcgcttacccaggacgttaattaattgcactgtcatttaaaatattatgttgttaattactcgtttgtgtcttcccacccgtgtcacagcctggagtttttattcaattaaatctctgtctcttgccca

SEQ ID NO: 30642 - DNA, 391 bp, Homo sapiens
  source 1..391: mol_type = unassigned DNA
cctgcccgatccgcgctgaccctgcgcgggacgcagccccaggcggctgcctagccgaggcgggagcccgagctgagtcgagctcgccggagcggctgtgctggatgccctggaggaacaaggaggcctccagtccctcttctgctaatccccccttggaagccctccagagccccagcttcagaggcaacatggcggacaagctgaaggaccccagcaccctgggcttcctggaggcggccgtgaagatcagccacacgtccccagatatcccagctgaggtgcagatgtcggtcaaggagcacatcatgcgtcacacccggctgcagcggcaaactacagagccagcgtcatccaccaggcacacgtccttcaagcgccacctgccaag

SEQ ID NO: 30643 - DNA, 565 bp, Homo sapiens
  source 1..565: mol_type = unassigned DNA
gtccttcccccaccccctctcgcccctataactcgctccctccgtccctctcggactcggactcggggccggtgcgcgactgagctggcgcctctagccgactttgccaagagggcgcctcctgcccgatccgcgctgaccctgcgcgggacgcagccccaggcggctgcctagccgaggcgggagcccgagctgagtcgagctcgccggagcgggcacctctgtcagcctcctcgcagttgtagttattgtgtgtggcgtggccctggtggcagtttttctctttctcttttggaagctgtgctggatgccctggaggaacaaggaggcctccagtccctcttctgctaatccccccttggaagccctccagagccccagcttcagaggcaacatggcggacaagctgaaggaccccagcaccctgggcttcctggaggcggccgtgaagatcagccacacgtccccagatatcccagctgaggtgcagatgtcggtcaaggagcacatcatgcgtcacacccggctgcagcggcaaactacagagccagcgtcatccaccagg

SEQ ID NO: 30644 - DNA, 4854 bp, Homo sapiens
  source 1..4854: mol_type = unassigned DNA
ccgggcgcgctcacacacgcgctcacacacacacatacacacggcctcgtacacacacacacgctccggcgcgcacacgcggcgcgcaggccggagggaggcggctcggcgctgttcggcggcggcggcagcgtgctccgcgggcgggcgggagggctggcgggcggcccccgctccccggctccgcggctaggtgcagcccgctcggcccccgccctcggacccgcccccgggggtcgcccggccccatgcccagcggcggcggcggagcagcgcgcggccgcgggcggctctgaggagcccggagggaaccggcgacgaggggaccatgtaccgggacccggaggcggccagcccaggggcgccctcgcgcgacgtcctgctggtctctgccatcatcaccgtcagccttagcgtcactgtcgtcctctgcggcctctgccactggtgtcagcgcaaactgggcaaacgctacaagaattccttggagacggtgggcacgccagactcagggcgtgggcgcagtgagaagaaggctatcaagttgcctgcaggagggaaggcggtgaacacagcccccgtgccaggccagacaccccacgatgagtccgaccgccggaccgagccacgttcctccgtctcagacctcgtcaactccctcaccagcgagatgctcatgctctccccaggctccgaggaggatgaggcccacgagggttgcagccgagagaacctgggccggatccagttcagtgtcggctacaacttccaggagtccacgctcaccgtgaagatcatgaaggcccaggagctgccggccaaggacttcagcggcaccagcgaccccttcgtcaagatctacctgctgcccgacaagaagcacaagctggagaccaaggtgaagcggaagaacctgaacccccactggaacgagaccttcctctttgaaggttttccctatgagaaggtggtgcagaggatcctctacctccaagtcctggactatgaccgcttcagccgcaacgaccccattggggaggtgtccatcccccttaacaaggtggacctgacccagatgcagaccttctggaaggatctgaagccatgcagcgatgggagtgggagccgaggggagctgctcttgtctctctgctacaacccctctgccaactccatcatcgtgaacatcatcaaagcccggaacctcaaagccatggacatcgggggcacatcagacccctacgtgaaggtatggctgatgtacaaggacaagcgggtggagaagaagaagacggtgacgatgaagaggaacctgaaccccatcttcaatgagtccttcgccttcgatatccccacggagaagctgagggagacgaccatcatcatcactgtcatggacaaggacaagctcagccgcaatgacgtcatcggcaagatctacctgtcctggaagagcgggccaggggaggtgaagcactggaaggacatgattgcccgtccccggcagcccgtggcccagtggcaccagctgaaggcctgagtggggccaagggaggcccagggggccgagggcccaggtccccatcatgccctcaccactttatgcacaacgcccggcctgagccccctgccatagggaggggaggaccctgagggctcagccagggaggggtcccaggactcaactgggccccgtttctaggaagtaccagccccatcccccacagtccagctccggggaaggggctctgggaggcattttcctgctttgccccttttcttcctgacttactaatactaaagaagttgggggagctcgagagccagacggccagacaggcagacccctccagaggcccgccaggtgggcatggtcccccattttctttaaggcagcacctggagtggagagaggccactccctctccagcccccgatgtggacccggggaggggaggctgaggcgtttggccccggcctggccaggagaggcccatccccagggcagtttcaggtgccggctgggccctgaatgtcgaggatagtatatagcccgctcctgggtcctggagctgtggccctttgtactcgtgttgtgtccattgtgtgtgtgcgtggggacagaggcctggaaatgcggaggactatacagagaaggcaggttttgtgaaggccaggcagggttggaggccgggggtgtgagaggagaggcccatagggctgagtggggtcgggtgaggcagaggtcagaaacagaagagctgcagttgctggagctgggctgagaactgggctgcctcctgccatccccccgtctcctccccttctccccttggtgcccccctctgctcagaatctgaagtagttccctcctcagcaatttcatctcttgaacactgactcacaccttttaggcacctactgtgtgcatagcattccaccaggactcatctcccttccttctcagggggtcccgagccccgactagctttgccctaactccttcatcaaaagaccccccgccagcttcccacacctcatacgcagccacatctgccctattctccatgctttccagcttgcctgcccttcctcatctctccctgcctgtgcagacctccacccttctttcctccacccctccatcccccaatgcttgtagaccttccattcattccgtctcatcgtgcgtggtctctgatcgtccatcacctgaccttctccaggactgtcttctcacccttccccactccctggtccccgggagcagctccttctgcccgactcactcacagtgcagggaaaggaggcagggaaaagaccaggattctgtgagttctgaggttgccacacacaaagaagctgtggtttctctgcctcggccactgatgagactaaaactggcttccccttggagacggcagatttcaggctgatccctgcttaagccctctcatccccacgctggtcctggtattgatacaagacccagctggtgacaaagcctccaatcctgggggtccacgagcctgggcctgacattcccagaactaccgccaggtggcgccaggcccccacagtctgtggccgtggtcttagcccccagttccactctggatgggcctgtgacaccccaaagagaagaaggggactctggatagggtccccacatccagggcgtggggagaccattggcatttgggaaccattttccttcgaacggcttccccttgagctgagcattctgcttgctgcagtagacgggtcgccttttgcccataccgaaattttctgaaattaaatcgcacacccccaccatttcctctccctgggatctggaggaacatcatacatagtaggtgaatcgttttgtagagtgaagaatgctaatgtaaagcaaatagtcacccacgttccttgtaaatccaaatgtttctatattgtagctttgcttaaaatggggtcggccccaactgcatcctcctctttggcgggctggggagcggcccccagccgggacgggagggcagcgaccccgaggcctcgtggacgtgggagagagtgtggtgggaagtcttgagcggaggaggggatctgcccttctccactcctctcttggatccgcctcggtttcctgtccccccaccacccgcctgccccgcggaagaccgcccagtgagccagcccccaccttccaggcgccttcgccctggggatccaaccaacttgtatcgagtgggcggggcaacggctccccatttttcccgagccccgcccacagagctcttagccaatcctatgcagagagcatctcctggcaggggtctcttcccaaccagaccccacccaggcacattagcgaccaggcttgggcttccccagcgccccaccaccaccacgtgcaggtggagctctgggatgctatgttggggcggcaagcggtgggccgagggccgggtaggctagcacgggaggtaagggtggtatgggatggggcgggggcggtctagggcaataggagagcagagaatgggggaacttgagggtggggggagggcaccggagccttgccaccatcccaggactttgggcaagtcacccgcactccctgggcctcggtttccccatctgtaaaatgatggtaataatacttcacctacctcataggggaggttgtgaggccaccatcacctgacctgggggtcaaggcaggaggactccgaaggtgctacccgtgagcaaagtgtaattaccgaatcctgactgcaaggcccacctgcccctcccccacagagcctccagagctagctgaggccaacgcaggcccatccgtctcttcactctgtcgcaggccctttcatgggcttcgtctgccatctttgtgggtgccctagacttagtccttatcttgtcctggtttcctttcttgtgaccatctccccatgaaagtgctgtacaaattccacccgccccaggacccccgcacctgccctctggcaccagatgccagggaagggacagaggaaaacagccacaaacaagccaggggggctccccggagccccaggggtggggattggtggccactgtttgtatgttcttgagtgcaagtgttttataaaaaataaaacaaaaacccaccatcacaaaaaaaaaaattttgcagcgaagagaaatgaagaaaaactgaagaaaaaaaaaaaacaggaaaaaaagaaccatacaaaatttttccaccacacataccctctaagccagcaagatttcctctttgcaaaatcatatttttgtgggaatgggccctgctttttgtggcaaggcctgttctgattaataaaggatcgtgaaaaagta

SEQ ID NO: 30645 - DNA, 4534 bp, Homo sapiens
  source 1..4534: mol_type = unassigned DNA
gaagttctagaaaatgttaattgggggagctgtggctggcagagaaggaaaaaggaagctgaagggcacttgggctcataatggtctctccaaccctgatcctgtcctttatggacatttggcagcgctgctgccttgaggtgccttgcaatgctttatctttttgttaaagccacctctgttgcttcagccagcttgagcggttttctgttacttgctagtggttgggaaggcttagccgacgaagggaaaatgagtcaggtcctgaaggatgagcaagttacgggagtgggccgcatggtgagggagtggacttcctgatggggttaagggcgcctgaacacctgggaggcaagttgaggccaagacctggggtgatggagaggcagggtaggctacccagtgagtaggaggccgaaggaaccacagcagggctccagatctcctggcccagaggggctggtacgggaagcccagaagacactcatccctaaggggagcctgagactgaggaactctcatgccctgcgtcgggctcgtgggcgaagggccttcccagggactgcaccatggcctgtccccagccttacccaggggcctccctctcaggttctgaaggacccaggggtcacagctgtgtggggtgctccactgaacacttccttcaaactccttcaggctggagtgcagtggcgcgatctcagctccatgggagagagtttgaaaggatgaagagtttacatcctctggaaagaagcaaatagaaggcattccaggcaaaaggaactgcatcgagtaaaagcatggaggcaagaaagggcttggtgtgtttgagaaacagtgagtagggcatggtggtggcagaagcttaaagtgtatggcccgtggacagtgacagccggacaagaagctgaagtgacagaacaagttgaaccaaaggaattccagacctgggaaagtggagaaagaattttggggtcagagccgtttaagactttgcctagggcctgggtcttctttctcctaaaggcctcaacccacagcacgccacacaaatatgtcacataacacacaaacaaacatcatatttcacagtccaggaaatgaaatgaagacaaaagcgccccctgtgggtgaagtcacagtcactgcagcagacatcatggctgtggatgtggcagaataccatctgagcgtcatcaagagcccccctggctgggaggtgggtgtctatgctgcaggggccctggccctgctgggaatcgcagctgtgagcctgtggaagctctggacgtcggggagcttccccagcccctctccgttccccaattacgactacaggtaccttcagcagaagtacggcgagagctgcgcagaggccagggagaagagagtgcctgcctggaatgcccagcgggccagcacgcggggaccacccagccgcaaaggcagtctcagcattgaggacacctttgagagcatcagtgaactggggcctctggagctgatgggccgggagttggacctggccccctatgggaccctccggaagtcccagtcggccgactccctgaactccatctcctccgtgagcaacacctttgggcaggacttcacactgggccaggtggaggtgagcatggagtacgacactgcctcccacacgctgaacgtggcggtgatgcagggcaaggacctcctggagcgggaggaggccagcttcgagtcctgcttcatgcgcgtcagcctgctgccggacgagcagatcgtgggcatttctcggatccagagaaatgcctactccatcttctttgatgagaagttctccatccccctggatcccacagccctggaggagaagagcctgcggttttctgtatttggcatcgatgaggatgagcgcaacgtcagcacgggggtggtggagctgaagctttctgtgcttgacctcccgctgcagcccttcagtggctggctctatttacaggaccagaacaaggccgccgatgctgtgggggagatcctgctctccctcagctacctccccacagccgagcgcctcaccgtggtcgtggttaaggccaagaacctcatctggaccaacgacaagaccacagcggaccccttcgtcaaggtgtacctgctgcaggatgggaggaagatgagcaaaaagaagacagccgtgaagagggatgaccccaacccggtgttcaacgaagccatgatcttctcggtgccagccattgtgctccaggacctgtctctccgcgtgacggtggctgagagcagcagcgacggccgtggggacaacgtgggccatgtcatcattgggccgtcagccagtggcatgggaaccacacattggaaccagatgttggccacgctgcgcaggcccgtgtccatgtggcacgctgtccggcgaaactagcaaccagggcgggccagttgggcaatggagctgctggagcccggtacccactcagctctgtctgatgccctctccatagcccagctggagccgtgaacactggggtcccctggcagagtcctcatgacccatcctggtctctctgtccagattgcagcagaggagtgggcgtggctctgtgtccagggccccagggtctgctcctgctgaggaccagctgtggctgggccaggacagaggactcaaccctgctcctcccggtaggccagctgccgagctgggctatgttctggaacccagtgaatcttgggggccaggcactgtgctaggcaccagcaggggtaacacgaagaagacccggcccttagggcatcaggaagactagctcccctgccccggaggatctgctcagtgctgatggcagcccagctgtgtggactcagggggctctgagggctagggaaacaggaagggcctctttgacaaggtaggagctgtgcttggaggggcaggaaaagaactgagcatgtcgcaggcagcgggcccagcctgagcaatggcaggatgtgaacttccccatcgcaaatgcagttctcagcccactgcagtggatacaaggaagggcctttctcggggccggagaagagaccaagagaccaggcccgggcagcagcctaccggccacgtggaacactggctccggagttattctctgtcaaatctactccccggacctcaaccatggcaagaaccagaggtccaaagaggcccagacccaggtccttgtgctcagtcctgcgcaaaccaggcccagaccctgcaagcatttgttgatgcccttgcaggcccactgggagaaagatgcctcaggcaggtctcagcctgggggtggcaggggtggggcagagagaatactgacagcagaggtcttggtgggctgcacgtgcctgcgaagatgtggtggacaaggaggctctcgggctgggccttggaggggtggcagcggaaggacagcccaggtggctgaggcctgatgggaagccggggaaggccagggtggaagggcggcttgagggacgccaggagaagactgaatgccaggctaggaaggaggcggctctcgatcacggggtgggtgcccccgacaccgggtctcctagcttgagttccctagaagcgaaatctgagagggggattctggggcaagtagtttcttgcgggtgagtgttctcagagaaacttaccagatcaagaaagggagctcaggctggatggaggaagccacgcaagtgtggcttcaagatccatcgccttggcctgatcgctgtgggggcaggggcctggagtacgaggggcaccctgggggctcccacccagaagcagaggggctgggctgttgcacctctactggcatcagtctttggttaccccccagccccagtaggaggagagcaggcagagcttgtcatccccagcctggtgtcccgcagtcccaggaagccgcttcttgccttcatggctgagtgctgggaagggctgagctcacccaggccagcaggtggggtatcatctgctcggtggggccacccacaggtgacagcatggaccctcaggctggctgcccctgttccttggtccataactggtgagctatggagacccaggccaacaaattatccccagtgatatggggggaggaggggctagaacaagggcccaggggactggaggcaggatggtggctttccctacctgacacagccatggcccagccccaaggccaggctgtctaccctatggccacagcaggaggtcagcccagggccaggagacacatggctggacaaggctttgcagcctgggagaccccgactttctctaacccagtggctgtgcggtgcaggccactgactccccccctgccctctcccctctctccctccccctaactgcatgacatgttaactgtgtgcccaggacagccgtggtggggaccgggtatgccaactggaatgattctagaaccaaaataaagttggggcaggaagagggggcttccagggagccctgctcggccctgaatcaccttcgtctcttctctaggaa

SEQ ID NO: 30646 - DNA, 1678 bp, Homo sapiens
  source 1..1678: mol_type = unassigned DNA
atgtaaaaaatggagtcaccacgaccagattaggccacggtgaggactgagatgatgttgtaaggcaccagcacagagctgacctacagctcaatcgtggtgggagggagtaattatccattcagaaaaggggaaactttccgctgcgcctcctgtcgctgttttccttggctcccggaggtgcgcagtatcgggtccgtttttaagtcacagtcactgcagcagacatcatggctgtggatgtggcagaataccatctgagcgtcatcaagagcccccctggctgggaggtgggtgtctatgctgcaggggccctggccctgctgggaatcgcagctgtgagcctgtggaagctctggacgtcggggagcttccccagcccctctccgttccccaattacgactacaggtaccttcagcagaagtacggcgagagctgcgcagaggccagggagaagagagtgcctgcctggaatgcccagcgggccagcacgcggggaccacccagccgcaaaggcagtctcagcattgaggacacctttgagagcatcagtgaactggggcctctggagctgatgggccgggagttggacctggccccctatgggaccctccggaagtcccagtcggccgactccctgaactccatctcctccgtgagcaacacctttgggcaggacttcacactgggccaggtggaggtgagcatggagtacgacactgcctcccacacgctgaacgtggcggtgatgcagggcaaggacctcctggagcgggaggaggccagcttcgagtcctgcttcatgcgcgtcagcctgctgccggacgagcagatcgtgggcatttctcggatccagagaaatgcctactccatcttctttgatgagaagttctccatccccctggatcccacagccctggaggagaagagcctgcggttttctgtatttggcatcgatgaggatgagcgcaacgtcagcacgggggtggtggagctgaagctttctgtgcttgacctcccgctgcagcccttcagtggctggctctatttacaggaccagaacaaggccgccgatgctgtgggggagatcctgctctccctcagctacctccccacagccgagcgcctcaccgtggtcgtggttaaggccaagaacctcatctggaccaacgacaagaccacagcggaccccttcgtcaaggtgtacctgctgcaggatgggaggaagatgagcaaaaagaagacagccgtgaagagggatgaccccaacccggtgttcaacgaagccatgatcttctcggtgccagccattgtgctccaggacctgtctctccgcgtgacggtggctgagagcagcagcgacggccgtggggacaacgtgggccatgtcatcattgggccgtcagccagtggcatgggaaccacacattggaaccagatgttggccacgctgcgcaggcccgtgtccatgtggcacgctgtccggcgaaactagcaaccagggcgggccagttgggcaatggagctgctggagcccggtacccactcagctctgtctgatgccctctccatagcccagctggagccgtgaacactggggtcccctggcagagtcctcatgacccatcctggtctctctgtccagattgcagcagaggagtgggcgtggctctgtgt

SEQ ID NO: 30647 - DNA, 1661 bp, Homo sapiens
  source 1..1661: mol_type = unassigned DNA
actgcaggggtggcgttgccgccggcggccgggctaggcgcaggtgcgtgcgcgctgcgggaggcgggccggcagctggagcccagccggagcggcggcccctccgcggagcccggtcacagtcactgcagcagacatcatggctgtggatgtggcagaataccatctgagcgtcatcaagagcccccctggctgggaggtgggtgtctatgctgcaggggccctggccctgctgggaatcgcagctgtgagcctgtggaagctctggacgtcggggagcttccccagcccctctccgttccccaattacgactacaggtaccttcagcagaagtacggcgagagctgcgcagaggccagggagaagagagtgcctgcctggaatgcccagcgggccagcacgcggggaccacccagccgcaaaggcagtctcagcattgaggacacctttgagagcatcagtgaactggggcctctggagctgatgggccgggagttggacctggccccctatgggaccctccggaagtcccagtcggccgactccctgaactccatctcctccgtgagcaacacctttgggcaggacttcacactgggccaggtggaggtgagcatggagtacgacactgcctcccacacgctgaacgtggcggtgatgcagggcaaggacctcctggagcgggaggaggccagcttcgagtcctgcttcatgcgcgtcagcctgctgccggacgagcagatcgtgggcatttctcggatccagagaaatgcctactccatcttctttgatgagaagttctccatccccctggatcccacagccctggaggagaagagcctgcggttttctgtatttggcatcgatgaggatgagcgcaacgtcagcacgggggtggtggagctgaagctttctgtgcttgacctcccgctgcagcccttcagtggctggctctatttacaggaccagaacaaggccgccgatgctgtgggggagatcctgctctccctcagctacctccccacagccgagcgcctcaccgtggtcgtggttaaggccaagaacctcatctggaccaacgacaagaccacagcggaccccttcgtcaaggtgtacctgctgcaggatgggaggaagatgagcaaaaagaagacagccgtgaagagggatgaccccaacccggtgttcaacgaagccatgatcttctcggtgccagccattgtgctccaggacctgtctctccgcgtgacggtggctgagagcagcagcgacggccgtggggacaacgtgggccatgtcatcattgggccgtcagccagtggcatgggaaccacacattggaaccagatgttggccacgctgcgcaggcccgtgtccatgtggcacgctgtccggcgaaactagcaaccagggcgggccagttgggcaatggagctgctggagcccggtacccactcagctctgtctgatgccctctccatagcccagctggagccgtgaacactggggtcccctggcagagtcctcatgacccatcctggtctctctgtccagattgcagcagaggagtgggcgtggctctgtgtccagggccccagggtctgctcctgctgaggaccagctgtggctgggccaggacagaggactcaaccctgctcct

SEQ ID NO: 30648 - DNA, 5144 bp, Homo sapiens
  source 1..5144: mol_type = unassigned DNA
ggcggcgggagagctgctggctcgcccggatcccgggagctgcctggaggcgggcccggcccggggaaggtgagcggctgcgggacccagcccctcgccgggagcgggcaccatggtgctgtcggtgcctgtgatcgcgctgggcgccacgctgggcacagccaccagcatcctcgcgttgtgcggggtcacctgcctgtgtcggcacatgcaccccaagaaggggctgctgccgcgggaccaggaccccgacctggagaaggcgaagcccagcttgctcgggtctgcacaacagttcaatgttaaaaagtccacggaacctgttcagccccgtgccctcctcaagttcccagacatctatggacccaggccagctgtgacggctccagaggtcatcaactatgcagactattcactgaggtctacggaggagcccactgcacctgccagcccccaacccccgaatgacagtcgcctcaagaggcaggtcacagaggagctgttcatcctccctcagaatggtgtggtggaggatgtctgtgtcatggagacctggaacccagagaaggctgccagttggaaccaggcccccaaactccactactgcctggactatgactgtcagaaggcagaattgtttgtgactcgcctggaagctgtgaccagcaaccacgacggaggctgtgactgctacgtccaagggagtgtggccaataggaccggctctgtggaggctcagacagccctaaagaagcggcagctgcacaccacctgggaggagggcctggtgctccccctggcggaggaggagctccccacagccaccctgacgctgaccttgaggacctgcgaccgcttctcccgtcacagcgtggccggggagctccgcctgggcctggacgggacatctgtgcctctaggggctgcccagtggggcgagctgaagacttcagcgaaggagccatctgcaggagctggagaggtcctactatccatcagctacctcccggctgccaaccgcctcctggtggtgctgattaaagccaagaacctccactctaaccagtccaaggagctcctggggaaggatgtctctgtcaaggtgaccttgaagcaccaggctcggaagctgaagaagaagcagactaaacgagctaagcacaagatcaaccccgtgtggaacgagatgatcatgtttgagctgcctgacgacctgctgcaggcctccagtgtggagctggaagtgctgggccaggacgattcagggcagagctgtgcgcttggccactgcagcctgggcctgcacacctcgggctctgagcgcagccactgggaggagatgctcaaaaaccctcgccggcagattgccatgtggcaccagctgcacctgtaaccagctgcccagctgcctcccttcttggacagccctgacccgtcctctgcaacctcctttctgtgcccctttcctcattctgacacccagaagacagtgacagatgtgtttgcaaggctgggatggctctctcatcatactcttgtttcttagaaataagcaagacagagcaggaaatggaatatgcgggtcacactgaggaatgcattttgctcatctgtgttattgaaggaggtgcttattaaatacagttcctatgcctgttttataggtggggttaggccagatgcagagaaagctaaatgtgggaatcatggatgcaaagaagaatttggctttttgaaaaacaagcatttcaaaaatgatgaaggaagtgaaagtatcctggatcaactcctagagttagagattgcccaggtggaaagaaaccttagccagcgttcaatcaagctcaccatgcagggcagtcacccggcagttctcaaactttagcatgtgaagagtcaccagcagattcctgggctcgcctggagacattcctagtcggtattcctggtcgaagcccaggagccttcctttttaacaagctgatgtagagggtggagcactgtatgtggagaaattccttctacaatattccacacaggtttttggccacagtccttgatggagtcccaaaaccatggtgcagccagttccaatgctggacacctcaaccatcagggtgaaatctggggcctcagctttttaatttaattattttaattcttaatactttaatttgtgcatttcataagccccctgctcttggactgaattttgtgctttttattgaagaattttattgtttttatcttaaaatcagtttctattatccttggggagaccatccctaacaaagtacaggtgggatctcctgtgagtcattggctgggttctgattgctagatgtcacacccaccagcatcaccaaagtgactctgagatagaccggtcccttctcagcgttccagtcacttcaggaggaatttagttattgacttagtctatgacatctggctacatgtaggtagagaagaaagataattttaaaaaggaaatcaggtcttttgcaactgtgcctccctctgtctgttttcacttgaatgggtaaataaccagcagctaggttttgaattcctaccttgttattctaaacagatgtccacattgttaattaaatctaaattatgagccttgctgagtggatacggtacttacacctgaaccaggattcctgggttctgttgttgacattgcccttcagcacctgtttggccagctgtgtaagataggactaatgactaggaagcctaccccaatgaatgatatactagatgaaatagtgttcaaaacctgtaggcactctctggctaaaaacaaactctgaggccaccagcagatcatctttaagctaagttactatttttcacctttttttttagacggagttttgctctttgttgcccaggctggagtgcagtggcacgatctcggctcactgcaacctccgcctcccaagttcaagcgattctcctctctcagcctcctgggtagctgggattacaggtgcccaccaacatgcctggctaatttttgtacttttagtagagatggggtttcaccatgttggccaggctggtcttcaactccagatctcaggtgatctaccctcctcggcctcccaaagtactgggattacaggcctgagccaccgcgcccggcctatttttcactttaatttggcagctgagaatgcccagaaagtgccagaagcatcgtggcatttccagaaccatggattctgcctttggacccctctctattaatattaaaactctgggccttcagatgtcaccctaatccacttccctaagacagaatttctggacaagatgggtaagggcttcattccttcaacaagtcaagtcatacttggcctctccctgagaatctgagcaggagccttataacctgtggtcattattttttctttctgtacagaaatagaaaagcattagaaataacttctaaccatcctctgaaaaaacagaaaaaatatcgaatccctctttcatgagaagtcttttggataattggaaaccttcatcactgaggttggccagcccctgccaagtgttgtgtaggcaaagcacttgttagtggcttcctatgaaatgttttagagatctcttcaccatactggtttcttctctttggttggtgtgggtaaaagaaaacaaaacatttcctataagctgaaagctgaccagcattctcttcttggtaacatctactactccaatctagaaaatttggattctagaccaaaaatcaggaaacatggctccttataaatctgtgcagctgccttatagtaccatcaaaggaatttcaggtgggctgggcggggccccgatcccagaattatcaactccacccatcatcatttggtcatgaagcatcctttcattcttcttcttcttttttttgggggggcggggcgggggagggatctcaaagttttagtcttccagaatccaaattaaaggttgcccctgatgggggccaggttccgccacagaacatcttagatgtcagccttgacctcacttagcagggattacagaaatgagatacattttgaaggagagttgtctgttatgttcactgtattctaagtgcctgggataaagctgtctcatgggtgctccatatatattcatatatatttgttgagtgaattaatgaattaagagtggctggcagagtaggcagaaaaagacactgcaaatggcataaaaattaaagtcctagctgagttctcaatggtaaaggcatcagatgtcttagcagtcaagctagaaattcatgacaatgagtattactatttgcctaatggcaactcattgctctccatgtaaatgtaatcaacagatgaagagaatataattgctctgcttttccactaaaactccatcttagtgaattttaaattatccagagatgtcaaactgccaaataaaaatatttcagtagtctttgcatcagcttaccttgtaccagaaacatttccaatttactatcaaattatagtaactgagcctgtgtgaagtatctcatcattttcgaaaggaacaccttgtgtgatgccagtgagcatttctaaaaagggtgtgaggtagaggtaaaaataaggtgagagaccatttcagaatgcactgttgctcaaaaaggtgatctggttctttcttcagagatttctacggggatagaaaatcgggagtctgccctcattaatctgtgattccacctcttgcaccaaatcaatatctatttgttgagcacttattgattaagaccttgcatatgtctgtccattttgatttgagatacaactttttgtgtgggttgaatgacaaatcactccaaacaaagctgggcacagagaatcagctaggagaccagttattcagggtccatttctcttggatgtaaaggagtcctgggtaaaatgtggctgtaacctaaaccaactagtccttgtgatttgtttctgccctctgtgtttcctgttgtcaaatgctaagtgtgtgttttgcagtcatgaactaaagcacaaaaagatgcatgagacattgtagtcatatgtctggtgtgacactttggagcaaaaaccttgcagtggtaaataaaaaatttccaacagggt

SEQ ID NO: 30649 - DNA, 5109 bp, Homo sapiens
  source 1..5109: mol_type = unassigned DNA
gtggagagagaacctgtggagtacatgaacttatctgtattagaaaagaatctggaatctgagtgcatgctgatctcccattgacttctgttctattactgtaccccatcagagagatgtgaggagttggttgaaattcaaatcgggaacatatccaaagaccacaacatcctttgacaccaacaactgtctatgcttccttagaaggagccacctgacaactgggtggttcaacaaagtggccccaggaaagtatctccagaggcagttggatttttgtcagctgttggggtgtttattatcttgatgctgctcctttttctctatattaataagaagttctgttttgaaaatgttggcgggtttccagatcttggttcagaatacagtacaaggaagaattcacaagataaaatttataattcctacatggacaaagatgagcatggttcatcctctgaaagtgaagatgaagcgctgggtaaatatcatgaggccttatccagaacacacaattccagactaccactggcagattctagacaaaggaactatgcttgggaaacaaggcagaaatacagtcctctatcggcagagtatgatggatacagtagtgaagcatcaatagatgaaggaaactgcattcagagaatgagaagaacacccccgctggatgaattgcagccaccaccatatcaggatgacagtggttctccccatctgtcatgtacaccctcagaaattggggacagtaaatgtgaattttcccactgcagcaacagtccaagatgctcatataacaagtgcccaagtgaaggaagcacaggtcatgaaatagaaagttttcataataaaggatatgaagaagatgttccaagtgacagcactgcagtcctgagccctgaagatatgtcagctcaaggatcatcttcgcagcttcctaaaccttttgatcctgagccagaagctaaatatggcacactggatgtgacttttgactatgactcacaagaacagaagcttctggtaacagtgacagctgtcacagacatcccaacatataacaggacaggtggcaactcatggcaagtacaccttgttcttctacctataaagaaacagagagcaaaaaccagcatccagagaggaccatgccctgtcttcacagaaacatttaaatttaatcatgttgaatctgagatgattggaaattatgcagttcggtttagactgtatggtgtacatcgcatgaaaaaagaaaagattgtgggggaaaagattttttatttaacaaaattgaatcttcaagggaaaatgtcattgcctgtgatattggaaccttcttacaatcattctggctgtgactcccaaatgagcgtgtcagaaatgtcgtgtagtgaaagtacatcctcatgtcagtctcttgaacatggctcagttccagaaattcttattggcctgctttataatgccacaactggaagactatcagcagaagtgataaaaggcagccacttcaaaaatttggcagcaaacagaccacccaatacatatgttaagttaactctactgaattccatgggtcaagagatgtccaaatgcaagacatccatccgcagagggcagccaaatccagtatataaggaaacttttgtctttcaagtggccctatttcagctttctgatgtgacactcatactgtctgtgtataacaaacgcagcatgaaaagaaaagagatgataggctggatttctttaggtctcaacagctctggagaagaagaactcaatcactggactgaaatgaaagagtcaaaaggacagcaagtatgtagatggcatgcgttgctagagtcatgatgaatagaataagcaagcagttaccatcaaaggcagcatatttccaattccaacattactgtttctaccaagtcccattagaagagctgttctttgaagaatcatattcaaccttctaccaaaatgctttaagttctatggaaagaacgtctcatactgacataaatgaagaaaatatgtgtatctagtagagcttgtttaggaaactgagaaacgtacactatcattgctaaactaacagtcctccagaaatttaataagatgtttttgatttgaagttaattttaatttagcaaaagagccagtcattttatgaaaaatcaaaattataagtgattttaaaaaccagaattttagttgcaatacaattttaatatcaccctacatattatttataaaacatagtttgactggccagtccctggtgtttgtaatgttctttaatatgaaaaagtagttctccaactctatcataagtcatatctaatggtgaagggtttcagtcacattgaaaattgttttatttcaggcatgttccctttgtgcacttaggttcattgtgcctcagttcctctcaaaagcactaaatctaagtgcaaacaagtattcattttcatacaggaatttttttaatatgttatttttttaaaagttcatttttcatttgcctccgctttcgcctgatccaaagagaccaagtcactgtactggtcccttgcaagtcttctagacaggttgtactgtagaactacgtaactttctgttgaaagcacttcctgtattcttgtattccaatgtaggaagctaatagagcaggactttactttcaaatttctttcagtgattgactcttcaaaattgcagtagtgtgaaaatacattttttacaaactgaaaatacagtagataagctgtcgaaaatggaaaacaattcaattttaattttctgctctgagtatttagtaaccaacactgcgtaaagcaggtagcattcaaaataagaaactgttctctctctaaatcttcactcttacttcaatttatatttgtgatatgaagactatccagttctcagtttgaattggaacatcatgttaaaaacagttatgagattccttatgaagtttctagtaacttgtaactagactttatgaaattaacagataaagttcttcaacgtgatgtcatcttgtgcctttcatgtaagttaaatttgctcatacagcttgaacgttgtatttgcaaaattaagccttcgatttttataaatgtaaagattcctcagaacagtgtcgcaagatctttatttcctctgaagtatgtaaaagttgtataatgtgctaactttttaatggcaaggcactttcatttgtttttatatttaggaactctaatcaggaatattataagctgttttctttttaattttgcttcttacctaatatatcattttatgcatatactttatcagagtatgttttatatatattaaaaatagtttcttttttctccttctcatttctagttaaaatagacaaaaacatactatttaccagttactaaaaagcagtatatcattgcttctagtcccaactaagtactatatattattgtaaactagaacttgttattaccataataacaaaacaatgcgtagatattacttcagcttggctgtactgaaaggccttaaaagaaacccaaaaagaccgtgaacttctgtatttttttagtttaaaaaatggcagctctatgcattcatacacatgaattataagaaaaaatacaaatgctatattggatgacatgaggtttgagaatgtgtgttacagggctgcattaaagggaaaaatccatcttttattgttacatcaatgagctttttccaggatttttcaaataaacaagtaagagttagaacctgaatcaaatggcaaaatatctcatttaagtgttttcagcaacagtatgaaaaaagacttgaagaggggatgtagattttactgagaaattggacttaggcatttgaagctataatgaactttttagactttgaaacaactgactgcattgctaacaactgttatcttcctaataaaaagagttatcagtcttatctgtaactgtaacagagcttagtgaaacacattagtaagaccagcttggtgctttcactcttagtgagaaaaagacctaactaattgttatttgttaaatctaccttttttcagactattcccagaattgtgtgtgtgatttgatacatccctagggatttatctggcataagtatcaaatccttcatggcttaaaaattaataaacagttttttaatatttctggaaagaccctacctccaccccagctgccaagtcctcaaagattataaattatctatatgagtgtatgtatctgtatacacacatgcaccattacacatacaacataaatatgtatatgtatattcatttgtaaaggcaaaggtgccctggctttttcagataactgaatagaaaaacatttcatacatttaggattatttttctcctctatgtatttactagatattatatttggtttgggttgctttctgctgctgttctccttcacacacagcaaaatatacatttgtttctgtagattgacacaacttataataattactcccaaaaagttgtctgttcttttagaaaaggattaaataaggctcaggggacccacttcactctactgaatctaatgtacgagacagtactactgcttctttgtgtgcttgaatttgcatgaaagcttaatagcaaaatcttctatctcagtaattatagcaaatagggacctactggtagggagcaggtgttggctcagaaacctgaaaaagacaacccactttcatacagttctattaaaatcccctaagttttctaataaaatgatatagtccaaatatggcaatcgactggcatttatgggagcctctaaacctggaattatggggtttatttttctcccaaatgagctgcaaaagataattattgctgcccagtaaacaaaatgtatgtcaaatcagtaaagaatttgtttagcataatattgccttatctttcagaagctttcttctatattcttgtgtcttcagtacaatccacttttgtttgaaatccatttgcatattatcttactgtgcatttagtgaattctcaataatgttgtatttgctgacaagaataataaattggaccacaattaaaaa

SEQ ID NO: 30650 - DNA, 2940 bp, Homo sapiens
  source 1..2940: mol_type = unassigned DNA
ccatccagttggtgcggtccatggcgagcgcatcatggcgattgaaggtggagagagaacctgtggagtacatgaacttatctgtattagaaaagtatctccagaggcagttggatttttgtcagctgttggggtgtttattatcttgatgctgctcctttttctctatattaataagaagttctgttttgaaaatgttggcgggtttccagatcttggttcagaatacagtacaaggaagaattcacaagataaaatttataattcctacatggacaaagatgagcatggttcatcctctgaaagtgaagatgaagcgctgggtaaatatcatgaggccttatccagaacacacaattccagactaccactggcagattctagacaaaggaactatgcttgggaaacaaggcagaaatacagtcctctatcggcagagtatgatggatacagtagtgaagcatcaatagatgaaggaaactgcattcagagaatgagaagaacacccccgctggatgaattgcagccaccaccatatcaggatgacagtggttctccccatctgtcatgtacaccctcagaaattggggacagtaaatgtgaattttcccactgcagcaacagtccaagatgctcatataacaagtgcccaagtgaaggaagcacaggtcatgaaatagaaagttttcataataaaggatatgaagaagatgttccaagtgacagcactgcagtcctgagccctgaagatatgtcagctcaaggatcatcttcgcagcttcctaaaccttttgatcctgagccagaagctaaatatggcacactggatgtgacttttgactatgactcacaagaacagaagcttctggtaacagtgacagctgtcacagacatcccaacatataacaggacaggtggcaactcatggcaagtacaccttgttcttctacctataaagaaacagagagcaaaaaccagcatccagagaggaccatgccctgtcttcacagaaacatttaaatttaatcatgttgaatctgagatgattggaaattatgcagttcggtttagactgtatggtgtacatcgcatgaaaaaagaaaagattgtgggggaaaagattttttatttaacaaaattgaatcttcaagggaaaatgtcattgcctgtgatattggaaccttcttacaatcattctggctgtgactcccaaatgagcgtgtcagaaatgtcgtgtagtgaaagtacatcctcatgtcagtctcttgaacatggctcagttccagaaattcttattggcctgctttataatgccacaactggaagactatcagcagaagtgataaaaggcagccacttcaaaaatttggcagcaaacagaccacccaatggactgttctgttgtctaaaacacttgataggtggacaggtttatataatccgagatacatatgttaagttaactctactgaattccatgggtcaagagatgtccaaatgcaagacatccatccgcagagggcagccaaatccagtatataaggaaacttttgtctttcaagtggccctatttcagctttctgatgtgacactcatactgtctgtgtataacaaacgcagcatgaaaagaaaagagatgataggctggatttctttaggtctcaacagctctggagaagaagaactcaatcactggactgaaatgaaagagtcaaaaggacagcaagtatgtagatggcatgcgttgctagagtcatgatgaatagaataagcaagcagttaccatcaaaggcagcatatttccaattccaacattactgtttctaccaagtcccattagaagagctgttctttgaagaatcatattcaaccttctaccaaaatgctttaagttctatggaaagaacgtctcatactgacataaatgaagaaaatatgtgtatctagtagagcttgtttaggaaactgagaaacgtacactatcattgctaaactaacagtcctccagaaatttaataagatgtttttgatttgaagttaattttaatttagcaaaagagccagtcattttatgaaaaatcaaaattataagtgattttaaaaaccagaattttagttgcaatacaattttaatatcaccctacatattatttataaaacatagtttgactggccagtccctggtgtttgtaatgttctttaatatgaaaaagtagttctccaactctatcataagtcatatctaatggtgaagggtttcagtcacattgaaaattgttttatttcaggcatgttccctttgtgcacttaggttcattgtgcctcagttcctctcaaaagcactaaatctaagtgcaaacaagtattcattttcatacaggaatttttttaatatgttatttttttaaaagttcatttttcatttgcctccgctttcgcctgatccaaagagaccaagtcactgtactggtcccttgcaagtcttctagacaggttgtactgtagaactacgtaactttctgttgaaagcacttcctgtattcttgtattccaatgtaggaagctaatagagcaggactttactttcaaatttctttcagtgattgactcttcaaaattgcagtagtgtgaaaatacattttttacaaactgaaaatacagtagataagctgtcgaaaatggaaaacaattcaattttaattttctgctctgagtatttagtaaccaacactgcgtaaagcaggtagcattcaaaataagaaactgttctctctctaaatcttcactcttacttcaatttatatttgtgatatgaagactatccagttctcagtttgaattggaacatcatgttaaaaacagttatgagattccttatgaagtttctagtaacttgtaactagactttatgaaattaacagataaagttcttcaacgtga

SEQ ID NO: 30651 - DNA, 5043 bp, Homo sapiens
  source 1..5043: mol_type = unassigned DNA
agcgcgtcctccgccagccctcgcgtctgctgcccccgccatccagttggtgcggtccatggcgagcgcatcatggcgattgaaggtggagagagaacctgtggagtacatgaacttatctgtattagaaaagtatctccagaggcagttggatttttgtcagctgttggggtgtttattatcttgatgctgctcctttttctctatattaataagaagttctgttttgaaaatgttggcgggtttccagatcttggttcagaatacagtacaaggaagaattcacaagataaaatttataattcctacatggacaaagatgagcatggttcatcctctgaaagtgaagatgaagcgctgggtaaatatcatgaggccttatccagaacacacaattccagactaccactggcagattctagacaaaggaactatgcttgggaaacaaggcagaaatacagtcctctatcggcagagtatgatggatacagtagtgaagcatcaatagatgaaggaaactgcattcagagaatgagaagaacacccccgctggatgaattgcagccaccaccatatcaggatgacagtggttctccccatctgtcatgtacaccctcagaaattggggacagtaaatgtgaattttcccactgcagcaacagtccaagatgctcatataacaagtgcccaagtgaaggaagcacaggtcatgaaatagaaagttttcataataaaggatatgaagaagatgttccaagtgacagcactgcagtcctgagccctgaagatatgtcagctcaaggatcatcttcgcagcttcctaaaccttttgatcctgagccagaagctaaatatggcacactggatgtgacttttgactatgactcacaagaacagaagcttctggtaacagtgacagctgtcacagacatcccaacatataacaggacaggtggcaactcatggcaagtacaccttgttcttctacctataaagaaacagagagcaaaaaccagcatccagagaggaccatgccctgtcttcacagaaacatttaaatttaatcatgttgaatctgagatgattggaaattatgcagttcggtttagactgtatggtgtacatcgcatgaaaaaagaaaagattgtgggggaaaagattttttatttaacaaaattgaatcttcaagggaaaatgtcattgcctgtgatattggaaccttcttacaatcattctggctgtgactcccaaatgagcgtgtcagaaatgtcgtgtagtgaaagtacatcctcatgtcagtctcttgaacatggctcagttccagaaattcttattggcctgctttataatgccacaactggaagactatcagcagaagtgataaaaggcagccacttcaaaaatttggcagcaaacagaccacccaagatggactgttctgttgtctaaaacacttgataggtggacaggtttatataatccgagatacatatgttaagttaactctactgaattccatgggtcaagagatgtccaaatgcaagacatccatccgcagagggcagccaaatccagtatataaggaaacttttgtctttcaagtggccctatttcagctttctgatgtgacactcatactgtctgtgtataacaaacgcagcatgaaaagaaaagagatgataggctggatttctttaggtctcaacagctctggagaagaagaactcaatcactggactgaaatgaaagagtcaaaaggacagcaagtatgtagatggcatgcgttgctagagtcatgatgaatagaataagcaagcagttaccatcaaaggcagcatatttccaattccaacattactgtttctaccaagtcccattagaagagctgttctttgaagaatcatattcaaccttctaccaaaatgctttaagttctatggaaagaacgtctcatactgacataaatgaagaaaatatgtgtatctagtagagcttgtttaggaaactgagaaacgtacactatcattgctaaactaacagtcctccagaaatttaataagatgtttttgatttgaagttaattttaatttagcaaaagagccagtcattttatgaaaaatcaaaattataagtgattttaaaaaccagaattttagttgcaatacaattttaatatcaccctacatattatttataaaacatagtttgactggccagtccctggtgtttgtaatgttctttaatatgaaaaagtagttctccaactctatcataagtcatatctaatggtgaagggtttcagtcacattgaaaattgttttatttcaggcatgttccctttgtgcacttaggttcattgtgcctcagttcctctcaaaagcactaaatctaagtgcaaacaagtattcattttcatacaggaatttttttaatatgttatttttttaaaagttcatttttcatttgcctccgctttcgcctgatccaaagagaccaagtcactgtactggtcccttgcaagtcttctagacaggttgtactgtagaactacgtaactttctgttgaaagcacttcctgtattcttgtattccaatgtaggaagctaatagagcaggactttactttcaaatttctttcagtgattgactcttcaaaattgcagtagtgtgaaaatacattttttacaaactgaaaatacagtagataagctgtcgaaaatggaaaacaattcaattttaattttctgctctgagtatttagtaaccaacactgcgtaaagcaggtagcattcaaaataagaaactgttctctctctaaatcttcactcttacttcaatttatatttgtgatatgaagactatccagttctcagtttgaattggaacatcatgttaaaaacagttatgagattccttatgaagtttctagtaacttgtaactagactttatgaaattaacagataaagttcttcaacgtgatgtcatcttgtgcctttcatgtaagttaaatttgctcatacagcttgaacgttgtatttgcaaaattaagccttcgatttttataaatgtaaagattcctcagaacagtgtcgcaagatctttatttcctctgaagtatgtaaaagttgtataatgtgctaactttttaatggcaaggcactttcatttgtttttatatttaggaactctaatcaggaatattataagctgttttctttttaattttgcttcttacctaatatatcattttatgcatatactttatcagagtatgttttatatatattaaaaatagtttcttttttctccttctcatttctagttaaaatagacaaaaacatactatttaccagttactaaaaagcagtatatcattgcttctagtcccaactaagtactatatattattgtaaactagaacttgttattaccataataacaaaacaatgcgtagatattacttcagcttggctgtactgaaaggccttaaaagaaacccaaaaagaccgtgaacttctgtatttttttagtttaaaaaatggcagctctatgcattcatacacatgaattataagaaaaaatacaaatgctatattggatgacatgaggtttgagaatgtgtgttacagggctgcattaaagggaaaaatccatcttttattgttacatcaatgagctttttccaggatttttcaaataaacaagtaagagttagaacctgaatcaaatggcaaaatatctcatttaagtgttttcagcaacagtatgaaaaaagacttgaagaggggatgtagattttactgagaaattggacttaggcatttgaagctataatgaactttttagactttgaaacaactgactgcattgctaacaactgttatcttcctaataaaaagagttatcagtcttatctgtaactgtaacagagcttagtgaaacacattagtaagaccagcttggtgctttcactcttagtgagaaaaagacctaactaattgttatttgttaaatctaccttttttcagactattcccagaattgtgtgtgtgatttgatacatccctagggatttatctggcataagtatcaaatccttcatggcttaaaaattaataaacagttttttaatatttctggaaagaccctacctccaccccagctgccaagtcctcaaagattataaattatctatatgagtgtatgtatctgtatacacacatgcaccattacacatacaacataaatatgtatatgtatattcatttgtaaaggcaaaggtgccctggctttttcagataactgaatagaaaaacatttcatacatttaggattatttttctcctctatgtatttactagatattatatttggtttgggttgctttctgctgctgttctccttcacacacagcaaaatatacatttgtttctgtagattgacacaacttataataattactcccaaaaagttgtctgttcttttagaaaaggattaaataaggctcaggggacccacttcactctactgaatctaatgtacgagacagtactactgcttctttgtgtgcttgaatttgcatgaaagcttaatagcaaaatcttctatctcagtaattatagcaaatagggacctactggtagggagcaggtgttggctcagaaacctgaaaaagacaacccactttcatacagttctattaaaatcccctaagttttctaataaaatgatatagtccaaatatggcaatcgactggcatttatgggagcctctaaacctggaattatggggtttatttttctcccaaatgagctgcaaaagataattattgctgcccagtaaacaaaatgtatgtcaaatcagtaaagaatttgtttagcataatattgccttatctttcagaagctttcttctatattcttgtgtcttcagtacaatccacttttgtttgaaatccatttgcatattatcttactgtgcatttagtgaattctcaataatgttgtatttgctgacaagaataataaattggaccacaatt

SEQ ID NO: 30652 - DNA, 5162 bp, Homo sapiens
  source 1..5162: mol_type = unassigned DNA
agcgcgtcctccgccagccctcgcgtctgctgcccccgccatccagttggtgcggtccatggcgagcgcatcatggcgattgaaggtggagagagaacctgtggagtacatgaacttatctgtattagaaaagatagggtatttctctgtggccaggctggagtacagtggcaccatcttggctcactgcaacttccgcctcctgggttcaaacgattcttctgcctcagcatcccaagtaactgggactacagtatctccagaggcagttggatttttgtcagctgttggggtgtttattatcttgatgctgctcctttttctctatattaataagaagttctgttttgaaaatgttggcgggtttccagatcttggttcagaatacagtacaaggaagaattcacaagataaaatttataattcctacatggacaaagatgagcatggttcatcctctgaaagtgaagatgaagcgctgggtaaatatcatgaggccttatccagaacacacaattccagactaccactggcagattctagacaaaggaactatgcttgggaaacaaggcagaaatacagtcctctatcggcagagtatgatggatacagtagtgaagcatcaatagatgaaggaaactgcattcagagaatgagaagaacacccccgctggatgaattgcagccaccaccatatcaggatgacagtggttctccccatctgtcatgtacaccctcagaaattggggacagtaaatgtgaattttcccactgcagcaacagtccaagatgctcatataacaagtgcccaagtgaaggaagcacaggtcatgaaatagaaagttttcataataaaggatatgaagaagatgttccaagtgacagcactgcagtcctgagccctgaagatatgtcagctcaaggatcatcttcgcagcttcctaaaccttttgatcctgagccagaagctaaatatggcacactggatgtgacttttgactatgactcacaagaacagaagcttctggtaacagtgacagctgtcacagacatcccaacatataacaggacaggtggcaactcatggcaagtacaccttgttcttctacctataaagaaacagagagcaaaaaccagcatccagagaggaccatgccctgtcttcacagaaacatttaaatttaatcatgttgaatctgagatgattggaaattatgcagttcggtttagactgtatggtgtacatcgcatgaaaaaagaaaagattgtgggggaaaagattttttatttaacaaaattgaatcttcaagggaaaatgtcattgcctgtgatattggaaccttcttacaatcattctggctgtgactcccaaatgagcgtgtcagaaatgtcgtgtagtgaaagtacatcctcatgtcagtctcttgaacatggctcagttccagaaattcttattggcctgctttataatgccacaactggaagactatcagcagaagtgataaaaggcagccacttcaaaaatttggcagcaaacagaccacccaatggactgttctgttgtctaaaacacttgataggtggacaggtttatataatccgagatacatatgttaagttaactctactgaattccatgggtcaagagatgtccaaatgcaagacatccatccgcagagggcagccaaatccagtatataaggaaacttttgtctttcaagtggccctatttcagctttctgatgtgacactcatactgtctgtgtataacaaacgcagcatgaaaagaaaagagatgataggctggatttctttaggtctcaacagctctggagaagaagaactcaatcactggactgaaatgaaagagtcaaaaggacagcaagtatgtagatggcatgcgttgctagagtcatgatgaatagaataagcaagcagttaccatcaaaggcagcatatttccaattccaacattactgtttctaccaagtcccattagaagagctgttctttgaagaatcatattcaaccttctaccaaaatgctttaagttctatggaaagaacgtctcatactgacataaatgaagaaaatatgtgtatctagtagagcttgtttaggaaactgagaaacgtacactatcattgctaaactaacagtcctccagaaatttaataagatgtttttgatttgaagttaattttaatttagcaaaagagccagtcattttatgaaaaatcaaaattataagtgattttaaaaaccagaattttagttgcaatacaattttaatatcaccctacatattatttataaaacatagtttgactggccagtccctggtgtttgtaatgttctttaatatgaaaaagtagttctccaactctatcataagtcatatctaatggtgaagggtttcagtcacattgaaaattgttttatttcaggcatgttccctttgtgcacttaggttcattgtgcctcagttcctctcaaaagcactaaatctaagtgcaaacaagtattcattttcatacaggaatttttttaatatgttatttttttaaaagttcatttttcatttgcctccgctttcgcctgatccaaagagaccaagtcactgtactggtcccttgcaagtcttctagacaggttgtactgtagaactacgtaactttctgttgaaagcacttcctgtattcttgtattccaatgtaggaagctaatagagcaggactttactttcaaatttctttcagtgattgactcttcaaaattgcagtagtgtgaaaatacattttttacaaactgaaaatacagtagataagctgtcgaaaatggaaaacaattcaattttaattttctgctctgagtatttagtaaccaacactgcgtaaagcaggtagcattcaaaataagaaactgttctctctctaaatcttcactcttacttcaatttatatttgtgatatgaagactatccagttctcagtttgaattggaacatcatgttaaaaacagttatgagattccttatgaagtttctagtaacttgtaactagactttatgaaattaacagataaagttcttcaacgtgatgtcatcttgtgcctttcatgtaagttaaatttgctcatacagcttgaacgttgtatttgcaaaattaagccttcgatttttataaatgtaaagattcctcagaacagtgtcgcaagatctttatttcctctgaagtatgtaaaagttgtataatgtgctaactttttaatggcaaggcactttcatttgtttttatatttaggaactctaatcaggaatattataagctgttttctttttaattttgcttcttacctaatatatcattttatgcatatactttatcagagtatgttttatatatattaaaaatagtttcttttttctccttctcatttctagttaaaatagacaaaaacatactatttaccagttactaaaaagcagtatatcattgcttctagtcccaactaagtactatatattattgtaaactagaacttgttattaccataataacaaaacaatgcgtagatattacttcagcttggctgtactgaaaggccttaaaagaaacccaaaaagaccgtgaacttctgtatttttttagtttaaaaaatggcagctctatgcattcatacacatgaattataagaaaaaatacaaatgctatattggatgacatgaggtttgagaatgtgtgttacagggctgcattaaagggaaaaatccatcttttattgttacatcaatgagctttttccaggatttttcaaataaacaagtaagagttagaacctgaatcaaatggcaaaatatctcatttaagtgttttcagcaacagtatgaaaaaagacttgaagaggggatgtagattttactgagaaattggacttaggcatttgaagctataatgaactttttagactttgaaacaactgactgcattgctaacaactgttatcttcctaataaaaagagttatcagtcttatctgtaactgtaacagagcttagtgaaacacattagtaagaccagcttggtgctttcactcttagtgagaaaaagacctaactaattgttatttgttaaatctaccttttttcagactattcccagaattgtgtgtgtgatttgatacatccctagggatttatctggcataagtatcaaatccttcatggcttaaaaattaataaacagttttttaatatttctggaaagaccctacctccaccccagctgccaagtcctcaaagattataaattatctatatgagtgtatgtatctgtatacacacatgcaccattacacatacaacataaatatgtatatgtatattcatttgtaaaggcaaaggtgccctggctttttcagataactgaatagaaaaacatttcatacatttaggattatttttctcctctatgtatttactagatattatatttggtttgggttgctttctgctgctgttctccttcacacacagcaaaatatacatttgtttctgtagattgacacaacttataataattactcccaaaaagttgtctgttcttttagaaaaggattaaataaggctcaggggacccacttcactctactgaatctaatgtacgagacagtactactgcttctttgtgtgcttgaatttgcatgaaagcttaatagcaaaatcttctatctcagtaattatagcaaatagggacctactggtagggagcaggtgttggctcagaaacctgaaaaagacaacccactttcatacagttctattaaaatcccctaagttttctaataaaatgatatagtccaaatatggcaatcgactggcatttatgggagcctctaaacctggaattatggggtttatttttctcccaaatgagctgcaaaagataattattgctgcccagtaaacaaaatgtatgtcaaatcagtaaagaatttgtttagcataatattgccttatctttcagaagctttcttctatattcttgtgtcttcagtacaatccacttttgtttgaaatccatttgcatattatcttactgtgcatttagtgaattctcaataatgttgtatttgctgacaagaataataaattggaccacaatt

SEQ ID NO: 30653 - DNA, 2966 bp, Homo sapiens
  source 1..2966: mol_type = unassigned DNA
atggcgagcgcatcatggcgattgaaggtggagagagaacctgtggagtacatgaacttatctgtattagaaaagtatctccagaggcagttggatttttgtcagctgttggggtgtttattatcttgatgctgctcctttttctctatattaataagaagttctgttttgaaaatgttggcgggtttccagatcttggttcagaatacagtacaaggaagaattcacaagataaaatttataattcctacatggacaaagatgagcatggttcatcctctgaaagtgaagatgaagcgctgggtaaatatcatgaggccttatccagaacacacaattccagactaccactggcagattctagacaaaggaactatgcttgggaaacaaggcagaaatacagtcctctatcggcagagtatgatggatacagtagtgaagcatcaatagatgaaggaaactgcattcagagaatgagaagaacacccccgctggatgaattgcagccaccaccatatcaggatgacagtggttctccccatctgtcatgtacaccctcagaaattggggacagtaaatgtgaattttcccactgcagcaacagtccaagatgctcatataacaagtgcccaagtgaaggaagcacaggtcatgaaatagaaagttttcataataaaggatatgaagaagatgttccaagtgacagcactgcagtcctgagccctgaagatatgtcagctcaaggatcatcttcgcagcttcctaaaccttttgatcctgagccagaagctaaatatggcacactggatgtgacttttgactatgactcacaagaacagaagcttctggtaacagtgacagctgtcacagacatcccaacatataacaggacaggtggcaactcatggcaagtacaccttgttcttctacctataaagaaacagagagcaaaaaccagcatccagagaggaccatgccctgtcttcacagaaacatttaaatttaatcatgttgaatctgagatgattggaaattatgcagttcggtttagactgtatggtgtacatcgcatgaaaaaagaaaagattgtgggggaaaagattttttatttaacaaaattgaatcttcaagggaaaatgtcattgcctgtgatattggaaccttcttacaatcattctggctgtgactcccaaatgagcgtgtcagaaatgtcgtgtagtgaaagtacatcctcatgtcagtctcttgaacatggctcagttccagaaattcttattggcctgctttataatgccacaactggaagactatcagcagaagtgataaaaggcagccacttcaaaaatttggcagcaaacagaccacccaatacatatgttaagttaactctactgaattccatgggtcaagagatgtccaaatgcaagacatccatccgcagagggcagccaaatccagtatataaggaaacttttgtctttcaagtggccctatttcagctttctgatgtgacactcatactgtctgtgtataacaaacgcagcatgaaaagaaaagagatgataggctggatttctttaggtctcaacagctctggagaagaagaactcaatcactggactgaaatgaaagagtcaaaaggacagcaagtatgtagatggcatgcgttgctagagtcatgatgaatagaataagcaagcagttaccatcaaaggcagcatatttccaattccaacattactgtttctaccaagtcccattagaagagctgttctttgaagaatcatattcaaccttctaccaaaatgctttaagttctatggaaagaacgtctcatactgacataaatgaagaaaatatgtgtatctagtagagcttgtttaggaaactgagaaacgtacactatcattgctaaactaacagtcctccagaaatttaataagatgtttttgatttgaagttaattttaatttagcaaaagagccagtcattttatgaaaaatcaaaattataagtgattttaaaaaccagaattttagttgcaatacaattttaatatcaccctacatattatttataaaacatagtttgactggccagtccctggtgtttgtaatgttctttaatatgaaaaagtagttctccaactctatcataagtcatatctaatggtgaagggtttcagtcacattgaaaattgttttatttcaggcatgttccctttgtgcacttaggttcattgtgcctcagttcctctcaaaagcactaaatctaagtgcaaacaagtattcattttcatacaggaatttttttaatatgttatttttttaaaagttcatttttcatttgcctccgctttcgcctgatccaaagagaccaagtcactgtactggtcccttgcaagtcttctagacaggttgtactgtagaactacgtaactttctgttgaaagcacttcctgtattcttgtattccaatgtaggaagctaatagagcaggactttactttcaaatttctttcagtgattgactcttcaaaattgcagtagtgtgaaaatacattttttacaaactgaaaatacagtagataagctgtcgaaaatggaaaacaattcaattttaattttctgctctgagtatttagtaaccaacactgcgtaaagcaggtagcattcaaaataagaaactgttctctctctaaatcttcactcttacttcaatttatatttgtgatatgaagactatccagttctcagtttgaattggaacatcatgttaaaaacagttatgagattccttatgaagtttctagtaacttgtaactagactttatgaaattaacagataaagttcttcaacgtgatgtcatcttgtgcctttcatgtaagttaaatttgctcatacagcttgaacgttgtatttgcaaaattaagccttcgatttttataaatgtaaagattcctcag

SEQ ID NO: 30654 - DNA, 5062 bp, Homo sapiens
  source 1..5062: mol_type = unassigned DNA
agcgcgtcctccgccagccctcgcgtctgctgcccccgccatccagttggtgcggtccatggcgagcgcatcatggcgattgaaggtggagagagaacctgtggagtacatgaacttatctgtattagaaaagtatctccagaggcagttggatttttgtcagctgttggggtgtttattatcttgatgctgctcctttttctctatattaataagaagttctgttttgaaaatgttggcgggtttccagatcttggttcagaatacagtacaaggaagaattcacaagataaaatttataattcctacatggacaaagatgagcatggttcatcctctgaaagtgaagatgaagcgctgggtaaatatcatgaggccttatccagaacacacaattccagactaccactggcagattctagacaaaggaactatgcttgggaaacaaggcagaaatacagtcctctatcggcagagtatgatggatacagtagtgaagcatcaatagatgaaggaaactgcattcagagaatgagaagaacacccccgctggatgaattgcagccaccaccatatcaggatgacagtggttctccccatctgtcatgtacaccctcagaaattggggacagtaaatgtgaattttcccactgcagcaacagtccaagatgctcatataacaagtgcccaagtgaaggaagcacaggtcatgaaatagaaagttttcataataaaggatatgaagaagatgttccaagtgacagcactgcagtcctgagccctgaagatatgtcagctcaaggatcatcttcgcagcttcctaaaccttttgatcctgagccagaagctaaatatggcacactggatgtgacttttgactatgactcacaagaacagaagcttctggtaacagtgacagctgtcacagacatcccaacatataacaggacaggtggcaactcatggcaagtacaccttgttcttctacctataaagaaacagagagcaaaaaccagcatccagagaggaccatgccctgtcttcacagaaacatttaaatttaatcatgttgaatctgagatgattggaaattatgcagttcggtttagactgtatggtgtacatcgcatgaaaaaagaaaagattgtgggggaaaagattttttatttaacaaaattgaatcttcaagggaaaatgtcattgcctgtgatattggaaccttcttacaatcattctggctgtgactcccaaatgagcgtgtcagaaatgtcgtgtagtgaaagtacatcctcatgtcagtctcttgaacatggctcagttccagaaattcttattggcctgctttataatgccacaactggaagactatcagcagaagtgataaaaggcagccacttcaaaaatttggcagcaaacagaccacccactttccaccccctgttgtcagatggactgttctgttgtctaaaacacttgataggtggacaggtttatataatccgagatacatatgttaagttaactctactgaattccatgggtcaagagatgtccaaatgcaagacatccatccgcagagggcagccaaatccagtatataaggaaacttttgtctttcaagtggccctatttcagctttctgatgtgacactcatactgtctgtgtataacaaacgcagcatgaaaagaaaagagatgataggctggatttctttaggtctcaacagctctggagaagaagaactcaatcactggactgaaatgaaagagtcaaaaggacagcaagtatgtagatggcatgcgttgctagagtcatgatgaatagaataagcaagcagttaccatcaaaggcagcatatttccaattccaacattactgtttctaccaagtcccattagaagagctgttctttgaagaatcatattcaaccttctaccaaaatgctttaagttctatggaaagaacgtctcatactgacataaatgaagaaaatatgtgtatctagtagagcttgtttaggaaactgagaaacgtacactatcattgctaaactaacagtcctccagaaatttaataagatgtttttgatttgaagttaattttaatttagcaaaagagccagtcattttatgaaaaatcaaaattataagtgattttaaaaaccagaattttagttgcaatacaattttaatatcaccctacatattatttataaaacatagtttgactggccagtccctggtgtttgtaatgttctttaatatgaaaaagtagttctccaactctatcataagtcatatctaatggtgaagggtttcagtcacattgaaaattgttttatttcaggcatgttccctttgtgcacttaggttcattgtgcctcagttcctctcaaaagcactaaatctaagtgcaaacaagtattcattttcatacaggaatttttttaatatgttatttttttaaaagttcatttttcatttgcctccgctttcgcctgatccaaagagaccaagtcactgtactggtcccttgcaagtcttctagacaggttgtactgtagaactacgtaactttctgttgaaagcacttcctgtattcttgtattccaatgtaggaagctaatagagcaggactttactttcaaatttctttcagtgattgactcttcaaaattgcagtagtgtgaaaatacattttttacaaactgaaaatacagtagataagctgtcgaaaatggaaaacaattcaattttaattttctgctctgagtatttagtaaccaacactgcgtaaagcaggtagcattcaaaataagaaactgttctctctctaaatcttcactcttacttcaatttatatttgtgatatgaagactatccagttctcagtttgaattggaacatcatgttaaaaacagttatgagattccttatgaagtttctagtaacttgtaactagactttatgaaattaacagataaagttcttcaacgtgatgtcatcttgtgcctttcatgtaagttaaatttgctcatacagcttgaacgttgtatttgcaaaattaagccttcgatttttataaatgtaaagattcctcagaacagtgtcgcaagatctttatttcctctgaagtatgtaaaagttgtataatgtgctaactttttaatggcaaggcactttcatttgtttttatatttaggaactctaatcaggaatattataagctgttttctttttaattttgcttcttacctaatatatcattttatgcatatactttatcagagtatgttttatatatattaaaaatagtttcttttttctccttctcatttctagttaaaatagacaaaaacatactatttaccagttactaaaaagcagtatatcattgcttctagtcccaactaagtactatatattattgtaaactagaacttgttattaccataataacaaaacaatgcgtagatattacttcagcttggctgtactgaaaggccttaaaagaaacccaaaaagaccgtgaacttctgtatttttttagtttaaaaaatggcagctctatgcattcatacacatgaattataagaaaaaatacaaatgctatattggatgacatgaggtttgagaatgtgtgttacagggctgcattaaagggaaaaatccatcttttattgttacatcaatgagctttttccaggatttttcaaataaacaagtaagagttagaacctgaatcaaatggcaaaatatctcatttaagtgttttcagcaacagtatgaaaaaagacttgaagaggggatgtagattttactgagaaattggacttaggcatttgaagctataatgaactttttagactttgaaacaactgactgcattgctaacaactgttatcttcctaataaaaagagttatcagtcttatctgtaactgtaacagagcttagtgaaacacattagtaagaccagcttggtgctttcactcttagtgagaaaaagacctaactaattgttatttgttaaatctaccttttttcagactattcccagaattgtgtgtgtgatttgatacatccctagggatttatctggcataagtatcaaatccttcatggcttaaaaattaataaacagttttttaatatttctggaaagaccctacctccaccccagctgccaagtcctcaaagattataaattatctatatgagtgtatgtatctgtatacacacatgcaccattacacatacaacataaatatgtatatgtatattcatttgtaaaggcaaaggtgccctggctttttcagataactgaatagaaaaacatttcatacatttaggattatttttctcctctatgtatttactagatattatatttggtttgggttgctttctgctgctgttctccttcacacacagcaaaatatacatttgtttctgtagattgacacaacttataataattactcccaaaaagttgtctgttcttttagaaaaggattaaataaggctcaggggacccacttcactctactgaatctaatgtacgagacagtactactgcttctttgtgtgcttgaatttgcatgaaagcttaatagcaaaatcttctatctcagtaattatagcaaatagggacctactggtagggagcaggtgttggctcagaaacctgaaaaagacaacccactttcatacagttctattaaaatcccctaagttttctaataaaatgatatagtccaaatatggcaatcgactggcatttatgggagcctctaaacctggaattatggggtttatttttctcccaaatgagctgcaaaagataattattgctgcccagtaaacaaaatgtatgtcaaatcagtaaagaatttgtttagcataatattgccttatctttcagaagctttcttctatattcttgtgtcttcagtacaatccacttttgtttgaaatccatttgcatattatcttactgtgcatttagtgaattctcaataatgttgtatttgctgacaagaataataaattggaccacaatt

SEQ ID NO: 30655 - DNA, 5189 bp, Homo sapiens
  source 1..5189: mol_type = unassigned DNA
agcgcgtcctccgccagccctcgcgtctgctgcccccgccatccagttggtgcggtccatggcgagcgcatcatggcgattgaaggtggagagagaacctgtggagtacatgaacttatctgtattagaaaagaatctggaatctgagtgcatgctgatctcccattgacttctgttctattactgtaccccatcagagagatgtgaggagttggttgaaattcaaatcgggaacatatccaaagaccacaacatcctttgacaccaacaactgtctatgcttccttagaaggagccacctgacaactgggtggttcaacaaagtggccccaggaaagtatctccagaggcagttggatttttgtcagctgttggggtgtttattatcttgatgctgctcctttttctctatattaataagaagttctgttttgaaaatgttggcgggtttccagatcttggttcagaatacagtacaaggaagaattcacaagataaaatttataattcctacatggacaaagatgagcatggttcatcctctgaaagtgaagatgaagcgctgggtaaatatcatgaggccttatccagaacacacaattccagactaccactggcagattctagacaaaggaactatgcttgggaaacaaggcagaaatacagtcctctatcggcagagtatgatggatacagtagtgaagcatcaatagatgaaggaaactgcattcagagaatgagaagaacacccccgctggatgaattgcagccaccaccatatcaggatgacagtggttctccccatctgtcatgtacaccctcagaaattggggacagtaaatgtgaattttcccactgcagcaacagtccaagatgctcatataacaagtgcccaagtgaaggaagcacaggtcatgaaatagaaagttttcataataaaggatatgaagaagatgttccaagtgacagcactgcagtcctgagccctgaagatatgtcagctcaaggatcatcttcgcagcttcctaaaccttttgatcctgagccagaagctaaatatggcacactggatgtgacttttgactatgactcacaagaacagaagcttctggtaacagtgacagctgtcacagacatcccaacatataacaggacaggtggcaactcatggcaagtacaccttgttcttctacctataaagaaacagagagcaaaaaccagcatccagagaggaccatgccctgtcttcacagaaacatttaaatttaatcatgttgaatctgagatgattggaaattatgcagttcggtttagactgtatggtgtacatcgcatgaaaaaagaaaagattgtgggggaaaagattttttatttaacaaaattgaatcttcaagggaaaatgtcattgcctgtgatattggaaccttcttacaatcattctggctgtgactcccaaatgagcgtgtcagaaatgtcgtgtagtgaaagtacatcctcatgtcagtctcttgaacatggctcagttccagaaattcttattggcctgctttataatgccacaactggaagactatcagcagaagtgataaaaggcagccacttcaaaaatttggcagcaaacagaccacccaatacatatgttaagttaactctactgaattccatgggtcaagagatgtccaaatgcaagacatccatccgcagagggcagccaaatccagtatataaggaaacttttgtctttcaagtggccctatttcagctttctgatgtgacactcatactgtctgtgtataacaaacgcagcatgaaaagaaaagagatgataggctggatttctttaggtctcaacagctctggagaagaagaactcaatcactggactgaaatgaaagagtcaaaaggacagcaagtatgtagatggcatgcgttgctagagtcatgatgaatagaataagcaagcagttaccatcaaaggcagcatatttccaattccaacattactgtttctaccaagtcccattagaagagctgttctttgaagaatcatattcaaccttctaccaaaatgctttaagttctatggaaagaacgtctcatactgacataaatgaagaaaatatgtgtatctagtagagcttgtttaggaaactgagaaacgtacactatcattgctaaactaacagtcctccagaaatttaataagatgtttttgatttgaagttaattttaatttagcaaaagagccagtcattttatgaaaaatcaaaattataagtgattttaaaaaccagaattttagttgcaatacaattttaatatcaccctacatattatttataaaacatagtttgactggccagtccctggtgtttgtaatgttctttaatatgaaaaagtagttctccaactctatcataagtcatatctaatggtgaagggtttcagtcacattgaaaattgttttatttcaggcatgttccctttgtgcacttaggttcattgtgcctcagttcctctcaaaagcactaaatctaagtgcaaacaagtattcattttcatacaggaatttttttaatatgttatttttttaaaagttcatttttcatttgcctccgctttcgcctgatccaaagagaccaagtcactgtactggtcccttgcaagtcttctagacaggttgtactgtagaactacgtaactttctgttgaaagcacttcctgtattcttgtattccaatgtaggaagctaatagagcaggactttactttcaaatttctttcagtgattgactcttcaaaattgcagtagtgtgaaaatacattttttacaaactgaaaatacagtagataagctgtcgaaaatggaaaacaattcaattttaattttctgctctgagtatttagtaaccaacactgcgtaaagcaggtagcattcaaaataagaaactgttctctctctaaatcttcactcttacttcaatttatatttgtgatatgaagactatccagttctcagtttgaattggaacatcatgttaaaaacagttatgagattccttatgaagtttctagtaacttgtaactagactttatgaaattaacagataaagttcttcaacgtgatgtcatcttgtgcctttcatgtaagttaaatttgctcatacagcttgaacgttgtatttgcaaaattaagccttcgatttttataaatgtaaagattcctcagaacagtgtcgcaagatctttatttcctctgaagtatgtaaaagttgtataatgtgctaactttttaatggcaaggcactttcatttgtttttatatttaggaactctaatcaggaatattataagctgttttctttttaattttgcttcttacctaatatatcattttatgcatatactttatcagagtatgttttatatatattaaaaatagtttcttttttctccttctcatttctagttaaaatagacaaaaacatactatttaccagttactaaaaagcagtatatcattgcttctagtcccaactaagtactatatattattgtaaactagaacttgttattaccataataacaaaacaatgcgtagatattacttcagcttggctgtactgaaaggccttaaaagaaacccaaaaagaccgtgaacttctgtatttttttagtttaaaaaatggcagctctatgcattcatacacatgaattataagaaaaaatacaaatgctatattggatgacatgaggtttgagaatgtgtgttacagggctgcattaaagggaaaaatccatcttttattgttacatcaatgagctttttccaggatttttcaaataaacaagtaagagttagaacctgaatcaaatggcaaaatatctcatttaagtgttttcagcaacagtatgaaaaaagacttgaagaggggatgtagattttactgagaaattggacttaggcatttgaagctataatgaactttttagactttgaaacaactgactgcattgctaacaactgttatcttcctaataaaaagagttatcagtcttatctgtaactgtaacagagcttagtgaaacacattagtaagaccagcttggtgctttcactcttagtgagaaaaagacctaactaattgttatttgttaaatctaccttttttcagactattcccagaattgtgtgtgtgatttgatacatccctagggatttatctggcataagtatcaaatccttcatggcttaaaaattaataaacagttttttaatatttctggaaagaccctacctccaccccagctgccaagtcctcaaagattataaattatctatatgagtgtatgtatctgtatacacacatgcaccattacacatacaacataaatatgtatatgtatattcatttgtaaaggcaaaggtgccctggctttttcagataactgaatagaaaaacatttcatacatttaggattatttttctcctctatgtatttactagatattatatttggtttgggttgctttctgctgctgttctccttcacacacagcaaaatatacatttgtttctgtagattgacacaacttataataattactcccaaaaagttgtctgttcttttagaaaaggattaaataaggctcaggggacccacttcactctactgaatctaatgtacgagacagtactactgcttctttgtgtgcttgaatttgcatgaaagcttaatagcaaaatcttctatctcagtaattatagcaaatagggacctactggtagggagcaggtgttggctcagaaacctgaaaaagacaacccactttcatacagttctattaaaatcccctaagttttctaataaaatgatatagtccaaatatggcaatcgactggcatttatgggagcctctaaacctggaattatggggtttatttttctcccaaatgagctgcaaaagataattattgctgcccagtaaacaaaatgtatgtcaaatcagtaaagaatttgtttagcataatattgccttatctttcagaagctttcttctatattcttgtgtcttcagtacaatccacttttgtttgaaatccatttgcatattatcttactgtgcatttagtgaattctcaataatgttgtatttgctgacaagaataataaattggaccacaatt

SEQ ID NO: 30656 - DNA, 1369 bp, Homo sapiens
  source 1..1369: mol_type = unassigned DNA
aagagacggcctggcagcccagccccagccgcccagaccggcgagaccagcctgcgggagcagccccatggcggagcagctggccctggtgattgggggcaccatcggggggctgctgctgctgctgttgatcggggcaagctgctgtctgtggagaaggttctgtgccaccctcacctatgaggagctgcctgggacaccagccatggccaccacagctgcctccagtgggcagcgggacaggccctgccagccgcatgctaggacccaactgagcaggccaccagctgtgccattcgtggtgcccccaacccttcaaggccgagattgggtgcccctgcacagtggagagtgggccgatgccccatgggacccctgcccggcatcagagctgctgcctcacacctccagcggcggccttggagatgcatgtatggtgggggccatcaacccagagctgtacaagttcccggaggacaaaagtgagaccgacttccccgacggctgcctggggcggctgtggttctcggtggaatatgagcaggaggctgagcggctgctggtgggcttgatcaaggcacagcacctgcaagccccctcggagacctgcagccccctggtgaagctctacctgctgcccgatgagcggcgcttcctccaatccaagaccaaacgcaaaacctccaacccgcagtttgacgagcacttcatctttcaggtgtccagcaagaccatcacccagagggtgctgaagttctccgtctaccacgtggacaggcagaggaagcaccagctcctgggccaggtgctcttccccttgaagaatgagaccctagtgggggactgccggcgtgtcatctggagagacctggaggccgagagcctggagcccccctcggagtttggcgacctccagttctgcctcagctacaacgactacctgagccgcctgacggtggttgtgctgcgtgccaagggcctccggctccaggaggacagaggcattgtcagtgtgtttgtcaaagtgtctctgatgaaccacaacaagtttgtcaagtgcaagaagacttcagctgtgctgggctccatcaaccctgtgtacaatgagaccttcagcttcaaggccgatgccaccgagctggataccgctagcctcagcctgactgtggtgcagaacatggaaggggacaagagccagcagctgggccgagtggtggtgggcccctacatgtacacccgcggcagagagctggagcactgggacgagatgctcagcaagcccaaggagctggtgaagcgctggcatgcgctctgccgcaccacggagccctgacccttcgcccagcaccgcggttccgctttgggagcc

SEQ ID NO: 30657 - DNA, 3537 bp, Homo sapiens
  source 1..3537: mol_type = unassigned DNA
gttctaataatcaccataataataggcgctgggtgtacagaggggacccaggcgacgctggcctccatccgataaccaccgtaacaggggctgggccgcgccgctcctccgctctaagtgctctttacatgcttcttaagttaccggcaggccagccgcccttacgagagcccctcacggacattaacccaattgagaagactgaacccagcttacgaacgttaagttgtcccaaatcgcagggctggcgagtgaggagcctgaattggaacccaggagcttctggaacccgctccagaattgcgctctcgaccggtttgtccgctgagagcgaacgggtgcgcgagcgccgcatccctgcccaaggccatcaggcaggcagcgctggggccggggacccgcgcggagactccaccccgggatccgggaaggctcccccgagccggggtcggagctgcggctggaggggcctcggcttgaggaggatctgggagggcgggggctcagtcctggccaccaggtgtgaggggtcgggtgcggagccctgtgtcagacgcggcggtgaaggctgtagccctgctctccgggatgggggtggtactctcaccccaccctgccccaagccgcagggagcccctggcgcccctggcgcccgggacccgccctggctggagccctgcggtttccgggagctcacggtcggctctgcgcccctccaccgccgggcctgggcctgggccagggacgggctggggcgggactgcggcctcggggcgctgggtccctgcccctgccgtgcactgcgcggctccccgcgccgcagctgggcaccagcagcaccacggaccgcccctgtgctcgcccgacggcgccccgcggcgctttaagagacggcctggcagcccagccccagccgcccagaccggcgagaccagcctgcgggagcagccccatggcgggccaccagctgtgccattcgtggtgcccccaacccttcaaggccgagattgggtgcccctgcacagtggagagtgggccgatgccccatgggacccctgcccggcatcagagctgctgcctcacacctccagcggcggccttggagatgcatgtatggtgggggccatcaacccagagctgtacaagttcccggaggacaaaagtgagaccgacttccccgacggctgcctggggcggctgtggttctcggtggaatatgagcaggaggctgagcggctgctggtgggcttgatcaaggcacagcacctgcaagccccctcggagacctgcagccccctggtgaagctctacctgctgcccgatgagcggcgcttcctccaatccaagaccaaacgcaaaacctccaacccgcagtttgacgagcacttcatctttcaggtgtccagcaagaccatcacccagagggtgctgaagttctccgtctaccacgtggacaggcagaggaagcaccagctcctgggccaggtgctcttccccttgaagaatgagaccctagtgggggactgccggcgtgtcatctggagagacctggaggccgagagcctggagcccccctcggagtttggcgacctccagttctgcctcagctacaacgactacctgagccgcctgacggtggttgtgctgcgtgccaagggcctccggctccaggaggacagaggcattgtcagtgtgtttgtcaaagtgtctctgatgaaccacaacaagtttgtcaagtgcaagaagacttcagctgtgctgggctccatcaaccctgtgtacaatgagaccttcagcttcaaggccgatgccaccgagctggataccgctagcctcagcctgactgtggtgcagaacatggaaggggacaagagccagcagctgggccgagtggtggtgggcccctacatgtacacccgcggcagagagctggagcactgggacgagatgctcagcaagcccaaggagctggtgaagcgctggcatgcgctctgccgcaccacggagccctgacccttcgcccagcaccgcggttccgctttgggagccgaccatcctcgcagttgcatgtgacagccacagccacacgcatggacgtttcatccaacagctccccgagctgccagccagcccgagccaggaggacgtgagtgctgatatgcaggagagaagaggggacaaagaagccctggcccggtcagcggctctggccatacagccttccgacacactccctcctccttatctgcggggctgcctgggctcggaatcccggctcctggtcctcacagccctgatttggaccagaatctcagatgctcagaagaaagatcctgtttagtgatgacccagctctacctgctgaatggacctgcagggtaaacttgggtgcctccatctgggaaagctgatgatgtgttcatgcagtcgatgaccctcactgctttttcagccagggtttctctgccttctgcctggcagagaaaacacactgctatggggaaaatcacagggagggcgctgtgaccagcgcactcaggcaccaagtgtcggcatggctcactgtgctgggtgaaggcctccccgagcattaggtcctccacggggctgtgtcaaatgccctcccacattgtgtcaagtctgcccatggcccaccctccccacagtccaaaaccacacagccctggttctccagctgttctgctgctgtttctgtgctctccctgattaagagcattcagttcctgggctctccctttgagcaggaaatggtgaaagcatgtggctatggtatagcccacagggctgagattgctgtgttgcagtattgatgtaaaatttgttaagaaggaagtacccacagatcactgccatcaactccccagaagttgcactcaagctagtgagcagcccttgtgcttgtcacagttactgtaacaggtagtgtgtatttgcacctggcatcgtgcagcctgcacgtcaacacgttgttttgtgtaactagaacagcacatggaaccactatctctttctcttttttccttctttttcttttttttttttttattttaattttttgagacggagtttccctcttgtcacccaggctggagtgcaatggcgtgatctcggctcactgcaccctccacctcccaggttcaagcgattctcctgcctcagcctcccaagtagctgggattactggcgcccgccaccatgcctggctaattttttttatttttagtagagacggaattttaccatgttggctaggctggtctcaaattcctggcctcaggtgatccacctgcctcagcctcccaaagtgctgggattacaggcatgagtcaccgcacccagcccgaccagtatctttttcttatgcagtgaaacaactttagcaaaagaggcaatgaatgttatactgagtttctacctctttaactccacctccaatttctgtcaatctacaaacacaagtgtcgcctcgcagtgtttcgtatgaacagaatatcttgtgtttgctttttgtcactt

SEQ ID NO: 30658 - DNA, 1536 bp, Homo sapiens
  source 1..1536: mol_type = unassigned DNA
actgcgcggctccccgcgccgcagctgggcaccagcagcaccacggaccgcccctgtgctcgcccgacggcgccccgcggcgctttaagagacggcctggcagcccagccccagccgcccagaccggcgagaccagcctgcgggagcagccccatggcggagcagctggccctggtgattgggggcaccatcggggggctgctgctgctgctgttgatcggggcaagctgctgtctgtggagaaggttctgtgccaccctcacctatgaggagctgcctgggacaccagccatggccaccacagctgcctccagtgggcagcgggacaggccctgccagccgcatgctaggacccaactgagcaggccaccagctgtgccattcgtggtgcccccaacccttcaaggccgagattgggtgcccctgcacagtggagagtgggccgatgccccatgggacccctgcccggcatcagagctgctgcctcacacctccagcggcggccttggagatgcatgtatggtgggggccatcaacccagagctgtacaagttcccggaggacaaaagtgagaccgacttccccgacggctgcctggggcggctgtggttctcggtggaatatgagcaggaggctgagcggctgctggtgggcttgatcaaggcacagcacctgcaagccccctcggagacctgcagccccctggtgaagctctacctgctgcccgatgagcggcgcttcctccaatccaagaccaaacgcaaaacctccaacccgcagtttgacgagcacttcatctttcaggtgtccagcaagaccatcacccagagggtgctgaagttctccgtctaccacgtggacaggcagaggaagcaccagctcctgggccaggtgctcttccccttgaagaatgagaccctagtgggggactgccggcgtgtcatctggagagacctggaggccgagagcctggagcccccctcggagtttggcgacctccagttctgcctcagctacaacgactacctgagccgcctgacggtggttgtgctgcgtgccaagggcctccggctccaggaggacagaggcattgtcagtgtgtttgtcaaagtgtctctgatgaaccacaacaagtttgtcaagtgcaagaagacttcagctgtgctgggctccatcaaccctgtgtacaatgagaccttcagcttcaaggccgatgccaccgagctggataccgctagcctcagcctgactgtggtgcagaacatggaaggggacaagcaggctactacagtggaactgtttctgtttcatctgacatccggatagatgccagccacccccacattccaagattccagttctttgatgaaagtctctattccacccatcaagtctgtgtctgataacaccaatatctgggtcattagtggctccgttttgttgtgtctgttttcccctccttcctgttttgtggtgtgtttgatcacttattgttgaatgctaaccattataataaattttagtggctccaggaaa

SEQ ID NO: 30659 - DNA, 753 bp, Homo sapiens
  source 1..753: mol_type = unassigned DNA
gacgagcacttcatctttcaggtgtccagcaagaccatcacccagagggtgctgaagttctccgtctaccacgtggacaggcagaggaagcaccagctcctgggccaggtgctcttccccttgaagaatgagaccctagtgggggactgccggcgtgtcatctggagagacctggaggccgagagcctggagcccccctcggagtttggcgacctccagttctgcctcagctacaacgactacctgagccgcctgacggtggttgtgctgcgtgccaagggcctccggctccaggaggacagaggcattgtcagtgtgtttgtcaaagtgtctctgatgaaccacaacaagtttgtcaagtgcaagaagacttcagctgtgctgggctccatcaaccctgtgtacaatgagaccttcagcttcaaggccgatgccaccgagctggataccgctagcctcagcctgactgtggtgcagaacatggaaggggacaagcaggctactacagtggaactgtttctgtttcatctgacatccggatagatgccagccacccccacattccaagattccagttctttgatgaaagtctctattccacccatcaagtctgtgtctgataacaccaatatctgggtcattagtggctccgttttgttgtgtctgttttcccctccttcctgttttgtggtgtgtttgatcacttattgttgaatgctaaccattataataaattttagtggctccaggaaa

SEQ ID NO: 30660 - DNA, 1478 bp, Homo sapiens
  source 1..1478: mol_type = unassigned DNA
actgcgcggctccccgcgccgcagctgggcaccagcagcaccacggaccgcccctgtgctcgcccgacggcgccccgcggcgctttaagagacggcctggcagcccagccccagccgcccagaccggcgagaccagcctgcgggagcagccccatggcgggccaccagctgtgccattcgtggtgcccccaacccttcaaggccgagattgggtgcccctgcacagtggagagtgggccgatgccccatgggacccctgcccggcatcagagctgctgcctcacacctccagcggcggccttggagatgcatgtatggtgggggccatcaacccagagctgtacaagttcccggaggacaaaagtgagacctgcagccccctggtgaagctctacctgctgcccgatgagcggcgcttcctccaatccaagaccaaacgcaaaacctccaacccgcagtttgacgagcacttcatctttcaggtgtccagcaagaccatcacccagagggtgctgaagttctccgtctaccacgtggacaggcagaggaagcaccagctcctgggccaggtgctcttccccttgaagaatgagaccctagtgggggactgccggcgtgtcatctggagagacctggaggccgagagcctggagcccccctcggagtttggcgacctccagttctgcctcagctacaacgactacctgagccgcctgacggtggttgtgctgcgtgccaagggcctccggctccaggaggacagaggcattgtcagtgtgtttgtcaaagtgtctctgatgaaccacaacaagtttgtcaagtgcaagaagacttcagctgtgctgggctccatcaaccctgtgtacaatgagaccttcagcttcaaggccgatgccaccgagctggataccgctagcctcagcctgactgtggtgcagaacatggaaggggacaagagccagcagctgggccgagtggtggtgggcccctacatgtacacccgcggcagagagctggagcactgggacgagatgctcagcaagcccaaggagctggtgaagcgctggcatgcgctctgccgcaccacggagccctgacccttcgcccagcaccgcggttccgctttgggagccgaccatcctcgcagttgcatgtgacagccacagccacacgcatggacgtttcatccaacagctccccgagctgccagccagcccgagccaggaggacgtgagtgctgatatgcaggagagaagaggggacaaagaagccctggcccggtcagcggctctggccatacagccttccgacacactccctcctccttatctgcggggctgcctgggctcggaatcccggctcctggtcctcacagccctgatttggaccagaatctcagatgctcagaagaaagatcctgtttagtgatgacccagctctacctgctgaatggacctgcaggagcaggctactacagt

SEQ ID NO: 30661 - DNA, 1200 bp, Homo sapiens
  source 1..1200: mol_type = unassigned DNA
actgcgcggctccccgcgccgcagctgggcaccagcagcaccacggaccgcccctgtgctcgcccgacggcgccccgcggcgctttaagagacggcctggcagcccagccccagccgcccagaccggcgagaccagcctgcgggagcagccccatggcggagcagctggccctggtgattgggggcaccatcggggggctgctgctgctgctgttgatcggggcaagctgctgtctgtggagaaggttctgtgccaccctcacctatgaggagctgcctgggacaccagccatggccaccacagctgcctccagtgggcagcgggacaggccctgccagccgcatgctaggacccaactgagcaggccaccagctgtgccattcgtggtgcccccaacccttcaaggccgagattgggtgcccctgcacagtggagagtgggccgatgccccatgggacccctgcccggcatcagagctgctgcctcacacctccagcggcggccttggagatgcatgtatggtgggggccatcaacccagagctgtacaagttcccggaggacaaaagtgagaccgacttccccgacggctgcctggggcggctgtggttctcggtggaatatgagcaggaggctgagcggctgctggtgggcttgatcaaggcacagcacctgcaagccccctcggagacctgcagccccctggtgaagctctacctgctgcccgatgagcggcgcttcctccaatccaagaccaaacgcaaaacctccaacccgcagtttgacgagcacttcatctttcaggtgtccagcaagaccatcacccagagggtgctgaagttctccgtctaccacgtggacaggcagaggaagcaccagctcctgggccaggtgctcttccccttgaagaatgagaccctagtgggggactgccggcgtgtcatctggagagacctggaggccgagagcctggagcccccctcggagtttggcgacctccagttctgcctcagctacaacgactacctgagccgcctgacggtggttgtgctgcgtgccaagggcctccggctccaggaggacagaggcattgtcagtgtgtttgtcaaagtgtctctgatgaaccacaacaagtttgccaaatgcaagcctgggccagacttgggggaggaatcaagaggaagcttaaacttaaaatga

SEQ ID NO: 30662 - DNA, 1331 bp, Homo sapiens
  source 1..1331: mol_type = unassigned DNA
cccagaccggcgagaccagcctgcgggagcagccccatggcggagcagctggccctggtgattgggggcaccatcggggggctgctgctgctgctgttgatcggggcaagctgctgtctgtggagaaggttctgtgccaccctcacctatgaggagctgcctgggacaccagccatggccaccacagctgcctccagtgggcagcgggacaggccctgccagccgcatgctaggacccaactgagcaggccaccagctgtgccattcgtggtgcccccaacccttcaaggccgagattgggtgcccctgcacagtggagagtgggccgatgccccatgggacccctgcccggcatcagagctgctgcctcacacctccagcggcggccttggagatgcatgtatggtgggggccatcaacccagagctgtacaagttcccggaggacaaaagtgagaccgacttccccgacggctgcctggggcggctgtggttctcggtggaatatgagcaggaggctgagcggctgctggtgggcttgatcaaggcacagcacctgcaagccccctcggagacctgcagccccctggtgaagctctacctgctgcccgatgagcggcgcttcctccaatccaagaccaaacgcaaaacctccaacccgcagtttgacgagcacttcatctttcaggtgtccagcaagaccatcacccagagggtgctgaagttctccgtctaccacgtggacaggcagaggaagcaccagctcctgggccaggtgctcttccccttgaagaatgagaccctagtgggggactgccggcgtgtcatctggagagacctggaggccgagagcctggagcccccctcggagtttggcgacctccagttctgcctcagctacaacgactacctgagccgcctgacggtggttgtgctgcgtgccaagggcctccggctccaggaggacagaggcattgtcagtgtgtttgtcaaagtgtctctgatgaaccacaacaagtttgtcaagtgcaagaagacttcagctgtgctgggctccatcaaccctgtgtacaatgagaccttcagcttcaaggccgatgccaccgagctggataccgctagcctcagcctgactgtggtgcagaacatggaaggggacaagcaggctactacagtggaactgtttctgtttcatctgacatccggatagatgccagccacccccacattccaagctcttgccaaactgcagtggctgagcaattggacaagataaagaaataaaagtgatccagatcataaagaaagaagtaaaactatatctgcacatga

SEQ ID NO: 30663 - DNA, 1811 bp, Homo sapiens
  source 1..1811: mol_type = unassigned DNA
agcgacatcatttagtgtggattatggcggggggaaaacattctgaaaagtgaagtgtaacctgggacctgaaaggagatggatgggcactgtcagggtcagggagcctgaagggagaagagctttcttagcctgtgagaggagcctgagcaactaaaaggaggaggtgagatgccccagcctggagagcaaatagcacttaaagacaagatggaaccaaccagggatggccttctgagtcttgtgaattttgaactttgccataagtgcaatgggaagccattttaaacactgaatgacgtgatcaaatatgcaccttagaaagatcatgaagttcattttgtggaaatgagctggaagttttgagagtgaaatattcacagccattaagagacctccaaattaatttctcaacatgcttattctatagttcacattcaatccagagcactgaaggaactgaacaactggacactgtagacatcagatagctggccatggtgttggccatggcgtctcaggatgttcagaacttcttccagcctttctcttcctggatatctcgggtttatgaagctctccagcaagcaggagatatgttatctgcttcgctggttaacataagcaaacaagactctaaattgagtgacaaactagatcaggacttagataatattcagattcaggaaacgtactttgaagatgaagaacaagacaatgattggagtcaagaggatgcaaattccttgtttcttgaagtggatcatttctcatgttgtaatagtgatttgcaggactctgcccaaaattcaagcccaagccttagccaacatgcaaaggactcatgttccacaatgtcccagtggcccaattgggccagtgatgaccgcaagttaccacatgtgctttcttctattgcggaggaagagcatcaccttgaaaagcaaagaagtggccttcaacatggctttgacagccagctccctggtactttagaaactgttaatggaaaaaagcaagtcaacagctttggggatgacgaagagctgtccacatcttctgacagtgacgaggaggtgatcaaacaatttgagatttccgtgtcccggtcccagagtttccgttcagtgacatctgagaaaggaaagcagacaggattggagcagaaaccaaaattcagccgttcgttgttgacacacggagaagatggcacagaagtatctgcctgcgaagatttggatggagccagccaacggcgttattctgagaatctctcctacggtgaagatgaccacatccctgctcactcacagtccccatgtgaaagaggggatgccaaacaccacggcacatctcaccaagagtccagtgtggtccaaagcctcaggcgccaatccacagagggcagcttggagatggagacagcttttaatagccggggatttgaagattcctatgccactgacagctcctccatgtggagtccagaggctaatttgaatcttaaaagaaaaggatatttattagatgtctactgtctgtcaagtcctctactttttacaacatccctacacagaaggaacaggacaggaccaatttgcaggtgccatccggggtctcagagcccatctcaaagtgtggtgacctagatgtcatctttgaatatagagccgccagccagaagctcacagtgaccattgtgagggcacagggcctcccagataaggaccgaagtggtgtcaactcctggcaagttcatgtagtgctgctgcctggtaagaaacacaggggcaggacgaacatacagagag

SEQ ID NO: 30664 - DNA, 3134 bp, Homo sapiens
  source 1..3134: mol_type = unassigned DNA
gggtctgaggttgtaactttaacaggtgtaagtatttctttcctctgtttcagctggaagttttgagagtgaaatattcacagccattaagagacctccaaattaatttctcaacatgcttattctatagttcacattcaatccagagcactgaaggaactgaacaactggacactgtagacatcagatagctggccatggtgttggccatggcgtctcaggatgttcagaacttcttccagcctttctcttcctggatatctcgggtttatgaagctctccagcaagcaggagatatgttatctgcttcgctggttaacataagcaaacaagactctaaattgagtgacaaactagatcaggacttagataatattcagattcaggaaacgtactttgaagatgaagaacaagacaatgattggagtcaagaggatgcaaattccttgtttcttgaagtggatcatttctcatgttgtaatagtgatttgcaggactctgcccaaaattcaagcccaagccttagccaacatgcaaaggactcatgttccacaatgtcccagtggcccaattgggccagtgatgaccgcaagttaccacatgtgctttcttctattgcggaggaagagcatcaccttgaaaagcaaagaagtggccttcaacatggctttgacagccagctccctggtactttagaaactgttaatggaaaaaagcaagtcaacagctttggggatgacgaagagctgtccacatcttctgacagtgacgaggaggtgatcaaacaatttgagatttccgtgtcccggtcccagagtttccgttcagtgacatctgagaaaggaaagcagacaggattggagcagaaaccaaaattcagccgttcgttgttgacacacggagaagatggcacagaagtatctgcctgcgaagatttggatggagccagccaacggcgttattctgagaatctctcctacggtgaagatgaccacatccctgctcactcacagtccccatgtgaaagaggggatgccaaacaccacggcacatctcaccaagagtccagtgtggtccaaagcctcaggcgccaatccacagagggcagcttggagatggagacagcttttaatagccggggatttgaagattcctatgccactgacagctcctccatgtggagtccagaggaacaggacaggaccaatttgcaggtgccatccggggtctcagagcccatctcaaagtgtggtgacctagatgtcatctttgaatatagagccgccagccagaagctcacagtgaccattgtgagggcacagggcctcccagataaggaccgaagtggtgtcaactcctggcaagttcatgtagtgctgctgcctggtaagaaacacaggggcaggacgaacatacagagagggcccaaccccgtcttcagggagaaggtcacctttgccaagctggagcccagagatgtggctgcctgtgctgtccgcttccgcctgtacgctgcccggaagatgacccgagagagaatgatgggagagaaactattctatctcagccacctgcacccagaaggggaaatgaaagtgactctggttctggagccaagaagtaatataagcagtggagggtctccgctcagcccatctgcggtttctcacagtgatagtacttcatccacgcagtcgctgtctcatggaggggcgccagagctgttggtggggctctcgtacaatgccacaacggggcgattatctgtggaaatgatcaaaggcagccatttccgaaacctcgctgttaaccgagcacctgatacatatggaaaactctttctcctcaattctgtgggtcaagagatgtcccgttgcaagacgtccattcggcgtggtcagcccaatcctgtctataaggagacctttgttttccaggtggccctctttcagctgtctgatgtcacgttgatgatttccgtttataacaggcgtactatgaagcgtaaagagatgattggctggattgccctgggccagaacagcagtggagaggaggaacaagatcactgggaggagatgaaggaaaccaaaggccagcagatctgcagatggcacactttgctggaatcctaggtttgctaacctgcatttgtgtgctgtgtccaccttggttacctgtgttgctgtctactgacactaagtgtcctggcaagggtttcagggtttcaaaaacagattccactaacccctaggacattgtgagtgggagttttgggtttctcaatggtctgatttggatttaaatattgtaattttaaaaacacacatacacagtgaagtgtccgtatggaaaatattataccacaattaagaccactgatgagttaatttgtgccaatagatcattgagttttagttcagggtatggggtgaagcttcttctgctgtctctgtttgcttgaagagtaacctgagattgcaagggagctgttaattgttactatttgcaaccatttaggtggatgaatcagaattttcttaatatggtacaaaaaactccaaaatatagatatgaatcagatgctgagcctcataaaagaatcaaactctaatccataaactcttatttcacatttttctctttatcaaagaaacctatttacctaacgagtaaatattataaacttgcacttttaaaataaatttgtattaattaaatacctcttttatcttatattttgtggtttctatgagatttggttagatgaatcattttgaagcaagaaaagagttcagaaactactgttttaagacaacttgtctccttttgaatatgtaagatttcaaacttgtgactttcaaggtttttatgctgtctttctcacccaataagttcttacagaataagaaaacaaaaaacaagactactgcagtcatagatttattgattttttctgcttctggtgttcttttggattatcctttttctatgttcaattatatatactcatatatgaatattttgaatgtactgcatgtaaaccatgctctttttaaactgagtattttccatcactagagcatagtaaattgtacacagtgagtccttaataaatattgatttgattgact

SEQ ID NO: 30665 - DNA, 1898 bp, Homo sapiens
  source 1..1898: mol_type = unassigned DNA
agctgctggctgggctgcctgttgagtcagccttcttccctcacggctcttctcccggtccctgaaactcggctgccaggggagctggagccacctgcgaaggtgtcctcccatactggacccctacaggaagctccgtgtgcccagctggggcacagccccagctgatgccccagaggggccacccatcgcaagaggggctttgggctctgccctccctccccatggcgcatgggccaaagcctgagactgaaggactgttggacctcagcttcctgacagaggaggagcaggaggccattgctggcgtcctccaacgagatgcccgcctgcgccagctggaggaggggcgggtcagcaagctccgggcctcagtggcagaccctgggcagctgaagatcctgacaggggactggttccaggaagcacgctcccagcggcaccacaatgcccacttcggctctgaccttgtccgagcgtctatgcgcaggaagaagagcaccaggggagaccaggctccaggccacgacagggaggctgaggctgctgtgaaagagaaggaagaggggccagagcccaggctcaccattgatgaggcccctcaggagaggctcagggagactgaggcttcagatcctgaggaggcgtcccaggcccaggaagatcctggccaaggagaccaacaggtctgtgccgaggaggctgacccggagctggagcccgcgtcggggggagagcaggagccgcggccccagcaagcccagaccaaggccgcgtcccagatcctggagaatggggaggaggccccggggcccgacccctctctcgaccgcatgctcagcagcagctcctcggtgtccagccttaactcctccacgctgagcggcagccagatgagcctgtcaggcgacgcggaggcggtgcaggtccgcggctccgtgcacttcgcgctgcactacgagccgggcgccgccgagctgcgcgtgcacgtgatccagtgccagggcctggccgccgcccggcgccgccgctcggacccctacgtcaaaagctacctcctcccggataagcagagcaagcgcaagacggcggtgaagaaacggaatctgaatccggttttcaacgagactctccggtactccgtcccgcaggccgagcttcagggccgcgtgctgagcctgtctgtgtggcaccgcgaaagcctgggtcgcaacatctttctgggcgaagttgaagtgcccctggacacgtgggactggggctctgagcccacctggctccccctgcagccccgggtcccaccctctcccgacgaccttccgagccgcgggttactcgccctgtccctcaagtacgtccccgccggctccgagggcgcaggactgcccccgagcggggagctgcacttctgggtgaaggaggctcgggacctcctgccgctgcgggcaggatccctggacacttacgtacaatgcttcgtgctgcctgatgacagccaggccagccgccagcgtacaagggttgtgcgacgcagcctcagccctgtgttcaatcacaccatggtgtacgatggctttgggcctgctgacctgcgccaggcttgtgccgagctctccctctgggaccatggggccctggccaaccgccagctggggggcacacgcctcagcctgggcaccggcagcagctatgggctgcaggtgccctggatggattccacacctgaggagaagcagctgtggcaagccctcctggagcagccgtgcgaatgggtggatggccttctacccctcagaaccaacctggcccccaggacgtagccccaccaagcctctctctctggacccccatctcagggcctgcccttggctaaagtcaataaagtctattctaagagc

SEQ ID NO: 30666 - DNA, 312 bp, Homo sapiens
  source 1..312: mol_type = unassigned DNA
tgcccctcagcgctgggcaaatgctttctttccggagtcactgtggaagctccgtgtgcccagctggggcacagccccagctgatgccccagaggggccacccatcgcaagaggggctttgggctctgccctccctccccatggcgcatgggccaaagcctgagactgaaggactgttggacctcagcttcctgacagaggaggagcaggaggccattgctggcgtcctccaacgagatgcccgcctgcgccagctggaggaggggcgggtcagcaagctccgggcctcagtggcagaccctgggcagctga

SEQ ID NO: 30667 - DNA, 2525 bp, Homo sapiens
  source 1..2525: mol_type = unassigned DNA
ttccctcacggctcttctcccggtccctgaaactcggctgccaggggagctggagccacctgcgaaggtgtcctcccatactggacccctacaggtaacacgtgtcggtgccagggtcccctgccagggtccagagacgcaggcactgccacctggtatcctgagcaccctccagcaccttggggttgggggaggtgggcacatgtctggaactggaacagctggacagatggacagaccctcctcttgaccaatgggtctgtcccaccgtgtcaaaacagcagagaagaccaaactcctacctaactctggaagctccgtgtgcccagctggggcacagccccagctgatgccccagaggggccacccatcgcaagaggggctttgggctctgccctccctccccatggcgcatgggccaaagcctgagactgaaggactgttggacctcagcttcctgacagaggaggagcaggaggccattgctggcgtcctccaacgagatgcccgcctgcgccagctggaggaggggcgggtcagcaagctccgggcctcagtggcagaccctgggcagctgaagatcctgacaggggactggttccaggaagcacgctcccagcggcaccacaatgcccacttcggctctgaccttgtccgagcgtctatgcgcaggaagaagagcaccaggggagaccaggctccaggccacgacagggaggctgaggctgctgtgaaagagaaggaagaggggccagagcccaggctcaccattgatgaggcccctcaggagaggctcagggagactgagggacctgatttcccatcgccttctgtccccctaaaggcttcagatcctgaggaggcgtcccaggcccaggaagatcctggccaaggagaccaacaggtctgtgccgaggaggctgacccggagctggagcccgcgtcggggggagagcaggagccgcggccccagcaagcccaggtaggcgggagtggcccgtggctgctctcaacatccggagcggactccgggcggggagcgctcctgcccagggctgcgagccgcccgcgacccagggcgctcggggcaggggtggggaaagaaggggcgccccgtcacttgccccctctgcagaccaaggccgcgtcccagatcctggagaatggggaggaggccccggggcccgacccctctctcgaccgcatgctcagcagcagctcctcggtgtccagccttaactcctccacgctgagcggcagccagatgagcctgtcaggcgacgcggaggcggtgcaggtccgcggctccgtgcacttcgcgctgcactacgagccgggcgccgccgagctgcgcgtgcacgtgatccagtgccagggcctggccgccgcccggcgccgccgctcggacccgtgagtgccccgccggccaagcggggcgcggctgtcacagcccagcccaccattcacagggtctcggcctcctcgtcctcatcttcaaaatgggaacaacagcgttattgggaggcgtgcgattaagcgagacaatccctgtaaagcgcttagcacgaggcctggcacgtgttcgggatggtggctgggggagcccacaggcaggggagaaggctctgggagggcccctcctcacctcgggttctcacctccccagctacgtcaaaagctacctcctcccggataagcagagcaagcgcaagacggcggtgaagaaacggaatctgaatccggttttcaacgagactctccggtactccgtcccgcaggccgagcttcagggccgcgtgctgagcctgtctgtgtggcaccgcgaaagcctgggtcgcaacatctttctgggcgaagttgaagtgcccctggacacgtgggactggggctctgagcccacctggctccccctgcagccccgggtcccaccctctcccgacgaccttccgagccgcgggttactcgccctgtccctcaagtacgtccccgccggctccgagggcgcaggactgcccccgagcggggagctgcacttctgggtgaaggaggctcgggacctcctgccgctgcgggcaggatccctggacacttacgtacaatgcttcgtgctgcctgatgacagccaggccagccgccagcgtacaagggttgtgcgacgcagcctcagccctgtgttcaatcacaccatggtgtacgatggctttgggcctgctgacctgcgccaggcttgtgccgagctctccctctgggaccatggggccctggccaaccgccagctggggggcacacgcctcagcctgggcaccggcagcagctatgggctgcaggtgccctggatggattccacacctgaggagaagcagctgtggcaagccctcctggagcagccgtgcgaatgggtggatggccttctacccctcagaaccaacctggcccccaggacgtagccccaccaagcctctctctctggacccccatctcagggcctgcccttggctaaagtcaataaagtctattctaagagc

SEQ ID NO: 30668 - DNA, 895 bp, Homo sapiens
  source 1..895: mol_type = unassigned DNA
cagccttaactcctccacgctgagcggcagccagatgagcctgtcaggcgacgcggaggcggtgcaggtccgcggctccgtgcacttcgcgctgcactacgagccgggcgccgccgagctgcgcgtgcacgtgatccagtgccagggcctggccgccgcccggcgccgccgctcggacccgtgagtgccccgccggccaagcggggcgcggctgtcacagcccagcccaccattcacagggtctcggcctcctcgtcctcatcttcaaaatgggaacaacagcgttattgggaggcgtgcgattaagcgagacaatccctgtaaagcgcttagcacgaggcctggcacgtgttcgggatggtggctgggggagcccacaggcaggggagaaggctctgggagggcccctcctcacctcgggttctcacctccccagctacgtcaaaagctacctcctcccggataagcagagcaagcgcaagacggcggtgaagaaacggaatctgaatccggttttcaacgagactctccggtactccgtcccgcaggccgagcttcagggccgcgtgctgagcctgtctgtgtggcaccgcgaaagcctgggtcgcaacatctttctgggcgaagttgaagtgcccctggacacgtgggactggggctctgagcccacctggctccccctgcagccccgggtcccaccctctcccgacgaccttccgagccgcgggttactcgccctgtccctcaagtacgtccccgccggctccgagggcgcaggactgcccccgagcggggagctgcacttctgggtgaaggaggctcgggacctcctgccgctgcgggcaggatccctggacacttacgtacaatggtgaggagtgctggccctccgggc

SEQ ID NO: 30669 - DNA, 4236 bp, Homo sapiens
  source 1..4236: mol_type = unassigned DNA
accccaccttgagctcagccatcctggggtggcaccctacccatacccggccaagtgtttggggagaaaagggctgttggttctaggatgtgccaagcatttgtgcagggcttgacctgaccctcggtctgcccccaggaagctccgtgtgcccagctggggcacagccccagctgatgccccagaggggccacccatcgcaagaggggctttgggctctgccctccctccccatggcgcatgggccaaagcctgagactgaaggactgttggacctcagcttcctgacagaggaggagcaggaggccattgctggcgtcctccaacgagatgcccgcctgcgccagctggaggaggggcgggtcagcaagctccgggcctcagtggcagaccctgggcagctgaagatcctgacaggggactggttccaggaagcacgctcccagcggcaccacaatgcccacttcggctctgaccttgtccgagcgtctatgcgcaggaagaagagcaccaggggagaccaggctccaggccacgacagggaggctgaggctgctgtgaaagagaaggaagaggggccagagcccaggctcaccattgatgaggcccctcaggagaggctcagggagactgagggacctgatttcccatcgccttctgtccccctaaaggcttcagatcctgaggaggcgtcccaggcccaggaagatcctggccaaggagaccaacaggtctgtgccgaggaggctgacccggagctggagcccgcgtcggggggagagcaggagccgcggccccagcaagcccaggtaggcgggagtggcccgtggctgctctcaacatccggagcggactccgggcggggagcgctcctgcccagggctgcgagccgcccgcgacccagggcgctcggggcaggggtggggaaagaaggggcgccccgtcacttgccccctctgcagaccaaggccgcgtcccagatcctggagaatggggaggaggccccggggcccgacccctctctcgaccgcatgctcagcagcagctcctcggtgtccagccttaactcctccacggtgaggcgggagggaggggacccgggcggccggggggtggacccgttccgatgcgtagcccctgcctgcccctccctcgccgcgggacccaccgctgcagccccccagcctgccacctatgacccgggtctgaagcctccgcgctgcccgcggccccgacgtgagccctgcgagcggccctgactcccacccactcccgtccgcagctgagcggcagccagatgagcctgtcaggcgacgcggaggcggtgcaggtccgcggctccgtgcacttcgcgctgcactacgagccgggcgccgccgagctgcgcgtgcacgtgatccagtgccagggcctggccgccgcccggcgccgccgctcggacccgtgagtgccccgccggccaagcggggcgcggctgtcacagcccagcccaccattcacagggtctcggcctcctcgtcctcatcttcaaaatgggaacaacagcgttattgggaggcgtgcgattaagcgagacaatccctgtaaagcgcttagcacgaggcctggcacgtgttcgggatggtggctgggggagcccacaggcaggggagaaggctctgggagggcccctcctcacctcgggttctcacctccccagctacgtcaaaagctacctcctcccggataagcagagcaagcgcaagacggcggtgaagaaacggaatctgaatccggttttcaacgagactctccgggtgaggctgtgaccacgatgcggttccccgttaatgaactggacgcccccttcctgcggggctaggtggcaagggcagccagtaacgtcattgcccggaggatcggcggagggggcccattaactcgttatccagtgttgtcagcctcgtggtgggcgtggtgatagtgcaggtccccattaatgcccttaggggctccccagaattccatcatggtaggaacgcggtaggacctgcctcagccaactcgcgcagcatctacgcgggccaccagcagtgctccactaaagctcacctcctgtcctcagtactccgtcccgcaggccgagcttcagggccgcgtgctgagcctgtctgtgtggcaccgcgaaagcctgggtcgcaacatctttctgggcgaagttgaagtgcccctggacacgtgggactggggctctgagcccacctggctccccctgcagccccgggtgaggcagccaggccgcgtggggagacctgcggcccgggtctcctgcatttaccccaccaggctctcccgcagccccctcacaccccgccttcgacagaacctcccctcaacctcttaacctcatggccccaggcgaagcccggccggccacggccccttccccgagggcgctaggacccctaggttctgcccctgcaggccccgccgtctcttctagccgcaccccatccgggtctgcagaccccaccctcctgaggcccctttccattagcccctgctccacgataagcccgcctctcgcaggtcccaccctctcccgacgaccttccgagccgcgggttactcgccctgtccctcaagtacgtccccgccggctccgagggtgagtgacagccggagaggccaagctggacacgccctgaaaagcgggagactccagtccccgggtttgggggcggtggactccatccgtgtgcgggcctgagccgagcctctccgcaggcgcaggactgcccccgagcggggagctgcacttctgggtgaaggaggctcgggacctcctgccgctgcgggcaggatccctggacacttacgtacaatggtgaggagtgctggccctccgggcttcccattcttttgcctgcagtggagtgcccaacctccacaaacccttactaatcaacctttgatcacgcagcctgggctttcaccactgagcaggggtgaaggggacggtttgagcaaaggcctggagtcagggaagttgaggacacctttgaggagctgcatttcagcgtgactggcgcctataggacttgttgaaaagctgaggctgagggctgcaagggtccttccatagagaacctgggaggccaggctgtggggcttggctgggaacttatagttcagtgtaagcttctaggggacttctaggggtgcctccaggtgctgcccccactgttagagagtgaaatggaggtgggcgggtcacttctgggtgtccactctgatgcagccagaggctgcagtacagaggtactgtacttctgagcaacactgtattttgcagagggggttcccaggctttgaaaaccttggaaacaggcgtgagcaacctcgcccggccaggagctgtaacttttaaagccaggagacctgagaggaggctggtgcaaaggtcccagggcagtgagggtctaaggccaggcaggcaggagccaggggacatggacatatgtgagagagaatgagtgggacgtggtgactggatgactctagggagtgtgaggggggtcacctgatgccaggccacctcccgcacagcttcgtgctgcctgatgacagccaggccagccgccagcgtacaagggttgtgcgacgcagcctcagccctgtgttcaatcacaccatggtgtacgatggctttgggcctgctgacctgcgccaggcttgtgccgagctctccctctgggaccatggggccctggccaaccgccagctggggggcacacgcctcagcctgggcaccggtaagtgggacagcaccctgagacaggccctgggacaggccctgggagatgggggctcagtgtgtggccctggatacctctctgtcctttcctgagctttgatatctactgagaactgagggtggtaacgggggacagtgcataatctgggaccaggcaggtgtttgggggccccaaggtgtccagtgtgatcatgccctcaacccctgcccacccacatccaggcagcagctatgggctgcaggtgccctggatggattccacacctgaggagaagcagctgtggcaagccctcctggagcagccgtgcgaatgggtggatggccttctacccctcagaaccaacctggcccccaggacgtagccccaccaagcctctctctctggacccccatctcagggcctgcccttggctaaagtcaataaagtctattctaagagc

SEQ ID NO: 30670 - DNA, 876 bp, Homo sapiens
  source 1..876: mol_type = unassigned DNA
agccgcggccccagcaagcccaggtaggcgggagtggcccgtggctgctctcaacatccggagcggactccgggcggggagcgctcctgcccagggctgcgagccgcccgcgacccagggcgctcggggcaggggtggggaaagaaggggcgccccgtcacttgccccctctgcagaccaaggccgcgtcccagatcctggagaatggggaggaggccccggggcccgacccctctctcgaccgcatgctcagcagcagctcctcggtgtccagccttaactcctccacgctgagcggcagccagatgagcctgtcaggcgacgcggaggcggtgcaggtccgcggctccgtgcacttcgcgctgcactacgagccgggcgccgccgagctgcgcgtgcacgtgatccagtgccagggcctggccgccgcccggcgccgccgctcggacccctacgtcaaaagctacctcctcccggataagcagagcaagcgcaagacggcggtgaagaaacggaatctgaatccggttttcaacgagactctccggtactccgtcccgcaggccgagcttcagggccgcgtgctgagcctgtctgtgtggcaccgcgaaagcctgggtcgcaacatctttctgggcgaagttgaagtgcccctggacacgtgggactggggctctgagcccacctggctccccctgcagccccgggtcccaccctctcccgacgaccttccgagccgcgggttactcgccctgtccctcaagtacgtccccgccggctccgagggcgcaggactgcccccgagcggggagctgcacttctgggtgaaggaggctcgggacctcctgccgctgcgggcaggatccctggacactt

SEQ ID NO: 30671 - DNA, 2229 bp, Homo sapiens
  source 1..2229: mol_type = unassigned DNA
gtgtgtgcatgtctctcgtgggcatgggtccgggtctgtgtctgcagagggccctttctgggggaacagctgtgcatgcgcctgtctttatgcaggtgtctgtgtgcatgtgcgaccatatctatgcctacatggacccgcgtgtgcacatgtgtctgtgtgttccatcgctgcagtcctgtgtggccctacctcagggtgtgtgcatgtgtgtctcttgcttcttccactgtgtctccaagtgtgttcaagggctagtgtatgcatgtgtgcatgagtgtctctcaccccaccttgagctcagccatcctggggtggcaccctacccatacccggccaagtgtttggggagaaaagggctgttggttctaggatgtgccaagcatttgtgcagggcttgacctgaccctcggtctgcccccaggaagctccgtgtgcccagctggggcacagccccagctgatgccccagaggggccacccatcgcaagaggggctttgggctctgccctccctccccatggcgcatgggccaaagcctgagactgaaggactgttggacctcagcttcctgacagaggaggagcaggaggccattgctggcgtcctccaacgagatgcccgcctgcgccagctggaggaggggcgggtcagcaagctccgggcctcagtggcagaccctgggcagctgaagatcctgacaggggactggttccaggaagcacgctcccagcggcaccacaatgcccacttcggctctgaccttgtccgagcgtctatgcgcaggaagaagagcaccaggggagaccaggctccaggccacgacagggaggctgaggctgctgtgaaagagaaggaagaggggccagagcccaggctcaccattgatgaggcccctcaggagaggctcagggagactgagggacctgatttcccatcgccttctgtccccctaaaggcttcagatcctgaggaggcgtcccaggcccaggaagatcctggccaaggagaccaacaggtctgtgccgaggaggctgacccggagctggagcccgcgtcggggggagagcaggagccgcggccccagcaagcccagaccaaggccgcgtcccagatcctggagaatggggaggaggccccggggcccgacccctctctcgaccgcatgctcagcagcagctcctcggtgtccagccttaactcctccacgctgagcggcagccagatgagcctgtcaggcgacgcggaggcggtgcaggtccgcggctccgtgcacttcgcgctgcactacgagccgggcgccgccgagctgcgcgtgcacgtgatccagtgccagggcctggccgccgcccggcgccgccgctcggacccctacgtcaaaagctacctcctcccggataagcagagcaagcgcaagacggcggtgaagaaacggaatctgaatccggttttcaacgagactctccggtactccgtcccgcaggccgagcttcagggccgcgtgctgagcctgtctgtgtggcaccgcgaaagcctgggtcgcaacatctttctgggcgaagttgaagtgcccctggacacgtgggactggggctctgagcccacctggctccccctgcagccccgggtcccaccctctcccgacgaccttccgagccgcgggttactcgccctgtccctcaagtacgtccccgccggctccgagggcgcaggactgcccccgagcggggagctgcacttctgggtgaaggaggctcgggacctcctgccgctgcgggcaggatccctggacacttacgtacaatgcttcgtgctgcctgatgacagccaggccagccgccagcgtacaagggttgtgcgacgcagcctcagccctgtgttcaatcacaccatggtgtacgatggctttgggcctgctgacctgcgccaggcttgtgccgagctctccctctgggaccatggggccctggccaaccgccagctggggggcacacgcctcagcctgggcaccggcagcagctatgggctgcaggtgccctggatggattccacacctgaggagaagcagctgtggcaagccctcctggagcagccgtgcgaatgggtggatggccttctacccctcagaaccaacctggcccccaggacgtagccccaccaagcctctctctctggacccccatctcagggcctgcccttggctaaagtcaataaagtctattctaagagc

SEQ ID NO: 30672 - DNA, 4293 bp, Homo sapiens
  source 1..4293: mol_type = unassigned DNA
cacccgggccgtgccgccagcgtccgtcgggagagtgaaggctcgcaacgccttgcccgggggaaggtaacgcgccgcgcccggggctgcgcggtttgcaccgccaggccgagggctgggggccagaagacaagagagacggcgaggcgcgctccctgcccggcagcgactcggaggtaggtgatgctctgatgctgctgcctcttatgaattgacgacaggtgcagagagagaataaactgtgtctaagactggaccagagagtgagtgtgctggaagccaccataggaacaagcgacctgtttggcaaggaatacagcatccttctgagagcctcttctcgacactatcccacagaccaggacttcctcatgggaaagagcacttaggatcttgctatcagctgccctaaacttttgctgagccaaaataagactttgatgcagaactgaacaagatatttcatttttgtgtgttttaatcttcctggttgcagtcttagttgttcagccctgagaattttgagccacatttgttgctattatttttgcatgcacttttcaaaatgattgacttaagcttcctgactgaagaggaacaagaggccatcatgaaggttttgcagcgggatgctgctctgaagagggccgaagaagagagagtcagacatttgcctgaaaaaattaaggatgaccagcagctgaagaatatgagtggccaatggttttatgaagccaaggcaaaaaggcacagggacaaaatccatggcgcagatatcatcagagcatctatgagaaagaagaggccccagatagcagctgagcagagtaaagacagagaaaatggggcaaaggaaagctgggtgaataatgtcaacaaagatgctttccttcctccagagctggctggcgttgtagaagagccagaagaagatgcagcaccagcaagcccgagttccagtgtggtaaatccagcttccagtgtgattgatatgtcccaggaaaacacaaggaaaccaaatgtgtctccagagaagcagaggaagaatccgtttaatagctccaagttgccagaaggtcactcatcacaacaaactaaaaatgaacagtcaaaaaatggaagaactggtttatttcagacttcaaaagaggatgaattgtcagagtcaaaagaaaagtcaactgtcgcagatacttcaatccaaaagttagagaaatcaaagcagactttgccaggcctttcaaatgggtcccaaatcaaggctccaatccccaaagccaggaagatgatctacaaatcaactgatttaaacaaagatgataaccagtcttttcctagacaaaggacagactccctgaaagcgagaggggctccgagagggatcctcaagcgcaactccagttccagtagcacagactcagaaacccttcgttataatcacaactttgaacccaaaagcaaaattgtgtcacctggcctaaccatccatgagagaatttctgagaaggagcattctttagaagacaactcttccccaaactccctggagccattaaagcatgtgagattctctgcagtgaaggatgagcttccacagagtcctgggctaatccatggtcgggaagtaggagaatttagtgttttagaatctgacagattgaaaaatggaatggaagatgcaggggacacagaagagtttcagagtgaccctaagccttctcaatacagaaagccttcgctttttcatcaatcaacctcaagcccatatgtatcaaaaagtgaaacacatcagccaatgacttctggttcttttccaattaatgggctgcattctcattcagaagttttaactgcaagaccacagtctatggagaattcaccaaccatcaatgaacccaaagataaatcatcagaattaacaaggcttgaatctgtattacccagaagccctgctgatgaactgtctcattgtgttgagcctgagccatctcaggtgccaggtggcagttctagagaccgtcagcaaggttcagaagaagaacccagtcctgttttgaaaactttggaaaggagtgccgctaggaaaatgccttccaaaagtctagaagacatttcatcagattcatcaaatcaagcaaaagtagataatcagccagaagaattagtgcgtagtgctgaagatgtttccacagtgcctacacaacctgataatccattttctcaccctgacaaactcaaaaggatgagcaagtctgttccagcatttctccaagatgagagtgatgacagagaaacagatacagcatcagaaagcagttaccagctcagcagacacaagaagagcccgagctctttaaccaatcttagcagctcctctggcatgacgtccttgtcttctgtgagtggcagtgtgatgagtgtttatagtggagactttggcaatctggaagttaaaggaaatattcagtttgcaattgaatatgtggagtcactgaaggagttgcatgtttttgtggcccagtgtaaggacttagcagcagcggatgtaaaaaaacagcgttcagacccatatgtaaaggcctatttgctaccagacaaaggcaaaatgggcaagaagaaaacactcgtagtgaagaaaaccttgaatcctgtgtataacgaaatactgcggtataaaattgaaaaacaaatcttaaagacacagaaattgaacctgtccatttggcatcgggatacatttaagcgcaatagtttcctaggggaggtggaacttgatttggaaacatgggactgggataacaaacagaataaacaattgagatggtaccctctgaagcggaagacagcaccagttgcccttgaagcagaaaacagaggtgaaatgaaactagctctccagtatgtcccagagccagtccctggtaaaaagcttcctacaactggagaagtgcacatctgggtgaaggaatgccttgatctaccactgctaaggggaagtcatctaaattcttttgttaaatgtaccatccttccagatacaagtaggaaaagtcgccagaagacaagagctgtagggaaaaccaccaaccctatcttcaaccacactatggtgtatgatgggttcaggcctgaagatctgatggaagcctgtgtagagcttactgtctgggaccattacaaattaaccaaccaatttttgggaggtcttcgtattggctttggaacaggtaaaagttatgggactgaagtggactggatggactctacttcagaggaagttgctctctgggagaagatggtaaactcccccaatacttggattgaagcaacactgcctctcagaatgcttttgattgccaagatttccaaatgagcccaaattccactggctcctccactgaaaactactaaaccggtggaatctgatcttgaaaatctgagtaggtggacaaatatcctcactttctatctattgcacctaaggaatactacacagcatgtaaaagtcaatctgcatgtgcttctttgattacaaggcccaagggatttaaatataacaaaatgtgtaatttgtgactctaatattaaataagatatttgaacaagctaggaaaattgaatttctgctgctgcttcaaagaaaaagctgccccagagcattaaacatggggtattgttaagaagcaaaatgttcttgtttgccatcatgtgtttcacaccacaattctgtgccacagttaagagggtctggtacccttgcaggacctttgtaggttgtgggaaaaagtcgcagaaagatactcaaagtggagcagggaatggagacagacatcagtgatgataaaaaaaaaaatggaccttaagaaactatttactctgtaatctctaataaaatatggaattccatattagggcaatgagactgaaactactggtgtttttctgccttgagaaaacaaacagttaaaacaagcctcaaatgtattttagtgccacccactggccataggtacaattcagttgttggcttgttttgacttaattctaaaataggtctcaagcctgtatttttatgagtttatttttttaaaaccctgcatatatatgattgtttttcttataactttactatatgaaagcagcataagagtagtcacaaacatgttttgcaacaaagttttaattagaatgtaagttgctcagttatactgttcttcttatgtatgtaaaattttcgtattttgtaaaaacccttagaataaattatcatttgatttaaattgtattagaaaa

SEQ ID NO: 30673 - DNA, 4751 bp, Homo sapiens
  source 1..4751: mol_type = unassigned DNA
ctaaaagaaagaatggatgaacccaatgcagaacaggtctataatccctctcagtttgagaatttgagaaagttttgggacttagaagctaattcaaacagtaaggataatgacaagaatattaccaccacaagccaaaaaaattctgcaccttttaataggcagaaacacaaggaattcagcgacattaaattatcaggtaaaaatacccatgaagcagaggtgcttctaagcccaaaaaaagttatggcaagagaggaaatggagaaattaaattcaaagggcatactccaggtgctaccagatgaaatcacatttcctttgagtccacttagaaagtatacttatcagttgccaggaaatgagtcatcaaaggaaaatgtggaaaagaatacggaagggattgttactccagtgtttaaggaagaaaaggattactcagaacaagagattcaagaatccataataaaaaccaatgttttgtctaaagactgcaaagacacttttaatgacagcttgcagaaactgctttcagaaacctcaacaccagcaattcaaccctctggtggaaaagttcatggaaaacaagtgcttgaaccaagtgtttctgaaaataggacatggcctcaaaaaacagattttgctgatactgaggaagaagtcaaaggacctgagaagatcattaatgagcatgttgacaaaacagtagttcatccaaaggttaaacggaactctttgactgctagtctagacaaactcctgaaggaagcaactggaacttcaccctctcccttgcaagccaagttggcgcctgttatcactggaaccaactctaagctggaagaggggagattttttggaaaagggatagaacagagtcacaatacttcagctgataagagagaaatactagctccttttccagtgagagatgaaacttttggaaatacagctctcctcaagaaagctgaaagtggtgagtgccagctaagcacacagaatttgattcagatggctgcagaagattctcatccattggatccaacttcccagctttccagaaagggttcttttggggatgtggccagccctccccaagatatgctttttccccaggatgctcatcttgttccccaggctagggtacacccttctcaaacggaaatttcggagactgtagagaaagtcattcttccacccagacctgtattgaatgatgtaagtgctgcattacagaagctgtgtggagaagtatggttaagttatccagctggaagggaagtaggtcctggagaagtgaacccagaatttcctgaagcagtacagccagtatgtagccccctaaatcctccaggagtgatatcaccatgggctacgatggacaccatagttccagacaggaaggatttttattcctccaatgtagttcctgataaaactcatgaagttggatcttatttagctgcccaaatgtctccatcagaccagacgcttagctcatttgcttccattgttgctcaatatggcaaaggcctccctcaggaagtggaagaaattgtgagggaaacaattgttcaacccaaatcagagttcctcgaattcagtgctggcttagaaaaactactgaaggaagaaactgaaaccttcccctcaaaatatgaaagtgatacagggaatctttctccatcaaagttaataggtagtacagaggagcccaggcgagccacttctgaatgccatcctgaggaattaaaagaaacagtagaaaaggccgaggctccgttaataactgagagtgcttttgatgctggttttgagaaacttcttaaagaaataactgaagctcctccttatcagccccaggtgtcagtgagagaagaaactcacgagaaggagtcctcacagtcagagcagaccaggttcttggggacagtgccccatttttacagggcagcctcacagacctctgaaatgaaggataaaagtaatggtttggaatctcaagtcaaccaatgtgataaaatgttgggaggagacgcacttgtgactgatttattggtagatttttgtggttccagaagtggagttgagatccctagaaccccacaactttatgtggctcatgaaatagggaccattaaaactgtaacccccccagaggacagggacagtgaaagtggggttgcagggggacaagggactcttcaggaacctggctttggagaggcttctgaagcaattagtgtgtccagaaataggcaacccattcctctcctgatgaacaaagaaaactctacaaaaacaagtaaagttgaattgactctagcatcgccatatatgaaacaagagaaagaggaagaaaaagaaggtttctctgagtctgatttttcagatggaaacaccagttctaatgcagagagctggagaaatccttccagttcagaagaagaacccagtcctgttttgaaaactttggaaaggagtgccgctaggaaaatgccttccaaaagtctagaagacatttcatcagattcatcaaatcaagcaaaagtagataatcagccagaagaattagtgcgtagtgctgaagatgatgagaaaccagatcagaagccagttacaaatgaatgcgtaccaagaatttccacagtgcctacacaacctgataatccattttctcaccctgacaaactcaaaaggatgagcaagtctgttccagcatttctccaagatgagagtgatgacagagaaacagatacagcatcagaaagcagttaccagctcagcagacacaagaagagcccgagctctttaaccaatcttagcagctcctctggcatgacgtccttgtcttctgtgagtggcagtgtgatgagtgtttatagtggagactttggcaatctggaagttaaaggaaatattcagtttgcaattgaatatgtggagtcactgaaggagttgcatgtttttgtggcccagtgtaaggacttagcagcagcggatgtaaaaaaacagcgttcagacccatatgtaaaggcctatttgctaccagacaaaggcaaaatgggcaagaagaaaacactcgtagtgaagaaaaccttgaatcctgtgtataacgaaatactgcggtataaaattgaaaaacaaatcttaaagacacagaaattgaacctgtccatttggcatcgggatacatttaagcgcaatagtttcctaggggaggtggaacttgatttggaaacatgggactgggataacaaacagaataaacaattgagatggtaccctctgaagcggaagacagcaccagttgcccttgaagcagaaaacagaggtgaaatgaaactagctctccagtatgtcccagagccagtccctggtaaaaagcttcctacaactggagaagtgcacatctgggtgaaggaatgccttgatctaccactgctaaggggaagtcatctaaattcttttgttaaatgtaccatccttccagatacaagtaggaaaagtcgccagaagacaagagctgtagggaaaaccaccaaccctatcttcaaccacactatggtgtatgatgggttcaggcctgaagatctgatggaagcctgtgtagagcttactgtctgggaccattacaaattaaccaaccaatttttgggaggtcttcgtattggctttggaacaggtaaaagttatgggactgaagtggactggatggactctacttcagaggaagttgctctctgggagaagatggtaaactcccccaatacttggattgaagcaacactgcctctcagaatgcttttgattgccaagatttccaaatgagcccaaattccactggctcctccactgaaaactactaaaccggtggaatctgatcttgaaaatctgagtaggtggacaaatatcctcactttctatctattgcacctaaggaatactacacagcatgtaaaagtcaatctgcatgtgcttctttgattacaaggcccaagggatttaaatataacaaaatgtgtaatttgtgactctaatattaaataagatatttgaacaagctaggaaaattgaatttctgctgctgcttcaaagaaaaagctgccccagagcattaaacatggggtattgttaagaagcaaaatgttcttgtttgccatcatgtgtttcacaccacaattctgtgccacagttaagagggtctggtacccttgcaggacctttgtaggttgtgggaaaaagtcgcagaaagatactcaaagtggagcagggaatggagacagacatcagtgatgataaaaaaaaaaatggaccttaagaaactatttactctgtaatctctaataaaatatggaattccatattagggcaatgagactgaaactactggtgtttttctgccttgagaaaacaaacagttaaaacaagcctcaaatgtattttagtgccacccactggccataggtacaattcagttgttggcttgttttgacttaattctaaaataggtctcaagcctgtatttttatgagtttatttttttaaaaccctgcatatatatgattgtttttcttataactttactatatgaaagcagcataagagtagtcacaaacatgttttgcaacaaagttttaattagaatgtaagttgctcagttatactgttcttcttatgtatgtaaaattttcgtattttgtaaaaacccttagaataaattatcatttgatttaaattgtattagaaaa

SEQ ID NO: 30674 - DNA, 6314 bp, Homo sapiens
  source 1..6314: mol_type = unassigned DNA
atgattaacagttctttaagcatgctcttttcttatttagaaaagtatttctatgttgcagatgaactgtctcattgtgttgagcctgagccatctcaggtgccaggtggcagttctagagaccgtcagcaaggtaagccccctcctctcccggctctaaaagctaagacatcttcacgttctggtccatatgccactgagataaagaagtcaactgatgattccatatttaaagttctagactggtttaaccgaagttcttattcagatgacaataagtcattcctccaacatccccgaggaatagagtccaaagaaaaaacagactcaaaatcacaggttgctgttgacttggtgacagatgacactactttaagagaaaatggctcaaagaccctatcacccagcaaaattgaattgaagcctgtgagatctgactcaccattccaagcagagggagatatgctggtttctgaaagttgccaagataataatgtgaatatcaaatccaaattcatgaatttgtcccaaaaaggcaccccaaaggaaggcccaggtatattgcaaccatttgaaagctatggcaccccaagtcaagggagtaaaaatatggactatagccaagattcaaaaagcccaggaaaagggaatggggcatctccttcaaatagtaactattcctacagtgttctcaaggaatctgatgcagaaaaccaagttccatgcaacactaataatattggcaacttgggtgaagaagaacccaagtttcatgctcatgaagaaaatagaggacactcagaagtgaattttgactcttcaacagttgtcaaagaaccaggtttgaaagataacatgaatgcagagagaaagagcaaagtaggaaatacctatatcctgaaagcctccttagagccagagaatattaagtcaacacctggggttgccaacaatggctctccttggaagaagcctgaggtccaattccagcaagaagctggtgaggttcccaagaaccaagtgcagagagagaaatacaaaagagtgagtgacagaatatccttttgggaaggagagaaagctggtgctaagataactcatgaaaaacccacatcttcatgtagccaggaacaaccttctgctaaagcatatcagcctgtgaagaagtcacagggtgtatcatccatggacagtttatctacagaccagagtgaatataatcaggccattcccaaacgagtggtcttagatgaggatgatcaagcatcccagctctccaattcttattcctcaaataaatctaaagagaccaagccacaaatagcaggtccatccagatactatctttcagctgagcaatcagataaagtgtctctgtttcagaataagaaaaatgagcctataaaaagatcacaagtggcagacagtttgccttctagaagaaacattactttaccagcactgcaacctccctcaaatgtcgggagtgaacgacatgctccattggagaaagacagacctctagttcgtgaatcaaatgccaactttaaagttatgtccctaaaagaaagaatggatgaacccaatgcagaacaggtctataatccctctcagtttgagaatttgagaaagttttgggacttagaagctaattcaaacagtaaggataatgacaagaatattaccaccacaagccaaaaaaattctgcaccttttaataggcagaaacacaaggaattcagcgacattaaattatcaggtaaaaatacccatgaagcagaggtgcttctaagcccaaaaaaagttatggcaagagaggaaatggagaaattaaattcaaagggcatactccaggtgctaccagatgaaatcacatttcctttgagtccacttagaaagtatacttatcagttgccaggaaatgagtcatcaaaggaaaatgtggaaaagaatacggaagggattgttactccagtgtttaaggaagaaaaggattactcagaacaagagattcaagaatccataataaaaaccaatgttttgtctaaagactgcaaagacacttttaatgacagcttgcagaaactgctttcagaaacctcaacaccagcaattcaaccctctggtggaaaagttcatggaaaacaagtgcttgaaccaagtgtttctgaaaataggacatggcctcaaaaaacagattttgctgatactgaggaagaagtcaaaggacctgagaagatcattaatgagcatgttgacaaaacagtagttcatccaaaggttaaacggaactctttgactgctagtctagacaaactcctgaaggaagcaactggaacttcaccctctcccttgcaagccaagttggcgcctgttatcactggaaccaactctaagctggaagaggggagattttttggaaaagggatagaacagagtcacaatacttcagctgataagagagaaatactagctccttttccagtgagagatgaaacttttggaaatacagctctcctcaagaaagctgaaagtggtgagtgccagctaagcacacagaatttgattcagatggctgcagaagattctcatccattggatccaacttcccagctttccagaaagggttcttttggggatgtggccagccctccccaagatatgctttttccccaggatgctcatcttgttccccaggctagggtacacccttctcaaacggaaatttcggagactgtagagaaagtcattcttccacccagacctgtattgaatgatgtaagtgctgcattacagaagctgtgtggagaagtatggttaagttatccagctggaagggaagtaggtcctggagaagtgaacccagaatttcctgaagcagtacagccagtatgtagccccctaaatcctccaggagtgatatcaccatgggctacgatggacaccatagttccagacaggaaggatttttattcctccaatgtagttcctgataaaactcatgaagttggatcttatttagctgcccaaatgtctccatcagaccagacgcttagctcatttgcttccattgttgctcaatatggcaaaggcctccctcaggaagtggaagaaattgtgagggaaacaattgttcaacccaaatcagagttcctcgaattcagtgctggcttagaaaaactactgaaggaagaaactgaaaccttcccctcaaaatatgaaagtgatacagggaatctttctccatcaaagttaataggtagtacagaggagcccaggcgagccacttctgaatgccatcctgaggaattaaaagaaacagtagaaaaggccgaggctccgttaataactgagagtgcttttgatgctggttttgagaaacttcttaaagaaataactgaagctcctccttatcagccccaggtgtcagtgagagaagaaactcacgagaaggagtcctcacagtcagagcagaccaggttcttggggacagtgccccatttttacagggcagcctcacagacctctgaaatgaaggataaaagtaatggtttggaatctcaagtcaaccaatgtgataaaatgttgggaggagacgcacttgtgactgatttattggtagatttttgtggttccagaagtggagttgagatccctagaaccccacaactttatgtggctcatgaaatagggaccattaaaactgtaacccccccagaggacagggacagtgaaagtggggttgcagggggacaagggactcttcaggaacctggctttggagaggcttctgaagcaattagtgtgtccagaaataggcaacccattcctctcctgatgaacaaagaaaactctacaaaaacaagtaaagttgaattgactctagcatcgccatatatgaaacaagagaaagaggaagaaaaagaaggtttctctgagtctgatttttcagatggaaacaccagttctaatgcagagagctggagaaatccttccagttcagaagaagaacccagtcctgttttgaaaactttggaaaggagtgccgctaggaaaatgccttccaaaagtctagaagacatttcatcagattcatcaaatcaagcaaaagtagataatcagccagaagaattagtgcgtagtgctgaagatgtttccacagtgcctacacaacctgataatccattttctcaccctgacaaactcaaaaggatgagcaagtctgttccagcatttctccaagatgagagtgatgacagagaaacagatacagcatcagaaagcagttaccagctcagcagacacaagaagagcccgagctctttaaccaatcttagcagctcctctggcatgacgtccttgtcttctgtgagtggcagtgtgatgagtgtttatagtggagactttggcaatctggaagttaaaggaaatattcagtttgcaattgaatatgtggagtcactgaaggagttgcatgtttttgtggcccagtgtaaggacttagcagcagcggatgtaaaaaaacagcgttcagacccatatgtaaaggcctatttgctaccagacaaaggcaaaatgggcaagaagaaaacactcgtagtgaagaaaaccttgaatcctgtgtataacgaaatactgcggtataaaattgaaaaacaaatcttaaagacacagaaattgaacctgtccatttggcatcgggatacatttaagcgcaatagtttcctaggggaggtggaacttgatttggaaacatgggactgggataacaaacagaataaacaattgagatggtaccctctgaagcggaagacagcaccagttgcccttgaagcagaaaacagaggtgaaatgaaactagctctccagtatgtcccagagccagtccctggtaaaaagcttcctacaactggagaagtgcacatctgggtgaaggaatgccttgatctaccactgctaaggggaagtcatctaaattcttttgttaaatgtaccatccttccagatacaagtaggaaaagtcgccagaagacaagagctgtagggaaaaccaccaaccctatcttcaaccacactatggtgtatgatgggttcaggcctgaagatctgatggaagcctgtgtagagcttactgtctgggaccattacaaattaaccaaccaatttttgggaggtcttcgtattggctttggaacaggtaaaagttatgggactgaagtggactggatggactctacttcagaggaagttgctctctgggagaagatggtaaactcccccaatacttggattgaagcaacactgcctctcagaatgcttttgattgccaagatttccaaatgagcccaaattccactggctcctccactgaaaactactaaaccggtggaatctgatcttgaaaatctgagtaggtggacaaatatcctcactttctatctattgcacctaaggaatactacacagcatgtaaaagtcaatctgcatgtgcttctttgattacaaggcccaagggatttaaatataacaaaatgtgtaatttgtgactctaatattaaataagatatttgaacaagctaggaaaattgaatttctgctgctgcttcaaagaaaaagctgccccagagcattaaacatggggtattgttaagaagcaaaatgttcttgtttgccatcatgtgtttcacaccacaattctgtgccacagttaagagggtctggtacccttgcaggacctttgtaggttgtgggaaaaagtcgcagaaagatactcaaagtggagcagggaatggagacagacatcagtgatgataaaaaaaaaaatggaccttaagaaactatttactctgtaatctctaataaaatatggaattccatattagggcaatgagactgaaactactggtgtttttctgccttgagaaaacaaacagttaaaacaagcctcaaatgtattttagtgccacccactggccataggtacaattcagttgttggcttgttttgacttaattctaaaataggtctcaagcctgtatttttatgagtttatttttttaaaaccctgcatatatatgattgtttttcttataactttactatatgaaagcagcataagagtagtcacaaacatgttttgcaacaaagttttaattagaatgtaagttgctcagttatactgttcttcttatgtatgtaaaattttcgtattttgtaaaaacccttagaataaattatcatttgatttaaattgtattagaaaattagcgtgacttctcattttaaataaaatattttaggaattctaaacatct

SEQ ID NO: 30675 - DNA, 1943 bp, Homo sapiens
  source 1..1943: mol_type = unassigned DNA
acagaagaatagagaggctgttgcagccccgtgctttctcctgctgctggccgattgcttgctctgaactaaccctctaacccttgggagtctgtgtgcagcagtgatgtgagctgcatccgggctgaaatgggagctcccgctatggcactggctcaaggagctaatctaaagagaaagtattttggggaagacatcttggttgcacccctcattgcatcttgactaattgcttccaactccgggggcttccagggacaatctcattgttcttttctctccaagggtcagccatgttaaccatttgttaatttcttctgaacagatcaagcaaaagtagataatcagccagaagaattagtgcgtagtgctgaagatgagtgatgacagagaaacagatacagcatcagaaagcagttaccagctcagcagacacaagaagagcccgagctctttaaccaatcttagcagctcctctggcatgacgtccttgtcttctgtgagtggcagtgtgatgagtgtttatagtggagactttggcaatctggaagttaaaggaaatattcagtttgcaattgaatatgtggagtcactgaaggagttgcatgtttttgtggcccagtgtaaggacttagcagcagcggatgtaaaaaaacagcgttcagacccatatgtaaaggcctatttgctaccagacaaaggcaaaatgggcaagaagaaaacactcgtagtgaagaaaaccttgaatcctgtgtataacgaaatactgcggtataaaattgaaaaacaaatcttaaagacacagaaattgaacctgtccatttggcatcgggatacatttaagcgcaatagtttcctaggggaggtggaacttgatttggaaacatgggactgggataacaaacagaataaacaattgagatggtaccctctgaagcggaagacagcaccagttgcccttgaagcagaaaacagaggtgaaatgaaactagctctccagtatgtcccagagccagtccctggtaaaaagcttcctacaactggagaagtgcacatctgggtgaaggaatgccttgatctaccactgctaaggggaagtcatctaaattcttttgttaaatgtaccatccttccagatacaagtaggaaaagtcgccagaagacaagagctgtagggaaaaccaccaaccctatcttcaaccacactatggtgtatgatgggttcaggcctgaagatctgatggaagcctgtgtagagcttactgtctgggaccattacaaattaaccaaccaatttttgggaggtcttcgtattggctttggaacaggtaaaagttatgggactgaagtggactggatggactctacttcagaggaagttgctctctgggagaagatggtaaactcccccaatacttggattgaagcaacactgcctctcagaatgcttttgattgccaagatttccaaatgagcccaaattccactggctcctccactgaaaactactaaaccggtggaatctgatcttgaaaatctgagtaggtggacaaatatcctcactttctatctattgcacctaaggaatactacacagcatgtaaaagtcaatctgcatgtgcttctttgattacaaggcccaagggatttaaatataacaaaatgtgtaatttgtgactctaatattaaataagatatttgaacaagctaggaaaattgaatttctgctgctgcttcaaagaaaaagctgccccagagcattaaacatggggtattgttaagaagcaaaatgttcttgtttgccatcatgtgtttcacaccacaattctgtgccacagttaagagggtctggtacccttgcaggacctttgtaggttgtgggaaaaagtcgcagaaagatactcaaagtggagcagggaatggagacagacatcagtgatgat

SEQ ID NO: 30676 - DNA, 4275 bp, Homo sapiens
  source 1..4275: mol_type = unassigned DNA
gggcgacacccgggccgtgccgccagcgtccgtcgggagagtgaaggctcgcaacgccttgcccgggggaaggtaacgcgccgcgcccggggctgcgcggtttgcaccgccaggccgagggctgggggccagaagacaagagagacggcgaggcgcgctccctgcccggcagcgactcggaggtaggtgatgctctgatgctgctgcctcttatgaattgacgacaggtgcagagagagaataaactgtgtctaagactggaccagagagtgagtgtgctggaagccaccataggaacaagcgacctgtttggcaaggaatacagcatccttctgagagcctcttctcgacactatcccacagaccaggacttcctcatgggaaagagcacttaggatcttgctatcagctgccctaaacttttgctgagccaaaataagactttgatgcagaactgaacaagatatttcatttttgtgtgttttaatcttcctggttgcagtcttagttgttcagccctgagaattttgagccacatttgttgctattatttttgcatgcacttttcaaaatgattgacttaagcttcctgactgaagaggaacaagaggccatcatgaaggttttgcagcgggatgctgctctgaagagggccgaagaagagagagtcagacatttgcctgaaaaaattaaggatgaccagcagctgaagaatatgagtggccaatggttttatgaagccaaggcaaaaaggcacagggacaaaatccatggcgcagatatcatcagagcatctatgagaaagaagaggccccagatagcagctgagcagagtaaagacagagaaaatggggcaaaggaaagctgggtgaataatgtcaacaaagatgctttccttcctccagagctggctggcgttgtagaagagccagaagaagatgcagcaccagcaagcccgagttccagtgtggtaaatccagcttccagtgtgattgatatgtcccaggaaaacacaaggaaaccaaatgtgtctccagagaagaggaagaatccgtttaatagctccaagttgccagaaggtcactcatcacaacaaactaaaaatgaacagtcaaaaaatggaagaactggtttatttcagacttcaaaagaggatgaattgtcagagtcaaaagaaaagtcaactgtcgcagatacttcaatccaaaagttagagaaatcaaagcagactttgccaggcctttcaaatgggtcccaaatcaaggctccaatccccaaagccaggaagatgatctacaaatcaactgatttaaacaaagatgataaccagtcttttcctagacaaaggacagactccctgaaagcgagaggggctccgagagggatcctcaagcgcaactccagttccagtagcacagactcagaaacccttcgttataatcacaactttgaacccaaaagcaaaattgtgtcacctggcctaaccatccatgagagaatttctgagaaggagcattctttagaagacaactcttccccaaactccctggagccattaaagcatgtgagattctctgcagtgaaggatgagcttccacagagtcctgggctaatccatggtcgggaagtaggagaatttagtgttttagaatctgacagattgaaaaatggaatggaagatgcaggggacacagaagagtttcagagtgaccctaagccttctcaatacagaaagccttcgctttttcatcaatcaacctcaagcccatatgtatcaaaaagtgaaacacatcagccaatgacttctggttcttttccaattaatgggctgcattctcattcagaagttttaactgcaagaccacagtctatggagaattcaccaaccatcaatgaacccaaagataaatcatcagaattaacaaggcttgaatctgtattacccagaagccctgctgatgaactgtctcattgtgttgagcctgagccatctcaggtgccaggtggcagttctagagaccgtcagcaaggttcagaagaagaacccagtcctgttttgaaaactttggaaaggagtgccgctaggaaaatgccttccaaaagtctagaagacatttcatcagattcatcaaatcaagcaaaagtagataatcagccagaagaattagtgcgtagtgctgaagatgatgagaaaccagatcagaagccagttacaaatgaatgcgtaccaagaatttccacagtgcctacacaacctgataatccattttctcaccctgacaaactcaaaaggatgagcaagtctgttccagcatttctccaagatgaggtgagtggcagtgtgatgagtgtttatagtggagactttggcaatctggaagttaaaggaaatattcagtttgcaattgaatatgtggagtcactgaaggagttgcatgtttttgtggcccagtgtaaggacttagcagcagcggatgtaaaaaaacagcgttcagacccatatgtaaaggcctatttgctaccagacaaaggcaaaatgggcaagaagaaaacactcgtagtgaagaaaaccttgaatcctgtgtataacgaaatactgcggtataaaattgaaaaacaaatcttaaagacacagaaattgaacctgtccatttggcatcgggatacatttaagcgcaatagtttcctaggggaggtggaacttgatttggaaacatgggactgggataacaaacagaataaacaattgagatggtaccctctgaagcggaagacagcaccagttgcccttgaagcagaaaacagaggtgaaatgaaactagctctccagtatgtcccagagccagtccctggtaaaaagcttcctacaactggagaagtgcacatctgggtgaaggaatgccttgatctaccactgctaaggggaagtcatctaaattcttttgttaaatgtaccatccttccagatacaagtaggaaaagtcgccagaagacaagagctgtagggaaaaccaccaaccctatcttcaaccacactatggtgtatgatgggttcaggcctgaagatctgatggaagcctgtgtagagcttactgtctgggaccattacaaattaaccaaccaatttttgggaggtcttcgtattggctttggaacaggtaaaagttatgggactgaagtggactggatggactctacttcagaggaagttgctctctgggagaagatggtaaactcccccaatacttggattgaagcaacactgcctctcagaatgcttttgattgccaagatttccaaatgagcccaaattccactggctcctccactgaaaactactaaaccggtggaatctgatcttgaaaatctgagtaggtggacaaatatcctcactttctatctattgcacctaaggaatactacacagcatgtaaaagtcaatctgcatgtgcttctttgattacaaggcccaagggatttaaatataacaaaatgtgtaatttgtgactctaatattaaataagatatttgaacaagctaggaaaattgaatttctgctgctgcttcaaagaaaaagctgccccagagcattaaacatggggtattgttaagaagcaaaatgttcttgtttgccatcatgtgtttcacaccacaattctgtgccacagttaagagggtctggtacccttgcaggacctttgtaggttgtgggaaaaagtcgcagaaagatactcaaagtggagcagggaatggagacagacatcagtgatgataaaaaaaaaaatggaccttaagaaactatttactctgtaatctctaataaaatatggaattccatattagggcaatgagactgaaactactggtgtttttctgccttgagaaaacaaacagttaaaacaagcctcaaatgtattttagtgccacccactggccataggtacaattcagttgttggcttgttttgacttaattctaaaataggtctcaagcctgtatttttatgagtttatttttttaaaaccctgcatatatatgattgtttttcttataactttactatatgaaagcagcataagagtagtcacaaacatgttttgcaacaaagttttaattagaatgtaagttgctcagttatactgttcttcttatgtatgtaaaattttcgtattttgtaaaaacccttagaataaattatcatttgatttaaattgtattagaaaattagcgtgacttctcattttaaataaaatattttaggaattctaaacatct

SEQ ID NO: 30677 - DNA, 2733 bp, Homo sapiens
  source 1..2733: mol_type = unassigned DNA
atgattgacttaagcttcctgactgaagaggaacaagaggccatcatgaaggttttgcagcgggatgctgctctgaagagggccgaagaagagagagtcagacatttgcctgaaaaaattaaggatgaccagcagctgaagaatatgagtggccaatggttttatgaagccaaggcaaaaaggcacagggacaaaatccatggcgcagatatcatcagagcatctatgagaaagaagaggccccagatagcagctgagcagagtaaagacagagaaaatggggcaaaggaaagctgggtgaataatgtcaacaaagatgctttccttcctccagagctggctggcgttgtagaagagccagaagaagatgcagcaccagcaagcccgagttccagtgtggtaaatccagcttccagtgtgattgatatgtcccaggaaaacacaaggaaaccaaatgtgtctccagagaagaggaagaatccgtttaatagctccaagttgccagaaggtcactcatcacaacaaactaaaaatgaacagtcaaaaaatggaagaactggtttatttcagacttcaaaagaggatgaattgtcagagtcaaaagaaaagtcaactgtcgcagatacttcaatccaaaagttagagaaatcaaagcagactttgccaggcctttcaaatgggtcccaaatcaaggctccaatccccaaagccaggaagatgatctacaaatcaactgatttaaacaaagatgataaccagtcttttcctagacaaaggacagactccctgaaagcgagaggggctccgagagggatcctcaagcgcaactccagttccagtagcacagactcagaaacccttcgttataatcacaactttgaacccaaaagcaaaattgtgtcacctggcctaaccatccatgagagaatttctgagaaggagcattctttagaagacaactcttccccaaactccctggagccattaaagcatgtgagattctctgcagtgaaggatgagcttccacagagtcctgggctaatccatggtcgggaagtaggagaatttagtgttttagaatctgacagattgaaaaatggaatggaagatgcaggggacacagaagagtttcagagtgaccctaagccttctcaatacagaaagccttcgctttttcatcaatcaacctcaagcccatatgtatcaaaaagtgaaacacatcagccaatgacttctggttcttttccaattaatgggctgcattctcattcagaagttttaactgcaagaccacagtctatggagaattcaccaaccatcaatgaacccaaagataaatcatcagaattaacaaggcttgaatctgtattacccagaagccctgctgatgaactgtctcattgtgttgagcctgagccatctcaggtgccaggtggcagttctagagaccgtcagcaaggttcagaagaagaacccagtcctgttttgaaaactttggaaaggagtgccgctaggaaaatgccttccaaaagtctagaagacatttcatcagattcatcaaatcaagcaaaagtagataatcagccagaagaattagtgcgtagtgctgaagatgatgagaaaccagatcagaagccagttacaaatgaatgcgtaccaagaatttccacagtgcctacacaacctgataatccattttctcaccctgacaaactcaaaaggatgagcaagtctgttccagcatttctccaagatgaggtgagtggcagtgtgatgagtgtttatagtggagactttggcaatctggaagttaaaggaaatattcagtttgcaattgaatatgtggagtcactgaaggagttgcatgtttttgtggcccagtgtaaggacttagcagcagcggatgtaaaaaaacagcgttcagacccatatgtaaaggcctatttgctaccagacaaaggcaaaatgggcaagaagaaaacactcgtagtgaagaaaaccttgaatcctgtgtataacgaaatactgcggtataaaattgaaaaacaaatcttaaagacacagaaattgaacctgtccatttggcatcgggatacatttaagcgcaatagtttcctaggggaggtggaacttgatttggaaacatgggactgggataacaaacagaataaacaattgagatggtaccctctgaagcggaagacagcaccagttgcccttgaagcagaaaacagaggtgaaatgaaactagctctccagtatgtcccagagccagtccctggtaaaaagcttcctacaactggagaagtgcacatctgggtgaaggaatgccttgatctaccactgctaaggggaagtcatctaaattcttttgttaaatgtaccatccttccagatacaagtaggaaaagtcgccagaagacaagagctgtagggaaaaccaccaaccctatcttcaaccacactatggtgtatgatgggttcaggcctgaagatctgatggaagcctgtgtagagcttactgtctgggaccattacaaattaaccaaccaatttttgggaggtcttcgtattggctttggaacaggtaaaagttatgggactgaagtggactggatggactctacttcagaggaagttgctctctgggagaagatggtaaactcccccaatacttggattgaagcaacactgcctctcagaatgcttttgattgccaagatttccaaatga

SEQ ID NO: 30678 - DNA, 633 bp, Homo sapiens
  source 1..633: mol_type = unassigned DNA
gcagaactctttgtaaaggcaggaagagtggagtgaattcctgggttaagttattcttctgtttgattctcaagtctcagcatttagatctctctgggcacaactggtaaaatcttaaattcaaaggaaagagtcccagaacaagggtgggaaatcgtgcctctgcttatataaataactaaatatagacagagggtgaagttgattctgaatataatggagccagaagatcttgaagcttgtcagtggatcagatgagaaaccagatcagaagccagttacaaatgaatgcgtaccaagaatgaaggtgctgaactttggcacatgacttgacaaattcttaagaactgcctaggaaagaagagagtccaggcttcagctctttttccacagtgcctacacaacctgataatccattttctcaccctgacaaactcaaaaggatgagcaagtctgttccagcatttctccaagatgagagtgatgacagagaaacagatacagcatcagaaagcagttaccagctcagcagacacaagaagagcccgagctctttaaccaatcttagcagctcctctggcatgacgtccttgtcttctgtgagtggcagtgtgatgagtgtttatagtggag

SEQ ID NO: 30679 - DNA, 6250 bp, Homo sapiens
  source 1..6250: mol_type = unassigned DNA
atgattaacagttctttaagcatgctcttttcttatttagaaaagtatttctatgttgcagatgaactgtctcattgtgttgagcctgagccatctcaggtgccaggtggcagttctagagaccgtcagcaaggtaagccccctcctctcccggctctaaaagctaagacatcttcacgttctggtccatatgccactgagataaagaagtcaactgatgattccatatttaaagttctagactggtttaaccgaagttcttattcagatgacaataagtcattcctccaacatccccgaggaatagagtccaaagaaaaaacagactcaaaatcacaggttgctgttgacttggtgacagatgacactactttaagagaaaatggctcaaagaccctatcacccagcaaaattgaattgaagcctgtgagatctgactcaccattccaagcagagggagatatgctggtttctgaaagttgccaagataataatgtgaatatcaaatccaaattcatgaatttgtcccaaaaaggcaccccaaaggaaggcccaggtatattgcaaccatttgaaagctatggcaccccaagtcaagggagtaaaaatatggactatagccaagattcaaaaagcccaggaaaagggaatggggcatctccttcaaatagtaactattcctacagtgttctcaaggaatctgatgcagaaaaccaagttccatgcaacactaataatattggcaacttgggtgaagaagaacccaagtttcatgctcatgaagaaaatagaggacactcagaagtgaattttgactcttcaacagttgtcaaagaaccaggtttgaaagataacatgaatgcagagagaaagagcaaagtaggaaatacctatatcctgaaagcctccttagagccagagaatattaagtcaacacctggggttgccaacaatggctctccttggaagaagcctgaggtccaattccagcaagaagctggtgaggttcccaagaaccaagtgcagagagagaaatacaaaagagtgagtgacagaatatccttttgggaaggagagaaagctggtgctaagataactcatgaaaaacccacatcttcatgtagccaggaacaaccttctgctaaagcatatcagcctgtgaagaagtcacagggtgtatcatccatggacagtttatctacagaccagagtgaatataatcaggccattcccaaacgagtggtcttagatgaggatgatcaagcatcccagctctccaattcttattcctcaaataaatctaaagagaccaagccacaaatagcaggtccatccagatactatctttcagctgagcaatcagataaagtgtctctgtttcagaataagaaaaatgagcctataaaaagatcacaagtggcagacagtttgccttctagaagaaacattactttaccagcactgcaacctccctcaaatgtcgggagtgaacgacatgctccattggagaaagacagacctctagttcgtgaatcaaatgccaactttaaagttatgtccctaaaagaaagaatggatgaacccaatgcagaacaggtctataatccctctcagtttgagaatttgagaaagttttgggacttagaagctaattcaaacagtaaggataatgacaagaatattaccaccacaagccaaaaaaattctgcaccttttaataggcagaaacacaaggaattcagcgacattaaattatcaggtaaaaatacccatgaagcagaggtgcttctaagcccaaaaaaagttatggcaagagaggaaatggagaaattaaattcaaagggcatactccaggtgctaccagatgaaatcacatttcctttgagtccacttagaaagtatacttatcagttgccaggaaatgagtcatcaaaggaaaatgtggaaaagaatacggaagggattgttactccagtgtttaaggaagaaaaggattactcagaacaagagattcaagaatccataataaaaaccaatgttttgtctaaagactgcaaagacacttttaatgacagcttgcagaaactgctttcagaaacctcaacaccagcaattcaaccctctggtggaaaagttcatggaaaacaagtgcttgaaccaagtgtttctgaaaataggacatggcctcaaaaaacagattttgctgatactgaggaagaagtcaaaggacctgagaagatcattaatgagcatgttgacaaaacagtagttcatccaaaggttaaacggaactctttgactgctagtctagacaaactcctgaaggaagcaactggaacttcaccctctcccttgcaagccaagttggcgcctgttatcactggaaccaactctaagctggaagaggggagattttttggaaaagggatagaacagagtcacaatacttcagctgataagagagaaatactagctccttttccagtgagagatgaaacttttggaaatacagctctcctcaagaaagctgaaagtggtgagtgccagctaagcacacagaatttgattcagatggctgcagaagattctcatccattggatccaacttcccagctttccagaaagggttcttttggggatgtggccagccctccccaagatatgctttttccccaggatgctcatcttgttccccaggctagggtacacccttctcaaacggaaatttcggagactgtagagaaagtcattcttccacccagacctgtattgaatgatgtaagtgctgcattacagaagctgtgtggagaagtatggttaagttatccagctggaagggaagtaggtcctggagaagtgaacccagaatttcctgaagcagtacagccagtatgtagccccctaaatcctccaggagtgatatcaccatgggctacgatggacaccatagttccagacaggaaggatttttattcctccaatgtagttcctgataaaactcatgaagttggatcttatttagctgcccaaatgtctccatcagaccagacgcttagctcatttgcttccattgttgctcaatatggcaaaggcctccctcaggaagtggaagaaattgtgagggaaacaattgttcaacccaaatcagagttcctcgaattcagtgctggcttagaaaaactactgaaggaagaaactgaaaccttcccctcaaaatatgaaagtgatacagggaatctttctccatcaaagttaataggtagtacagaggagcccaggcgagccacttctgaatgccatcctgaggaattaaaagaaacagtagaaaaggccgaggctccgttaataactgagagtgcttttgatgctggttttgagaaacttcttaaagaaataactgaagctcctccttatcagccccaggtgtcagtgagagaagaaactcacgagaaggagtcctcacagtcagagcagaccaggttcttggggacagtgccccatttttacagggcagcctcacagacctctgaaatgaaggataaaagtaatggtttggaatctcaagtcaaccaatgtgataaaatgttgggaggagacgcacttgtgactgatttattggtagatttttgtggttccagaagtggagttgagatccctagaaccccacaactttatgtggctcatgaaatagggaccattaaaactgtaacccccccagaggacagggacagtgaaagtggggttgcagggggacaagggactcttcaggaacctggctttggagaggcttctgaagcaattagtgtgtccagaaataggcaacccattcctctcctgatgaacaaagaaaactctacaaaaacaagtaaagttgaattgactctagcatcgccatatatgaaacaagagaaagaggaagaaaaagaaggtttctctgagtctgatttttcagatggaaacaccagttctaatgcagagagctggagaaatccttccagttcagaagaagaacccagtcctgttttgaaaactttggaaaggagtgccgctaggaaaatgccttccaaaagtctagaagacatttcatcagattcatcaaatcaagcaaaagtagataatcagccagaagaattagtgcgtagtgctgaagatgtttccacagtgcctacacaacctgataatccattttctcaccctgacaaactcaaaaggatgagcaagtctgttccagcatttctccaagatgagagtgatgacagagaaacagatacagcatcagaaagcagttaccagctcagcagacacaagaagagcccgagctctttaaccaatcttagcagctcctctggcatgacgtccttgtcttctgtgagtggcagtgtgatgagtgtttatagtggagactttggcaatctggaagttaaaggaaatattcagtttgcaattgaatatgtggagtcactgaaggagttgcatgtttttgtggcccagtgtaaggacttagcagcagcggatgtaaaaaaacagcgttcagacccatatgtaaaggcctatttgctaccagacaaaggcaaaatgggcaagaagaaaacactcgtagtgaagaaaaccttgaatcctgtgtataacgaaatactgcggtataaaattgaaaaacaaatcttaaagacacagaaattgaacctgtccatttggcatcgggatacatttaagcgcaatagtttcctaggggaggtggaacttgatttggaaacatgggactgggataacaaacagaataaacaattgagatggtaccctctgaagcggaagacagcaccagttgcccttgaagcagaaaacagaggtgaaatgaaactagctctccagtatgtcccagagccagtccctggtaaaaagcttcctacaactggagaagtgcacatctgggtgaaggaatgccttgatctaccactgctaaggggaagtcatctaaattcttttgttaaatgtaccatccttccagatacaagtaggaaaagtcgccagaagacaagagctgtagggaaaaccaccaaccctatcttcaaccacactatggtgtatgatgggttcaggcctgaagatctgatggaagcctgtgtagagcttactgtctgggaccattacaaattaaccaaccaatttttgggaggtcttcgtattggctttggaacaggtaaaagttatgggactgaagtggactggatggactctacttcagaggaagttgctctctgggagaagatggtaaactcccccaatacttggattgaagcaacactgcctctcagaatgcttttgattgccaagatttccaaatgagcccaaattccactggctcctccactgaaaactactaaaccggtggaatctgatcttgaaaatctgagtaggtggacaaatatcctcactttctatctattgcacctaaggaatactacacagcatgtaaaagtcaatctgcatgtgcttctttgattacaaggcccaagggatttaaatataacaaaatgtgtaatttgtgactctaatattaaataagatatttgaacaagctaggaaaattgaatttctgctgctgcttcaaagaaaaagctgccccagagcattaaacatggggtattgttaagaagcaaaatgttcttgtttgccatcatgtgtttcacaccacaattctgtgccacagttaagagggtctggtacccttgcaggacctttgtaggttgtgggaaaaagtcgcagaaagatactcaaagtggagcagggaatggagacagacatcagtgatgataaaaaaaaaaatggaccttaagaaactatttactctgtaatctctaataaaatatggaattccatattagggcaatgagactgaaactactggtgtttttctgccttgagaaaacaaacagttaaaacaagcctcaaatgtattttagtgccacccactggccataggtacaattcagttgttggcttgttttgacttaattctaaaataggtctcaagcctgtatttttatgagtttatttttttaaaaccctgcatatatatgattgtttttcttataactttactatatgaaagcagcataagagtagtcacaaacatgttttgcaacaaagttttaattagaatgtaagttgctcagttatactgttcttcttatgtatgtaaaattttcgtattttgtaaaaacccttagaataaattatcatttgatttaaa

SEQ ID NO: 30680 - DNA, 2727 bp, Homo sapiens
  source 1..2727: mol_type = unassigned DNA
tttaaccattctaactttgccttgggatattgaaaattctgaatcagtgaggtatctaaataatttatattttcaaaaaataatgtttattttataattctgagtgtaaaacactatcagaaaagtaatcctcatgctcactaaacaaacctactctaagacactcaacaaccagaacagttttattattgagttgtgtacaaaaatcttgactgtccagatgaaatagtttttcagcctgcagtgtgttagtgatatatctcaaggagatgaaccaataaagtacagactttgtggtctgaagctctgttgtgaaaaaataagctaaaccaattcacactgacagtataatttgattcaagtgcagctccagttcaataaaaactaatgtttttaaaattaactttgttttgtatttggttcaactccttgctagttctctctctatataatttataaaaactgcatgttgctaatctcatgatcctgtgcatgtggactactctgcctttaacttttttacaaaaacatgtttgttcatagattaaataaaagtatgttttcaacttaatgtctaatgttttctgacaattgtaagaataattttgaaatggaaatgctgctgtttagtttccacagtgcctacacaacctgataatccattttctcaccctgacaaactcaaaaggatgagcaagtctgttccagcatttctccaagatgagagtgatgacagagaaacagatacagcatcagaaagcagttaccagctcagcagacacaagaagagcccgagctctttaaccaatcttagcagctcctctggcatgacgtccttgtcttctgtgagtggcagtgtgatgagtgtttatagtggagactttggcaatctggaagttaaaggaaatattcagtttgcaattgaatatgtggagtcactgaaggagttgcatgtttttgtggcccagtgtaaggacttagcagcagcggatgtaaaaaaacagcgttcagacccatatgtaaaggcctatttgctaccagacaaaggcaaaatgggcaagaagaaaacactcgtagtgaagaaaaccttgaatcctgtgtataacgaaatactgcggtataaaattgaaaaacaaatcttaaagacacagaaattgaacctgtccatttggcatcgggatacatttaagcgcaatagtttcctaggggaggtggaacttgatttggaaacatgggactgggataacaaacagaataaacaattgagatggtaccctctgaagcggaagacagcaccagttgcccttgaagcagaaaacagaggtgaaatgaaactagctctccagtatgtcccagagccagtccctggtaaaaagcttcctacaactggagaagtgcacatctgggtgaaggaatgccttgatctaccactgctaaggggaagtcatctaaattcttttgttaaatgtaccatccttccagatacaagtaggaaaagtcgccagaagacaagagctgtagggaaaaccaccaaccctatcttcaaccacactatggtgtatgatgggttcaggcctgaagatctgatggaagcctgtgtagagcttactgtctgggaccattacaaattaaccaaccaatttttgggaggtcttcgtattggctttggaacaggtaaaagttatgggactgaagtggactggatggactctacttcagaggaagttgctctctgggagaagatggtaaactcccccaatacttggattgaagcaacactgcctctcagaatgcttttgattgccaagatttccaaatgagcccaaattccactggctcctccactgaaaactactaaaccggtggaatctgatcttgaaaatctgagtaggtggacaaatatcctcactttctatctattgcacctaaggaatactacacagcatgtaaaagtcaatctgcatgtgcttctttgattacaaggcccaagggatttaaatataacaaaatgtgtaatttgtgactctaatattaaataagatatttgaacaagctaggaaaattgaatttctgctgctgcttcaaagaaaaagctgccccagagcattaaacatggggtattgttaagaagcaaaatgttcttgtttgccatcatgtgtttcacaccacaattctgtgccacagttaagagggtctggtacccttgcaggacctttgtaggttgtgggaaaaagtcgcagaaagatactcaaagtggagcagggaatggagacagacatcagtgatgataaaaaaaaaaatggaccttaagaaactatttactctgtaatctctaataaaatatggaattccatattagggcaatgagactgaaactactggtgtttttctgccttgagaaaacaaacagttaaaacaagcctcaaatgtattttagtgccacccactggccataggtacaattcagttgttggcttgttttgacttaattctaaaataggtctcaagcctgtatttttatgagtttatttttttaaaaccctgcatatatatgattgtttttcttataactttactatatgaaagcagcataagagtagtcacaaacatgttttgcaacaaagttttaattagaatgtaagttgctcagttatactgttcttcttatgtatgtaaaattttcgtattttgtaaaaacccttagaataaattatcatttgatttaaa

SEQ ID NO: 30681 - DNA, 740 bp, Homo sapiens
  source 1..740: mol_type = unassigned DNA
cctgcacgctcccttccaaatactgatacccactctcacactagcctgccaagattccacttagcagctggtccccagttacatctcttcagttgacttcccaagcaagcctcccagaggcatatgtgaatgatgatgcacacacacaaatatttgttaatgaccatgggtttgggaaggtgttagtcatggctagcatcataccctttacagaagaatagagaggctgttgcagccccgtgctttctcctgctgctggccgattgcttgctctgaactaaccctctaacccttgggagtctgtgtgcagcagtgatatcaagcaaaagtagataatcagccagaagaattagtgcgtagtgctgaagatgtttccacagtgcctacacaacctgataatccattttctcaccctgacaaactcaaaaggatgagcaagtctgttccagcatttctccaagatgagagtgatgacagagaaacagatacagcatcagaaagcagttaccagctcagcagacacaagaagagcccgagctctttaaccaatcttagcagctcctctggcatgacgtccttgtcttctgtgagtggcagtgtgatgagtgtttatagtggagactttggcaatctggaagttaaaggaaatattcagtttgcaattgaatatgtggagtcactgaaggagttgcatgtttttgtggcccagtgtaaggacttagcagcagcggatgtaaaaa

SEQ ID NO: 30682 - DNA, 3049 bp, Homo sapiens
  source 1..3049: mol_type = unassigned DNA
agtgccgggcgacacccgggccgtgccgccagcgtccgtcgggagagtgaaggctcgcaacgccttgcccgggggaaggtaacgcgccgcgcccggggctgcgcggtttgcaccgccaggccgagggctgggggccagaagacaagagagacggcgaggcgcgctccctgcccggcagcgactcggagacatttgcctgaaaaaattaaggatgaccagcagctgaagaatatgagtggccaatggttttatgaagccaaggcaaaaaggcacagggacaaaatccatggcgcagatatcatcagagcatctatgagaaagaagaggccccagatagcagctgagcagagtaaagacagagaaaatggggcaaaggaaagctgggtgaataatgtcaacaaagatgctttccttcctccagagctggctggcgttgtagaagagccagaagaagatgcagcaccagcaagcccgagttccagtgtggtaaatccagcttccagtgtgattgatatgtcccaggaaaacacaaggaaaccaaatgtgtctccagagaagaggaagaatccgtttaatagctccaagttgccagaaggtcactcatcacaacaaactaaaaatgaacagtcaaaaaatggaagaactggtttatttcagacttcaaaagaggatgaattgtcagagtcaaaagaaaagtcaactgtcgcagatacttcaatccaaaagttagagaaatcaaagcagactttgccaggcctttcaaatgggtcccaaatcaaggctccaatccccaaagccaggaagatgatctacaaatcaactgatttaaacaaagatgataaccagtcttttcctagacaaaggacagactccctgaaagcgagaggggctccgagagggatcctcaagcgcaactccagttccagtagcacagactcagaaacccttcgttataatcacaactttgaacccaaaagcaaaattgtgtcacctggcctaaccatccatgagagaatttctgagaaggagcattctttagaagacaactcttccccaaactccctggagccattaaagcatgtgagattctctgcagtgaaggatgagcttccacagagtcctgggctaatccatggtcgggaagtaggagaatttagtgttttagaatctgacagattgaaaaatggaatggaagatgcaggggacacagaagagtttcagagtgaccctaagccttctcaatacagaaagccttcgctttttcatcaatcaacctcaagcccatatgtatcaaaaagtgaaacacatcagccaatgacttctggttcttttccaattaatgggctgcattctcattcagaagttttaactgcaagaccacagtctatggagaattcaccaaccatcaatgaacccaaagataaatcatcagaattaacaaggcttgaatctgtattacccagaagccctgctgatgaactgtctcattgtgttgagcctgagccatctcaggtgccaggtggcagttctagagaccgtcagcaaggttcagaagaagaacccagtcctgttttgaaaactttggaaaggagtgccgctaggaaaatgccttccaaaagtctagaagacatttcatcagattcatcaaatcaagcaaaagtagataatcagccagaagaattagtgcgtagtgctgaagatgatgagaaaccagatcagaagccagttacaaatgaatgcgtaccaagaatttccacagtgcctacacaacctgataatccattttctcaccctgacaaactcaaaaggatgagcaagtctgttccagcatttctccaagatgagagtgatgacagagaaacagatacagcatcagaaagcagttaccagctcagcagacacaagaagagcccgagctctttaaccaatcttagcagctcctctggcatgacgtccttgtcttctgtgagtggcagtgtgatgagtgtttatagtggagactttggcaatctggaagttaaaggaaatattcagtttgcaattgaatatgtggagtcactgaaggagttgcatgtttttgtggcccagtgtaaggacttagcagcagcggatgtaaaaaaacagcgttcagacccatatgtaaaggcctatttgctaccagacaaaggcaaaatgggcaagaagaaaacactcgtagtgaagaaaaccttgaatcctgtgtataacgaaatactgcggtataaaattgaaaaacaaatcttaaagacacagaaattgaacctgtccatttggcatcgggatacatttaagcgcaatagtttcctaggggaggtggaacttgatttggaaacatgggactgggataacaaacagaataaacaattgagatggtaccctctgaagcggaagacagcaccagttgcccttgaagcagaaaacagaggtgaaatgaaactagctctccagtatgtcccagagccagtccctggtaaaaagcttcctacaactggagaagtgcacatctgggtgaaggaatgccttgatctaccactgctaaggggaagtcatctaaattcttttgttaaatgtaccatccttccagatacaagtaggaaaagtcgccagaagacaagagctgtagggaaaaccaccaaccctatcttcaaccacactatggtgtatgatgggttcaggcctgaagatctgatggaagcctgtgtagagcttactgtctgggaccattacaaattaaccaaccaatttttgggaggtcttcgtattggctttggaacaggtaaaagttatgggactgaagtggactggatggactctacttcagaggaagttgctctctgggagaagatggtaaactcccccaatacttggattgaagcaacactgcctctcagaatgcttttgattgccaagatttccaaatgagcccaaattccactggctcctccactgaaaactactaaaccggtggaatctgatcttgaaaatctgagtaggtggacaaatatcctcactttctatctattgcacctaa

SEQ ID NO: 30683 - DNA, 683 bp, Homo sapiens
  source 1..683: mol_type = unassigned DNA
atatttgttaatgaccatgggtttgggaaggtgttagtcatgatcaagcaaaagtagataatcagccagaagaattagtgcgtagtgctgaagatgatgagaaaccagatcagaagccagttacaaatgaatgcgtaccaagaatttccacagtgcctacacaacctgataatccattttctcaccctgacaaactcaaaaggatgagcaagtctgttccagcatttctccaagatgaggtgagtggcagtgtgatgagtgtttatagtggagactttggcaatctggaagttaaaggaaatattcagtttgcaattgaatatgtggagtcactgaaggagttgcatgtttttgtggcccagtgtaaggacttagcagcagcggatgtaaaaaaacagcgttcagacccatatgtaaaggcctatttgctaccagacaaaggcaaaatgggcaagaagaaaacactcgtagtgaagaaaaccttgaatcctgtgtataacgaaatactgcggtataaaattgaaaaacaaatcttaaagacacagaaattgaacctgtccatttggcatcgggatacatttaagcgcaatagtttcctaggggaggtggaacttgatttggaaacatgggactgggataacaaacagaataaacaattgagatggtaccctctgaagcggaag

SEQ ID NO: 30684 - DNA, 3536 bp, Homo sapiens
  source 1..3536: mol_type = unassigned DNA
ggaacaagcgacctgtttggcaaggaatacagcatccttctgagagcctcttctcgacactatcccacagaccaggacttcctcatgggaaagagcacttaggatcttgctatcagctgccctaaacttttgctgagccaaaataagactttgatgcagaactgaacaagatatttcatttttgtgtgttttaatcttcctggttgcagtcttagttgttcagccctgagaattttgagccacatttgttgctattatttttgcatgcacttttcaaaatgattgacttaagcttcctgactgaagaggaacaagaggccatcatgaaggttttgcagcgggatgctgctctgaagagggccgaagaagagagagtcagacatttgcctgaaaaaattaaggatgaccagcagctgaagaatatgagtggccaatggttttatgaagccaaggcaaaaaggcacagggacaaaatccatggcgcagatatcatcagagcatctatgagaaagaagaggccccagatagcagctgagcagagtaaagacagagaaaatggggcaaaggaaagctgggtgaataatgtcaacaaagatgctttccttcctccagagctggctggcgttgtagaagagccagaagaagatgcagcaccagcaagcccgagttccagtgtggtaaatccagcttccagtgtgattgatatgtcccaggaaaacacaaggaaaccaaatgtgtctccagagaagaggaagaatccgtttaatagctccaagttgccagaaggtcactcatcacaacaaactaaaaatgaacagtcaaaaaatggaagaactggtttatttcagacttcaaaagaggatgaattgtcagagtcaaaagaaaagtcaactgtcgcagatacttcaatccaaaagttagagaaatcaaagcagactttgccaggcctttcaaatgggtcccaaatcaaggctccaatccccaaagccaggaagatgatctacaaatcaactgatttaaacaaagatgataaccagtcttttcctagacaaaggacagactccctgaaagcgagaggggctccgagagggatcctcaagcgcaactccagttccagtagcacagactcagaaacccttcgttataatcacaactttgaacccaaaagcaaaattgtgtcacctggcctaaccatccatgagagaatttctgagaaggagcattctttagaagacaactcttccccaaactccctggagccattaaagcatgtgagattctctgcagtgaaggatgagcttccacagagtcctgggctaatccatggtcgggaagtaggagaatttagtgttttagaatctgacagattgaaaaatggaatggaagatgcaggggacacagaagagtttcagagtgaccctaagccttctcaatacagaaagccttcgctttttcatcaatcaacctcaagcccatatgtatcaaaaagtgaaacacatcagccaatgacttctggttcttttccaattaatgggctgcattctcattcagaagttttaactgcaagaccacagtctatggagaattcaccaaccatcaatgaacccaaagataaatcatcagaattaacaaggcttgaatctgtattacccagaagccctgctgatgaactgtctcattgtgttgagcctgagccatctcaggtgccaggtggcagttctagagaccgtcagcaaggttcagaagaagaacccagtcctgttttgaaaactttggaaaggagtgccgctaggaaaatgccttccaaaagtctagaagacatttcatcagattcatcaaatcaagcaaaagtagataatcagccagaagaattagtgcgtagtgctgaagatgtttccacagtgcctacacaacctgataatccattttctcaccctgacaaactcaaaaggatgagcaagtctgttccagcatttctccaagatgagagtgatgacagagaaacagatacagcatcagaaagcagttaccagctcagcagacacaagaagagcccgagctctttaaccaatcttagcagctcctctggcatgacgtccttgtcttctgtgagtggcagtgtgatgagtgtttatagtggagactttggcaatctggaagttaaaggaaatattcagtttgcaattgaatatgtggagtcactgaaggagttgcatgtttttgtggcccagtgtaaggacttagcagcagcggatgtaaaaaaacagcgttcagacccatatgtaaaggcctatttgctaccagacaaaggcaaaatgggcaagaagaaaacactcgtagtgaagaaaaccttgaatcctgtgtataacgaaatactgcggtataaaattgaaaaacaaatcttaaagacacagaaattgaacctgtccatttggcatcgggatacatttaagcgcaatagtttcctaggggaggtggaacttgatttggaaacatgggactgggataacaaacagaataaacaattgagatggtaccctctgaagcggaagacagcaccagttgcccttgaagcagaaaacagaggtgaaatgaaactagctctccagtatgtcccagagccagtccctggtaaaaagcttcctacaactggagaagtgcacatctgggtgaaggaatgccttgatctaccactgctaaggggaagtcatctaaattcttttgttaaatgtaccatccttccagatacaagtaggaaaagtcgccagaagacaagagctgtagggaaaaccaccaaccctatcttcaaccacactatggtgtatgatgggttcaggcctgaagatctgatggaagcctgtgtagagcttactgtctgggaccattacaaattaaccaaccaatttttgggaggtcttcgtattggctttggaacaggtaaaagttatgggactgaagtggactggatggactctacttcagaggaagttgctctctgggagaagatggtaaactcccccaatacttggattgaagcaacactgcctctcagaatgcttttgattgccaagatttccaaatgagcccaaattccactggctcctccactgaaaactactaaaccggtggaatctgatcttgaaaatctgagtaggtggacaaatatcctcactttctatctattgcacctaaggaatactacacagcatgtaaaagtcaatctgcatgtgcttctttgattacaaggcccaagggatttaaatataacaaaatgtgtaatttgtgactctaatattaaataagatatttgaacaagctaggaaaattgaatttctgctgctgcttcaaagaaaaagctgccccagagcattaaacatggggtattgttaagaagcaaaatgttcttgtttgccatcatgtgtttcacaccacaattctgtgccacagttaagagggtctggtacccttgcaggacctttgtaggttgtgggaaaaagtcgcagaaagatactcaaagtggagcagggaatggagac

SEQ ID NO: 30685 - DNA, 711 bp, Homo sapiens
  source 1..711: mol_type = unassigned DNA
ctcaagtctcagcatttagatctctctgggcacaactggtaaaatcttaaattcaaaggaaagagtcccagaacaagggtgggaaatcgtgcctctgcttatataaataactaaatatagacagagggtgaagttgattctgaatataatggagccagaagatcttgaagcttgtcagtggatcagtttccacagtgcctacacaacctgataatccattttctcaccctgacaaactcaaaaggatgagcaagtctgttccagcatttctccaagatgagagtgatgacagagaaacagatacagcatcagaaagcagttaccagctcagcagacacaagaagagcccgagctctttaaccaatcttagcagctcctctggcatgacgtccttgtcttctgtgagtggcagtgtgatgagtgtttatagtggagactttggcaatctggaagttaaaggaaatattcagtttgcaattgaatatgtggagtcactgaaggagttgcatgtttttgtggcccagtgtaaggacttagcagcagcggatgtaaaaaaacagcgttcagacccatatgtaaaggcctatttgctaccagacaaaggcaaaatgggcaagaagaaaacactcgtagtgaagaaaaccttgaatcctgtgtataacgaaatactgcggtataaaattgaaaaacaaatcttaaagacacagaaat

SEQ ID NO: 30686 - DNA, 1910 bp, Homo sapiens
  source 1..1910: mol_type = unassigned DNA
gtgctttctcctgctgctggccgattgcttgctctgaactaaccctctaacccttgggagtctgtgtgcagcagtgatgtgagctgcatccgggctgaaatgggagctcccgctatggcactggctcaaggagctaatctaaagagaaaatcaagcaaaagtagataatcagccagaagaattagtgcgtagtgctgaagatgatgagaaaccagatcagaagccagttacaaatgaatgcgtaccaagaatttccacagtgcctacacaacctgataatccattttctcaccctgacaaactcaaaaggatgagcaagtctgttccagcatttctccaagatgagagtgatgacagagaaacagatacagcatcagaaagcagttaccagctcagcagacacaagaagagcccgagctctttaaccaatcttagcagctcctctggcatgacgtccttgtcttctgtgagtggcagtgtgatgagtgtttatagtggagactttggcaatctggaagttaaaggaaatattcagtttgcaattgaatatgtggagtcactgaaggagttgcatgtttttgtggcccagtgtaaggacttagcagcagcggatgtaaaaaaacagcgttcagacccatatgtaaaggcctatttgctaccagacaaaggcaaaatgggcaagaagaaaacactcgtagtgaagaaaaccttgaatcctgtgtataacgaaatactgcggtataaaattgaaaaacaaatcttaaagacacagaaattgaacctgtccatttggcatcgggatacatttaagcgcaatagtttcctaggggaggtggaacttgatttggaaacatgggactgggataacaaacagaataaacaattgagatggtaccctctgaagcggaagacagcaccagttgcccttgaagcagaaaacagaggtgaaatgaaactagctctccagtatgtcccagagccagtccctggtaaaaagcttcctacaactggagaagtgcacatctgggtgaaggaatgccttgatctaccactgctaaggggaagtcatctaaattcttttgttaaatgtaccatccttccagatacaagtaggaaaagtcgccagaagacaagagctgtagggaaaaccaccaaccctatcttcaaccacactatggtgtatgatgggttcaggcctgaagatctgatggaagcctgtgtagagcttactgtctgggaccattacaaattaaccaaccaatttttgggaggtcttcgtattggctttggaacaggtaaaagttatgggactgaagtggactggatggactctacttcagaggaagttgctctctgggagaagatggtaaactcccccaatacttggattgaagcaacactgcctctcagaatgcttttgattgccaagatttccaaatgagcccaaattccactggctcctccactgaaaactactaaaccggtggaatctgatcttgaaaatctgagtaggtggacaaatatcctcactttctatctattgcacctaaggaatactacacagcatgtaaaagtcaatctgcatgtgcttctttgattacaaggcccaagggatttaaatataacaaaatgtgtaatttgtgactctaatattaaataagatatttgaacaagctaggaaaattgaatttctgctgctgcttcaaagaaaaagctgccccagagcattaaacatggggtattgttaagaagcaaaatgttcttgtttgccatcatgtgtttcacaccacaattctgtgccacagttaagagggtctggtacccttgcaggacctttgtaggttgtgggaaaaagtcgcagaaagatactcaaagtggagcagggaatggagacagacatcagtgatgat

SEQ ID NO: 30687 - DNA, 2425 bp, Homo sapiens
  source 1..2425: mol_type = unassigned DNA
gaaacagtagaaaaggccgaggctccgttaataactgagagtgcttttgatgctggttttgagaaacttcttaaagaaataactgaagctcctccttatcagccccaggtgtcagtgagagaagaaactcacgagaaggagtcctcacagtcagagcagaccaggttcttggggacagtgccccatttttacagggcagcctcacagacctctgaaatgaaggataaaagtaatggtttggaatctcaagtcaaccaatgtgataaaatgttgggaggagacgcacttgtgactgatttattggtagatttttgtggttccagaagtggagttgagatccctagaaccccacaactttatgtggctcatgaaatagggaccattaaaactgtaacccccccagaggacagggacagtgaaagtggggttgcagggggacaagggactcttcaggaacctggctttggagaggcttctgaagcaattagtgtgtccagaaataggcaacccattcctctcctgatgaacaaagaaaactctacaaaaacaagtaaagttgaattgactctagcatcgccatatatgaaacaagagaaagaggaagaaaaagaaggtttctctgagtctgatttttcagatggaaacaccagttctaatgcagagagctggagaaatccttccagttcagaagaagaacccagtcctgttttgaaaactttggaaaggagtgccgctaggaaaatgccttccaaaagtctagaagacatttcatcagattcatcaaatcaagcaaaagtagataatcagccagaagaattagtgcgtagtgctgaagatgatgagaaaccagatcagaagccagttacaaatgaatgcgtaccaagaatttccacagtgcctacacaacctgataatccattttctcaccctgacaaactcaaaaggatgagcaagtctgttccagcatttctccaagatgaggtgagtggcagtgtgatgagtgtttatagtggagactttggcaatctggaagttaaaggaaatattcagtttgcaattgaatatgtggagtcactgaaggagttgcatgtttttgtggcccagtgtaaggacttagcagcagcggatgtaaaaaaacagcgttcagacccatatgtaaaggcctatttgctaccagacaaaggcaaaatgggcaagaagaaaacactcgtagtgaagaaaaccttgaatcctgtgtataacgaaatactgcggtataaaattgaaaaacaaatcttaaagacacagaaattgaacctgtccatttggcatcgggatacatttaagcgcaatagtttcctaggggaggtggaacttgatttggaaacatgggactgggataacaaacagaataaacaattgagatggtaccctctgaagcggaagacagcaccagttgcccttgaagcagaaaacagaggtgaaatgaaactagctctccagtatgtcccagagccagtccctggtaaaaagcttcctacaactggagaagtgcacatctgggtgaaggaatgccttgatctaccactgctaaggggaagtcatctaaattcttttgttaaatgtaccatccttccagatacaagtaggaaaagtcgccagaagacaagagctgtagggaaaaccaccaaccctatcttcaaccacactatggtgtatgatgggttcaggcctgaagatctgatggaagcctgtgtagagcttactgtctgggaccattacaaattaaccaaccaatttttgggaggtcttcgtattggctttggaacaggtaaaagttatgggactgaagtggactggatggactctacttcagaggaagttgctctctgggagaagatggtaaactcccccaatacttggattgaagcaacactgcctctcagaatgcttttgattgccaagatttccaaatgagcccaaattccactggctcctccactgaaaactactaaaccggtggaatctgatcttgaaaatctgagtaggtggacaaatatcctcactttctatctattgcacctaaggaatactacacagcatgtaaaagtcaatctgcatgtgcttctttgattacaaggcccaagggatttaaatataacaaaatgtgtaatttgtgactctaatattaaataagatatttgaacaagctaggaaaattgaatttctgctgctgcttcaaagaaaaagctgccccagagcattaaacatggggtattgttaagaagcaaaatgttcttgtttgccatcatgtgtttcacaccacaattctgtgccacagttaagagggtctggtacccttgcaggacctttgtaggttgtgggaaaaagtcgcagaaagatactcaaagtggagcagggaatggagacagacatcagtgatgat

SEQ ID NO: 30688 - DNA, 583 bp, Homo sapiens
  source 1..583: mol_type = unassigned DNA
ataaaccctaggcactgggggtatgaagataatgatacacatgtctaccctcagggccacaatattttaaataataatttcccaacagtctttggatatgctaatagggcttaatgaggaaagcagctaaacggaggagccattagatagaaaaccaatgtgctgatggctaaaagtcagtgacatgtagtgggaaacctgaaactttgcttatgaggtcctcctgccagcagtgaaggtgctgaactttggcacatgacttgacaaattcttaagaactgcctaggaaagaagagagtccaggcttcagctctttttccacagtgcctacacaacctgataatccattttctcaccctgacaaactcaaaaggatgagcaagtctgttccagcatttctccaagatgagagtgatgacagagaaacagatacagcatcagaaagcagttaccagctcagcagacacaagaagagcccgagctctttaaccaatcttagcagctcctctggcatgacgtccttgtcttctgtgagtggcagtgtgatgagtgtttatagtggagactttggcaatctggaagt

SEQ ID NO: 30689 - DNA, 1441 bp, Homo sapiens
  source 1..1441: mol_type = unassigned DNA
aaccctctaacccttgggagtctgtgtgcagcagtgatgtgagctgcatccgggctgaaatgggagctcccgctatggcactggctcaaggagctaatctaaagagaaaatcaagcaaaagtagataatcagccagaagaattagtgcgtagtgctgaagatgatgagaaaccagatcagaagccagttacaaatgaatgcgtaccaagaatttccacagtgcctacacaacctgataatccattttctcaccctgacaaactcaaaaggatgagcaagtctgttccagcatttctccaagatgaggtgagtggcagtgtgatgagtgtttatagtggagactttggcaatctggaagttaaaggaaatattcagtttgcaattgaatatgtggagtcactgaaggagttgcatgtttttgtggcccagtgtaaggacttagcagcagcggatgtaaaaaaacagcgttcagacccatatgtaaaggcctatttgctaccagacaaaggcaaaatgggcaagaagaaaacactcgtagtgaagaaaaccttgaatcctgtgtataacgaaatactgcggtataaaattgaaaaacaaatcttaaagacacagaaattgaacctgtccatttggcatcgggatacatttaagcgcaatagtttcctaggggaggtggaacttgatttggaaacatgggactgggataacaaacagaataaacaattgagatggtaccctctgaagcggaagacagcaccagttgcccttgaagcagaaaacagaggtgaaatgaaactagctctccagtatgtcccagagccagtccctggtaaaaagcttcctacaactggagaagtgcacatctgggtgaaggaatgccttgatctaccactgctaaggggaagtcatctaaattcttttgttaaatgtaccatccttccagatacaagtaggaaaagtcgccagaagacaagagctgtagggaaaaccaccaaccctatcttcaaccacactatggtgtatgatgggttcaggcctgaagatctgatggaagcctgtgtagagcttactgtctgggaccattacaaattaaccaaccaatttttgggaggtcttcgtattggctttggaacaggtaaaagttatgggactgaagtggactggatggactctacttcagaggaagttgctctctgggagaagatggtaaactcccccaatacttggattgaagcaacactgcctctcagaatgcttttgattgccaagatttccaaatgagcccaaattccactggctcctccactgaaaactactaaaccggtggaatctgatcttgaaaatctgagtaggtggacaaatatcctcactttctatctattgcacctaaggaatactacacagcatgtaaaagtcaatctgcatgtgcttctttgattac

SEQ ID NO: 30690 - DNA, 2335 bp, Homo sapiens
  source 1..2335: mol_type = unassigned DNA
gagggtgagaagggccggctgccggagctgggttgcgatcttcccggagccggagaccctcccttgaaaccggcactgggacttctcgatctctggaggcacctgttgcaagtgacaggcaactctggtagctctccttgtctggttgttttgaagaaagaagagtagaagaaaaagttgagtaaatcatgtcggagttactggacctttcttttctgtctgaggaggaaaaggatttgattctcagtgttctacagcgagatgaagaggtccggaaagcagatgagaaaaggattaggcgactaaagaatgagttactggagataaaaaggaaaggggccaagaggggcagccaacactacagtgatcggacctgtgcccggtgccaggagagcctgggccgtttgagtcccaaaaccaatacttgtcggggttgtaatcacctggtgtgtcgggactgccgcatacaggaaagcaatggtacctggaggtgcaaggtgtgcgccaaggaaatagagttgaagaaagcaactggggactggttttatgaccagaaagtgaatcgctttgcttaccgcacaggtagtgagataatcaggatgtccctgcgccacaaacctgcagtgagtaaaagagagacagtgggacagtccctccttcatcagacacagatgggtgacatctggccaggaagaaagatcattcaggagcggcagaaggagcccagtgtgctatttgaagtgccaaagctgaaaagtggaaagagtgcattggaagctgagagtgagagtctggatagcttcacagctgactcggatagcacctccaggagagactctctggataaatctggcctctttccagaatggaagaagatgtctgctcccaaatctcaagtagaaaaggaaactcagcctggaggtcaaaatgtggtatttgtggatgagggtgagatgatatttaagaagaacaccagaaaaatcctcaggccttcagagtacactaaatctgtgatagatcttcgcccagaagatgtggtacatgaaagtggctccttgggagacagaagcaaatccgtcccaggcctcaatgtggatatggaagaggaagaagaagaagaagacattgaccacctagtgaagttacatcgccagaagctagccagaagcagcatgcaaagtggctcctccatgagtacgatcggcagcatgatgagcatctacagtgaagctggtgatttcgggaacatctttgtgactggcaggattgccttttccctgaagtatgagcagcaaacccagagtctggttgtccatgtgaaggagtgccatcagctggcctatgctgatgaagccaagaagcgctctaacccatatgtgaagacttaccttctgcctgacaagtcccgccaaggaaaaagaaaaaccagcatcaagcgggacactattaatccactatatgatgagacgctgaggtatgagatcccagaatctctcctggcccagaggaccctgcagttctcagtttggcatcatggtcgttttggcagaaacactttccttggagaggcagagatccagatggattcctggaagcttgataagaaactggatcattgcctccctttacatggaaagatcagtgctgagtccccgactggcttgccatcacacaaaggcgagttggtggtttcattgaaatacatcccagcctccaaaacccctgttggaggtgaccggaaaaagagtaaaggtggggaagggggagagctccaggtgtggatcaaagaagccaagaacttgacggctgccaaagcaggagggacttcagacagctttgtcaagggatacctccttcccatgaggaacaaggccagtaaacgtaaaactcctgtgatgaagaagaccctgaatcctcactacaaccatacatttgtctacaatggtgtgaggctggaagatctacagcatatgtgcctggaactgactgtgtgggaccgggagcccctggccagcaatgacttcctgggaggggtcaggctgggtgttggcactgggatcagtaatggggaagtggtggactggatggactcgactggggaagaagtgagcctgtggcagaagatgcgacagtacccagggtcttgggcagaagggactctgcagctccgttcctcaatggccaagcagaagctgggtttatgagtccctgtcctcttctgcaggtccagccctggcgagggcaggtcagaggaagtgaagaaatcaagagcaaagatttataatttaatgtgtatgtgtgtatgtgtgtatgtgtgtgtgtgtgtgtgtgtgtg

SEQ ID NO: 30691 - DNA, 3737 bp, Homo sapiens
  source 1..3737: mol_type = unassigned DNA
agtcaccttttcgtgggttcctctcacagcgctcggccgtcgagcggggtcgctaacccgcactctcttcggacctacgacatcgcggcttctctggcgttggccagtcagccacaggcaactctggtagctctccttgtctggttgttttgaagaaagaagagtagaagaaaaagttgagtaaatcatgtcggagttactggacctttcttttctgtctgaggaggaaaaggatttgattctcagtgttctacagcgagatgaagaggtccggaaagcagatgagaaaaggattaggcgactaaagaatgagttactggagataaaaaggaaaggggccaagaggggcagccaacactacagtgatcggacctgtgcccggtgccaggagagcctgggccgtttgagtcccaaaaccaatacttgtcggggttgtaatcacctggtgtgtcgggactgccgcatacaggaaagcaatggtacctggaggtgcaaggtgtgcgccaaggaaatagagttgaagaaagcaactggggactggttttatgaccagaaagtgaatcgctttgcttaccgcacaggtagtgagataatcaggatgtccctgcgccacaaacctgcagtgagtaaaagagagacagtgggacagtccctccttcatcagacacagatgggtgacatctggccaggaagaaagatcattcaggagcggcagaaggagcccagtgtgctatttgaagtgccaaagctgaaaagtggaaagagtgcattggaagctgagagtgagagtctggatagcttcacagctgactcggatagcacctccaggagagactctctggataaatctggcctctttccagaatggaagaagatgtctgctcccaaatctcaagtagaaaaggaaactcagcctggaggtcaaaatgtggtatttgtggatgagggtgagatgatatttaagaagaacaccagaaaaatcctcaggccttcagagtacactaaatctgtgatagatcttcgcccagaagatgtggtacatgaaagtggctccttgggagacagaagcaaatccgtcccaggcctcaatgtggatatggaagaggaagaagaagaagaagacattgaccacctagtgaagttacatcgccagaagctagccagaagcagcatgcaaagtggctcctccatgagtacgatcggcagcatgatgagcatctacagtgaagctggtgatttcgggaacatctttgtgactggcaggattgccttttccctgaagtatgagcagcaaacccagagtctggttgtccatgtgaaggagtgccatcagctggcctatgctgatgaagccaagaagcgctctaacccatatgtgaagacttaccttctgcctgacaagtcccgccaaggaaaaagaaaaaccagcatcaagcgggacactattaatccactatatgatgagacgctgaggtatgagatcccagaatctctcctggcccagaggaccctgcagttctcagtttggcatcatggtcgttttggcagaaacactttccttggagaggcagagatccagatggattcctggaagcttgataagaaactggatcattgcctccctttacatggaaagatcagtgctgagtccccgactggcttgccatcacacaaaggcgagttggtggtttcattgaaatacatcccagcctccaaaacccctgttggaggtgaccggaaaaagagtaaaggtggggaagggggagagctccaggtgtggatcaaagaagccaagaacttgacggctgccaaagcaggagggacttcagacagctttgtcaagggatacctccttcccatgaggaacaaggccagtaaacgtaaaactcctgtgatgaagaagaccctgaatcctcactacaaccatacatttgtctacaatggtgtgaggctggaagatctacagcatatgtgcctggaactgactgtgtgggaccgggagcccctggccagcaatgacttcctgggaggggtcaggctgggtgttggcactgggatcagtaatggggaagtggtggactggatggactcgactggggaagaagtgagcctgtggcagaagatgcgacagtacccagggtcttgggcagaagggactctgcagctccgttcctcaatggccaagcagaagctgggtttatgagtccctgtcctcttctgcaggtccagccctggcgagggcaggtcagaggaagtgaagaaatcaagagcaaagatttataatttaatgtgtatgtgtgtatgtgtgtatgtgtgtgtgtgtgtgtgtgtgtgtatgtgtacaaacatgtattttctgcaaatctcattatgctggctagagtgatgcagacttgttcttctttttaaagcagtctcaagaataagcatttctttaaaatgtttctgtgtataatctagtttattttcagagtccattttttcttatgtctttataaggttcacttaacttaaaaacagcttttaaaacaactttttatcttctgtcttgctatcattgttcctacttccctaggaagccctggctacctttcgcattaggaccagtctgggttttaaggctctgggaagcagggttggttagtaaagacaggaatgttggggagaggtgagtagttccttcctctttctcctctccaatttatgcttttaacttattttctacctggataaacttctggaacttggcttttaaatttaacttttctagtttttaagcagtttccaccttgctttggtctaatgcttttctttgaaatgctaacagaattcccaagctttttccagttctagatatctttactagacctttgggggactcttataatggagctgcttttgaaaagcactttaattagataatgtattttgactaaatcacgaggatgcccagtgagagcttctagctgatctcagaggaccagagtgactgagggtaaagtgtctcacagcccatgctgaattttctgcattttaaactgatactgcagtcattggagagagagctcctcatttctcgaatgaaagatgagatatattcatcctcatgtaccacatctgtcttagtgtttgcgtctggggtgtgttatcaaacagagcatggtctacatcccactgtgtcaaccagaagagccaagtgttatctcaattggcccagtgtttctccaggctggggactgttaagggctctaagggaatgtagacagagtctccctgttattctgacttcctgcttgatgagctttcagttcctgtttttgctattgtttcctaaatttgacctacatattacatgggtgtagtgtgttgaggcttttcaaagaagggtctagtgagctaagtttcatcttctggtactcattgatcaaactgacctttctattctcataagcgtttctacccaaagttgtgtgtggaaggagtgtatagcagagaggaaatccctttcaacagagtcagctgctaactgatttcctataagcacactggattaagggcagccacagtggtttctactgtatgtatgaaccgaatggaggaatgttttcaaagattgatttggtgtggattgcaattgtaatggaaggcataacttgggatcccgggctgtaacttgctcttttgtttcccacccccctgacatgtatgtgtgctttaataaagctttctcacttgtc

SEQ ID NO: 30692 - DNA, 4847 bp, Homo sapiens
  source 1..4847: mol_type = unassigned DNA
agggtgagaagggccggctgccggagctgggttgcgatcttcccggagccggagaccctcccttgaaaccggcactgggacttctcgatctctggaggcacctgttgcaagtgacaggcaactctggtagctctccttgtctggttgttttgaagaaagaagagtagaagaaaaagttgagtaaatcatgtcggagttactggacctttcttttctgtctgaggaggaaaaggatttgattctcagtgttctacagcgagatgaagaggtccggaaagcagatgagaaaaggattaggcgactaaagaatgagttactggagataaaaaggaaaggggccaagaggggcagccaacactacagtgatcggacctgtgcccggtgccaggagagcctgggccgtttgagtcccaaaaccaatacttgtcggggttgtaatcacctggtgtgtcgggactgccgcatacaggaaagcaatggtacctggaggtgcaaggtgtgcgccaaggaaatagagttgaagaaagcaactggggactggttttatgaccagaaagtgaatcgctttgcttaccgcacaggtagtgagataatcaggatgtccctgcgccacaaacctgcagtgagtaaaagagagacagtgggacagtccctccttcatcagacacagatgggtgacatctggccaggaagaaagatcattcaggagcggcagaaggagcccagtgtgctatttgaagtgccaaagctgaaaagtggaaagagtgcattggaagctgagagtgagagtctggatagcttcacagctgactcggatagcacctccaggagagactctctggataaatctggcctctttccagaatggaagaagatgtctgctcccaaatctcaagtagaaaaggaaactcagcctggaggtcaaaatgtggtatttgtggatgagggtgagatgatatttaagaagaacaccagaaaaatcctcaggccttcagagtacactaaatctgtgatagatcttcgcccagaagatgtggtacatgaaagtggctccttgggagacagaagcaaatccgtcccaggcctcaatgtggatatggaagaggaagaagaagaagaagacattgaccacctagtgaagttacatcgccagaagctagccagaagcagcatgcaaagtggctcctccatggtaagttctattagatctgtggttacaggcatgttggggtactaggaagaaaagaagcacctccctagagcagattcgggacctggggaaaccatcctagtcactcttttcaggtaagtaagatcatttgtttgttcctatcctcaatttagactataggtgcttagtgtacatctaggtgacttcctgagcccccacctggagattattacattacagcttgggacatttttcatcacagctttgtgaacaataaccttaacttatcctctaaaggggtacccaggctatgaagtgagcaagatcagatttcttcatcatagcccattccaaattctcaacattaaaagaaagtgagtgtcatgagaggggctctggcagggttgatcgacatcagggtatggttaacaagcaataataccagtcaggataatgaatttaaagggaacatttaagaatcagggcctggttctgtcataagcatgaagattgatatttagggaaacaggaacaagggtgaacagaatttgttcacactcacacacaggaagagaatgtcagctcgcatgaccgattactaccagaaaggaaggtgccttttcacttctggtggggtttcctccctcccactcactcccagttctggccaaatctcttttctctgtaggccctgataagacataaggtggataagagaaacccacagataattaaggcaccttgttttagttagtaactaacccccttctagctggtgttttagtgtatataacacattccccagatggacttaactgcaccttgcctctgctccctgcccacctcctggggcaggtgaaaatgaacactaaaatttgtaaaaagagttgaggaagagaagctaagaggctaggtgagccatgagctgattcattcacctgaacaattttgagtgctggtagttctctcttaccctctgggtcaaggaatgtcagcagcactggcttattgcaggggcttctgaaacttctgttcagtgactgtggttttatcatgagggaagatgtgagcaatgcgggcgggggagtgtgccttccccagatgttcgtgggtgctttatcttcagagtacgatcggcagcatgatgagcatctacagtgaagctggtgatttcgggaacatctttgtgactggcaggattgccttttccctgaagtatgagcagcaaacccagagtctggttgtccatgtgaaggagtgccatcagctggcctatgctgatgaagccaagaagcgctctaacccgtgagtgcttctggaacctgactgatgctctgagaccagagaccagaccccggcatctgtccgggcactcttgaacagagcttatctgtttctgggggagcagggaggtgtaatgtaggaaaagaaccaggattgggaaaaagcaagaatggcatgtctaagagggcttgaggtgacatttttgacatcacatgtcaccatggcatatctatatggagaggaggaaagtgaaaagcaggcttgagaaaggccagcaaattactcagtgctgtctttggtttctagatatgtgaagacttaccttctgcctgacaagtcccgccaaggaaaaagaaaaaccagcatcaagcgggacactattaatccactatatgatgagacgctgagggtaagtatctagacctcaagggtaggagaacttgttctgtcttgtgccctaagctgtagctattcctctgcaacatgaccaggtgacacgggcttcagtgggccatgtctgtgtctgaggatacattgggtatctgttcacatcctgatctcccagtgaagagaacaaaggtgatctgcctttcctggattgatgtgaagtttgagattcacatggccacaaatctcatgtaaaaaagacatttgagataaggagtctccttggcagttctttttggacaatccagtgttatctcatccacttaagaaaaaatgaattttccaggtcctcctatggaatatggtaggtttttataaaatgagttaagttgaggctttgagtgaggaaactcaaagtgctcagggaacataaagtaatttggtattcaggactagtgacttcaggaatggttgctcaggttttggaataatcttgtctgaagaattacccttaactaatcatcttgggcttttactttcccttcacagtatgagatcccagaatctctcctggcccagaggaccctgcagttctcagtttggcatcatggtcgttttggcagaaacactttccttggagaggcagagatccagatggattcctggaagcttgataagaaactggatcattgcctccctttacatggaaaggtagtctgctttaacaactcctgcagtttggatctgaggtagaattgtctgcagtagcctctgctggtctatgttggtagcgtctttgaatgtagtcttctctggagttctagtgccccctgctggtgtttctgagtttgacagcaatttcagaggcatttgtctatcaagtgtgagttctgtgtaaaccaggcaaagtgtgaagccatggttttgctttgaaaaaattttcatatgtgtaccaaactttgtctcctaaccttccagaatctgggtgtatcctaacatcctaactcgcacctcttctccgagctaaccttctgtgtatatcctaatctgtacccttttgccaagccactgctttacttccaagtgggaagtaaagcaattcatggagctccaattgctatgctcttggttacagaggccagggaaatattactttggagatggcacctcgggccacagtgtagcagtatggcataatcatgcctgggatctgagtgcagacctgtgttggaatcctggttctgtcacttgccaactagatgagtcacttaactacaaaataatgtagggaaatcatctggctaagaagaaatagctaaaacagaggacttattcagcaacttcttgattatcagaactacacaatgacatgacaaagttcatcttatttttttttacactagcgttttaaatgtgggatggttttacatggtccatagactttgggaagttagatgagaaactagtcatggtggctgcctctaggaatggagactgaggtagaaggaatatttagttttctctatatcccctttttaagcatttgaactttttaccatattaagaaaattaagcaaaaatggacttatgtacacatgattcaaaattaaaacaacataaagtatattaaaaggaaagtaggttccattccttagaaataaccagtgttaacactacttgtgtatccttctagaaattttttatggctaggtatggtggctcacgcctgtaatcccagcacattgggaggcggaggcaggcagatcacctgaggtcaggagttcgagaccaccctgaccaacatggtgaaaccccgtctctactaaatacaaaaaaattagctgggcatggtggcgcaagcctgtaatcccagctacttgggaggctgaggcaggagaatcgcttgaacccatgaggcggaggttgcagtgagccgagattgcgcctttgcactccagcctgggcaaaagagtgaaactctgtctcaaaaaaaaaaaaaaaaaaa

SEQ ID NO: 30693 - DNA, 3885 bp, Homo sapiens
  source 1..3885: mol_type = unassigned DNA
cacagcgctcggccgtcgagcggggtcgctaacccgcactctcttcggacctacgacatcgcggcttctctggcgttggccagtcagccacagggaactagtaaaaaaagaaaaagaaaaaataaagtgaaagaggcgtgttgtctagtttcaaaggagaggagagaagagactgagtcgccctgtgttgcccaggctggtcttgaactcctaggctcaagagatcctcctgcctcagcctcccaaagtgctgggattacaggcaactctggtagctctccttgtctggttgttttgaagaaagaagagtagaagaaaaagttgagtaaatcatgtcggagttactggacctttcttttctgtctgaggaggaaaaggatttgattctcagtgttctacagcgagatgaagaggtccggaaagcagatgagaaaaggattaggcgactaaagaatgagttactggagataaaaaggaaaggggccaagaggggcagccaacactacagtgatcggacctgtgcccggtgccaggagagcctgggccgtttgagtcccaaaaccaatacttgtcggggttgtaatcacctggtgtgtcgggactgccgcatacaggaaagcaatggtacctggaggtgcaaggtgtgcgccaaggaaatagagttgaagaaagcaactggggactggttttatgaccagaaagtgaatcgctttgcttaccgcacaggtagtgagataatcaggatgtccctgcgccacaaacctgcagtgagtaaaagagagacagtgggacagtccctccttcatcagacacagatgggtgacatctggccaggaagaaagatcattcaggagcggcagaaggagcccagtgtgctatttgaagtgccaaagctgaaaagtggaaagagtgcattggaagctgagagtgagagtctggatagcttcacagctgactcggatagcacctccaggagagactctctggataaatctggcctctttccagaatggaagaagatgtctgctcccaaatctcaagtagaaaaggaaactcagcctggaggtcaaaatgtggtatttgtggatgagggtgagatgatatttaagaagaacaccagaaaaatcctcaggccttcagagtacactaaatctgtgatagatcttcgcccagaagatgtggtacatgaaagtggctccttgggagacagaagcaaatccgtcccaggcctcaatgtggatatggaagaggaagaagaagaagaagacattgaccacctagtgaagttacatcgccagaagctagccagaagcagcatgcaaagtggctcctccatgagtacgatcggcagcatgatgagcatctacagtgaagctggtgatttcgggaacatctttgtgactggcaggattgccttttccctgaagtatgagcagcaaacccagagtctggttgtccatgtgaaggagtgccatcagctggcctatgctgatgaagccaagaagcgctctaacccatatgtgaagacttaccttctgcctgacaagtcccgccaaggaaaaagaaaaaccagcatcaagcgggacactattaatccactatatgatgagacgctgaggtatgagatcccagaatctctcctggcccagaggaccctgcagttctcagtttggcatcatggtcgttttggcagaaacactttccttggagaggcagagatccagatggattcctggaagcttgataagaaactggatcattgcctccctttacatggaaagatcagtgctgagtccccgactggcttgccatcacacaaaggcgagttggtggtttcattgaaatacatcccagcctccaaaacccctgttggaggtgaccggaaaaagagtaaaggtggggaagggggagagctccaggtgtggatcaaagaagccaagaacttgacggctgccaaagcaggagggacttcagacagctttgtcaagggatacctccttcccatgaggaacaaggccagtaaacgtaaaactcctgtgatgaagaagaccctgaatcctcactacaaccatacatttgtctacaatggtgtgaggctggaagatctacagcatatgtgcctggaactgactgtgtgggaccgggagcccctggccagcaatgacttcctgggaggggtcaggctgggtgttggcactgggatcagtaatggggaagtggtggactggatggactcgactggggaagaagtgagcctgtggcagaagatgcgacagtacccagggtcttgggcagaagggactctgcagctccgttcctcaatggccaagcagaagctgggtttatgagtccctgtcctcttctgcaggtccagccctggcgagggcaggtcagaggaagtgaagaaatcaagagcaaagatttataatttaatgtgtatgtgtgtatgtgtgtatgtgtgtgtgtgtgtgtgtgtgtgtatgtgtacaaacatgtattttctgcaaatctcattatgctggctagagtgatgcagacttgttcttctttttaaagcagtctcaagaataagcatttctttaaaatgtttctgtgtataatctagtttattttcagagtccattttttcttatgtctttataaggttcacttaacttaaaaacagcttttaaaacaactttttatcttctgtcttgctatcattgttcctacttccctaggaagccctggctacctttcgcattaggaccagtctgggttttaaggctctgggaagcagggttggttagtaaagacaggaatgttggggagaggtgagtagttccttcctctttctcctctccaatttatgcttttaacttattttctacctggataaacttctggaacttggcttttaaatttaacttttctagtttttaagcagtttccaccttgctttggtctaatgcttttctttgaaatgctaacagaattcccaagctttttccagttctagatatctttactagacctttgggggactcttataatggagctgcttttgaaaagcactttaattagataatgtattttgactaaatcacgaggatgcccagtgagagcttctagctgatctcagaggaccagagtgactgagggtaaagtgtctcacagcccatgctgaattttctgcattttaaactgatactgcagtcattggagagagagctcctcatttctcgaatgaaagatgagatatattcatcctcatgtaccacatctgtcttagtgtttgcgtctggggtgtgttatcaaacagagcatggtctacatcccactgtgtcaaccagaagagccaagtgttatctcaattggcccagtgtttctccaggctggggactgttaagggctctaagggaatgtagacagagtctccctgttattctgacttcctgcttgatgagctttcagttcctgtttttgctattgtttcctaaatttgacctacatattacatgggtgtagtgtgttgaggcttttcaaagaagggtctagtgagctaagtttcatcttctggtactcattgatcaaactgacctttctattctcataagcgtttctacccaaagttgtgtgtggaaggagtgtatagcagagaggaaatccctttcaacagagtcagctgctaactgatttcctataagcacactggattaagggcagccacagtggtttctactgtatgtatgaaccgaatggaggaatgttttcaaagattgatttggtgtggattgcaattgtaatggaaggcataacttgggatcccgggctgtaacttgctcttttgtttcccacccccctgacatgtatgtgtgctttaataaagctttctcacttgtcaaa

SEQ ID NO: 30694 - DNA, 3743 bp, Homo sapiens
  source 1..3743: mol_type = unassigned DNA
agtcaccttttcgtgggttcctctcacagcgctcggccgtcgagcggggtcgctaacccgcactctcttcggacctacgacatcgcggcttctctggcgttggccagtcagccacaggcaactctggtagctctccttgtctggttgttttgaagaaagaagagtagaagaaaaagttgagtaaatcatgtcggagttactggacctttcttttctgtctgaggaggaaaaggatttgattctcagtgttctacagcgagatgaagaggtccggaaagcagatgagaaaaggattaggcgactaaagaatgagttactggagataaaaaggaaaggggccaagaggggcagccaacactacagtgatcggacctgtgcccggtgccaggagagcctgggccgtttgagtcccaaaaccaatacttgtcggggttgtaatcacctggtgtgtcgggactgccgcatacaggaaagcaatggtacctggaggtgcaaggtgtgcgccaaggaaatagagttgaagaaagcaactggggactggttttatgaccagaaagtgaatcgctttgcttaccgcacaggtagtgagataatcaggatgtccctgcgccacaaacctgcagtgagtaaaagagagacagtgggacagtccctccttcatcagacacagatgggtgacatctggccaggaagaaagatcattcaggagcggcagaaggagcccagtagtgtgctatttgaagtgccaaagctgaaaagtggaaagagtgcattggaagctgagagtgagagtctggatagcttcacagctgactcggatagcacctccaggagagactctctggataaatctggcctctttccagaatggaagaagatgtctgctcccaaatctcaagtagaaaaggaaactcagcctggaggtcaaaatgtggtatttgtggatgagggtgagatgatatttaagaagaacaccagaaaaatcctcaggccttcagagtacactaaatctgtgatagatcttcgcccagaagatgtggtacatgaaagtggctccttgggagacagaagcaaatccgtcccaggcctcaatgtggatatggtagaagaggaagaagaagaagaagacattgaccacctagtgaagttacatcgccagaagctagccagaagcagcatgcaaagtggctcctccatgagtacgatcggcagcatgatgagcatctacagtgaagctggtgatttcgggaacatctttgtgactggcaggattgccttttccctgaagtatgagcagcaaacccagagtctggttgtccatgtgaaggagtgccatcagctggcctatgctgatgaagccaagaagcgctctaacccatatgtgaagacttaccttctgcctgacaagtcccgccaaggaaaaagaaaaaccagcatcaagcgggacactattaatccactatatgatgagacgctgaggtatgagatcccagaatctctcctggcccagaggaccctgcagttctcagtttggcatcatggtcgttttggcagaaacactttccttggagaggcagagatccagatggattcctggaagcttgataagaaactggatcattgcctccctttacatggaaagatcagtgctgagtccccgactggcttgccatcacacaaaggcgagttggtggtttcattgaaatacatcccagcctccaaaacccctgttggaggtgaccggaaaaagagtaaaggtggggaagggggagagctccaggtgtggatcaaagaagccaagaacttgacggctgccaaagcaggagggacttcagacagctttgtcaagggatacctccttcccatgaggaacaaggccagtaaacgtaaaactcctgtgatgaagaagaccctgaatcctcactacaaccatacatttgtctacaatggtgtgaggctggaagatctacagcatatgtgcctggaactgactgtgtgggaccgggagcccctggccagcaatgacttcctgggaggggtcaggctgggtgttggcactgggatcagtaatggggaagtggtggactggatggactcgactggggaagaagtgagcctgtggcagaagatgcgacagtacccagggtcttgggcagaagggactctgcagctccgttcctcaatggccaagcagaagctgggtttatgagtccctgtcctcttctgcaggtccagccctggcgagggcaggtcagaggaagtgaagaaatcaagagcaaagatttataatttaatgtgtatgtgtgtatgtgtgtatgtgtgtgtgtgtgtgtgtgtgtgtatgtgtacaaacatgtattttctgcaaatctcattatgctggctagagtgatgcagacttgttcttctttttaaagcagtctcaagaataagcatttctttaaaatgtttctgtgtataatctagtttattttcagagtccattttttcttatgtctttataaggttcacttaacttaaaaacagcttttaaaacaactttttatcttctgtcttgctatcattgttcctacttccctaggaagccctggctacctttcgcattaggaccagtctgggttttaaggctctgggaagcagggttggttagtaaagacaggaatgttggggagaggtgagtagttccttcctctttctcctctccaatttatgcttttaacttattttctacctggataaacttctggaacttggcttttaaatttaacttttctagtttttaagcagtttccaccttgctttggtctaatgcttttctttgaaatgctaacagaattcccaagctttttccagttctagatatctttactagacctttgggggactcttataatggagctgcttttgaaaagcactttaattagataatgtattttgactaaatcacgaggatgcccagtgagagcttctagctgatctcagaggaccagagtgactgagggtaaagtgtctcacagcccatgctgaattttctgcattttaaactgatactgcagtcattggagagagagctcctcatttctcgaatgaaagatgagatatattcatcctcatgtaccacatctgtcttagtgtttgcgtctggggtgtgttatcaaacagagcatggtctacatcccactgtgtcaaccagaagagccaagtgttatctcaattggcccagtgtttctccaggctggggactgttaagggctctaagggaatgtagacagagtctccctgttattctgacttcctgcttgatgagctttcagttcctgtttttgctattgtttcctaaatttgacctacatattacatgggtgtagtgtgttgaggcttttcaaagaagggtctagtgagctaagtttcatcttctggtactcattgatcaaactgacctttctattctcataagcgtttctacccaaagttgtgtgtggaaggagtgtatagcagagaggaaatccctttcaacagagtcagctgctaactgatttcctataagcacactggattaagggcagccacagtggtttctactgtatgtatgaaccgaatggaggaatgttttcaaagattgatttggtgtggattgcaattgtaatggaaggcataacttgggatcccgggctgtaacttgctcttttgtttcccacccccctgacatgtatgtgtgctttaataaagctttctcacttgtc

SEQ ID NO: 30695 - DNA, 3897 bp, Homo sapiens
  source 1..3897: mol_type = unassigned DNA
agtcaccttttcgtgggttcctctcacagcgctcggccgtcgagcggggtcgctaacccgcactctcttcggacctacgacatcgcggcttctctggcgttggccagtcagccacagggaactagtaaaaaaagaaaaagaaaaaataaagtgaaagaggcgtgttgtctagtttcaaaggagaggagagaaggtaagtgtgattctcatttcctttttcactctctgtctaccttgggctctttgactcccatgactaccaagtgtatattatcaggcaactctggtagctctccttgtctggttgttttgaagaaagaagagtagaagaaaaagttgagtaaatcatgtcggagttactggacctttcttttctgtctgaggaggaaaaggatttgattctcagtgttctacagcgagatgaagaggtccggaaagcagatgagaaaaggattaggcgactaaagaatgagttactggagataaaaaggaaaggggccaagaggggcagccaacactacagtgatcggacctgtgcccggtgccaggagagcctgggccgtttgagtcccaaaaccaatacttgtcggggttgtaatcacctggtgtgtcgggactgccgcatacaggaaagcaatggtacctggaggtgcaaggtgtgcgccaaggaaatagagttgaagaaagcaactggggactggttttatgaccagaaagtgaatcgctttgcttaccgcacaggtagtgagataatcaggatgtccctgcgccacaaacctgcagtgagtaaaagagagacagtgggacagtccctccttcatcagacacagatgggtgacatctggccaggaagaaagatcattcaggagcggcagaaggagcccagtgtgctatttgaagtgccaaagctgaaaagtggaaagagtgcattggaagctgagagtgagagtctggatagcttcacagctgactcggatagcacctccaggagagactctctggataaatctggcctctttccagaatggaagaagatgtctgctcccaaatctcaagtagaaaaggaaactcagcctggaggtcaaaatgtggtatttgtggatgagggtgagatgatatttaagaagaacaccagaaaaatcctcaggccttcagagtacactaaatctgtgatagatcttcgcccagaagatgtggtacatgaaagtggctccttgggagacagaagcaaatccgtcccaggcctcaatgtggatatggaagaggaagaagaagaagaagacattgaccacctagtgaagttacatcgccagaagctagccagaagcagcatgcaaagtggctcctccatgagtacgatcggcagcatgatgagcatctacagtgaagctggtgatttcgggaacatctttgtgactggcaggattgccttttccctgaagtatgagcagcaaacccagagtctggttgtccatgtgaaggagtgccatcagctggcctatgctgatgaagccaagaagcgctctaacccatatgtgaagacttaccttctgcctgacaagtcccgccaaggaaaaagaaaaaccagcatcaagcgggacactattaatccactatatgatgagacgctgaggtatgagatcccagaatctctcctggcccagaggaccctgcagttctcagtttggcatcatggtcgttttggcagaaacactttccttggagaggcagagatccagatggattcctggaagcttgataagaaactggatcattgcctccctttacatggaaagatcagtgctgagtccccgactggcttgccatcacacaaaggcgagttggtggtttcattgaaatacatcccagcctccaaaacccctgttggaggtgaccggaaaaagagtaaaggtggggaagggggagagctccaggtgtggatcaaagaagccaagaacttgacggctgccaaagcaggagggacttcagacagctttgtcaagggatacctccttcccatgaggaacaaggccagtaaacgtaaaactcctgtgatgaagaagaccctgaatcctcactacaaccatacatttgtctacaatggtgtgaggctggaagatctacagcatatgtgcctggaactgactgtgtgggaccgggagcccctggccagcaatgacttcctgggaggggtcaggctgggtgttggcactgggatcagtaatggggaagtggtggactggatggactcgactggggaagaagtgagcctgtggcagaagatgcgacagtacccagggtcttgggcagaagggactctgcagctccgttcctcaatggccaagcagaagctgggtttatgagtccctgtcctcttctgcaggtccagccctggcgagggcaggtcagaggaagtgaagaaatcaagagcaaagatttataatttaatgtgtatgtgtgtatgtgtgtatgtgtgtgtgtgtgtgtgtgtgtgtatgtgtacaaacatgtattttctgcaaatctcattatgctggctagagtgatgcagacttgttcttctttttaaagcagtctcaagaataagcatttctttaaaatgtttctgtgtataatctagtttattttcagagtccattttttcttatgtctttataaggttcacttaacttaaaaacagcttttaaaacaactttttatcttctgtcttgctatcattgttcctacttccctaggaagccctggctacctttcgcattaggaccagtctgggttttaaggctctgggaagcagggttggttagtaaagacaggaatgttggggagaggtgagtagttccttcctctttctcctctccaatttatgcttttaacttattttctacctggataaacttctggaacttggcttttaaatttaacttttctagtttttaagcagtttccaccttgctttggtctaatgcttttctttgaaatgctaacagaattcccaagctttttccagttctagatatctttactagacctttgggggactcttataatggagctgcttttgaaaagcactttaattagataatgtattttgactaaatcacgaggatgcccagtgagagcttctagctgatctcagaggaccagagtgactgagggtaaagtgtctcacagcccatgctgaattttctgcattttaaactgatactgcagtcattggagagagagctcctcatttctcgaatgaaagatgagatatattcatcctcatgtaccacatctgtcttagtgtttgcgtctggggtgtgttatcaaacagagcatggtctacatcccactgtgtcaaccagaagagccaagtgttatctcaattggcccagtgtttctccaggctggggactgttaagggctctaagggaatgtagacagagtctccctgttattctgacttcctgcttgatgagctttcagttcctgtttttgctattgtttcctaaatttgacctacatattacatgggtgtagtgtgttgaggcttttcaaagaagggtctagtgagctaagtttcatcttctggtactcattgatcaaactgacctttctattctcataagcgtttctacccaaagttgtgtgtggaaggagtgtatagcagagaggaaatccctttcaacagagtcagctgctaactgatttcctataagcacactggattaagggcagccacagtggtttctactgtatgtatgaaccgaatggaggaatgttttcaaagattgatttggtgtggattgcaattgtaatggaaggcataacttgggatcccgggctgtaacttgctcttttgtttcccacccccctgacatgtatgtgtgctttaataaagctttctcacttgtc

SEQ ID NO: 30696 - DNA, 3147 bp, Homo sapiens
  source 1..3147: mol_type = unassigned DNA
ggaagggcctgtgggtttattataaggcggagctcggcgggagaggtgcgggccgaatccgagccgagcggagaggaatccggcagtagagagcggactccagccggcggaccctgcagccctcgcctgggacagcggcgcgctgggcaggcgcccaagagagcatcgagcagcggaacccgcgaagccggcccgcagccgcgacccgcgcagcctgccgctctcccgccgccggtccgggcagcatgaggcgcgcggcgctctggctctggctgtgcgcgctggcgctgagcctgcagccggccctgccgcaaattgtggctactaatttgccccctgaagatcaagatggctctggggatgactctgacaacttctccggctcaggtgcaggtgctttgcaagatatcaccttgtcacagcagaccccctccacttggaaggacacgcagctcctgacggctattcccacgtctccagaacccaccggcctggaggctacagctgcctccacctccaccctgccggctggagaggggcccaaggagggagaggctgtagtcctgccagaagtggagcctggcctcaccgcccgggagcaggaggccaccccccgacccagggagaccacacagctcccgaccactcatctggcctcaacgaccacagccaccacggcccaggagcccgccacctcccacccccacagggacatgcagcctggccaccatgagacctcaacccctgcaggacccagccaagctgaccttcacactccccacacagaggatggaggtccttctgccaccgagagggctgctgaggatggagcctccagtcagctcccagcagcagagggctctggggagcaggacttcacctttgaaacctcgggggagaatacggctgtagtggccgtggagcctgaccgccggaaccagtccccagtggatcagggggccacgggggcctcacagggcctcctggacaggaaagaggtgctgggaggggtcattgccggaggcctcgtggggctcatctttgctgtgtgcctggtgggtttcatgctgtaccgcatgaagaagaaggacgaaggcagctactccttggaggagccgaaacaagccaacggcggggcctaccagaagcccaccaaacaggaggaattctatgcctgacgcgggagccatgcgccccctccgccctgccactcactaggcccccacttgcctcttccttgaagaactgcaggccctggcctcccctgccaccaggccacctccccagcattccagcccctctggtcgctcctgcccacggagtcgtggggtgtgctgggagctccactctgcttctctgacttctgcctggagacttagggcaccaggggtttctcgcataggacctttccaccacagccagcacctggcatcgcaccattctgactcggtttctccaaactgaagcagcctctccccaggtccagctctggaggggagggggatccgactgctttggacctaaatggcctcatgtggctggaagatcctgcgggtggggcttggggctcacacacctgtagcacttactggtaggaccaagcatcttgggggggtggccgctgagtggcaggggacaggagtccactttgtttcgtggggaggtctaatctagatatcgacttgtttttgcacatgtttcctctagttctttgttcatagcccagtagaccttgttacttctgaggtaagttaagtaagttgattcggtatccccccatcttgcttccctaatctatggtcgggagacagcatcagggttaagaagactttttttttttttttttaaactaggagaaccaaatctggaagccaaaatgtaggcttagtttgtgtgttgtctcttgagtttgtcgctcatgtgtgcaacagggtatggactatctgtctggtggccccgtttctggtggtctgttggcaggctggccagtccaggctgccgtggggccgccgcctctttcaagcagtcgtgcctgtgtccatgcgctcagggccatgctgaggcctgggccgctgccacgttggagaagcccgtgtgagaagtgaatgctgggactcagccttcagacagagaggactgtagggagggcggcaggggcctggagatcctcctgcagaccacgcccgtcctgcctgtggcgccgtctccaggggctgcttcctcctggaaattgacgaggggtgtcttgggcagagctggctctgagcgcctccatccaaggccaggttctccgttagctcctgtggccccaccctgggccctgggctggaatcaggaatattttccaaagagtgatagtcttttgcttttggcaaaactctacttaatccaatgggtttttccctgtacagtagattttccaaatgtaataaactttaatataaagtagtcctgtgaatgccactgccttcgcttcttgcctctgtgctgtgtgtgacgtgaccggacttttctgcaaacaccaacatgttgggaaacttggctcgaatctctgtgccttcgtctttcccatggggagggattctggttccagggtccctctgtgtatttgcttttttgttttggctgaaattctcctggaggtcggtaggttcagccaaggttttataaggctgatgtcaatttctgtgttgccaagctccaagccccatcttctaaatggcaaaggaaggtggatggccccagcacagcttgacctgaggctgtggtcacagcggaggtgtggagccgaggcctaccccgcagacaccttggacatcctcctcccacccggctgcagaggccagaggcccccagcccagggctcctgcacttacttgcttatttgacaacgtttcagcgactccgttggccactccgagaggtgggccagtctgtggatcagagatgcaccaccaagccaagggaacctgtgtccggtattcgatactgcgactttctgcctggagtgtatgactgcacatgactcgggggtggggaaaggggtcggctgaccatgctcatctgctggtccgtgggacggtgcccaagccagaggctgggttcatttgtgtaacgacaataaacggtacttgtcatttcgggcaa

SEQ ID NO: 30697 - DNA, 3291 bp, Homo sapiens
  source 1..3291: mol_type = unassigned DNA
ttcagcccctctcccgggctgcgcctccgcactccgggcccgggcagaagggggtgcgcctcggccccaccacccagggagcagccgagctgaaaggccgggaaccgcggcttgcggggaccacagctcccgaaagcgacgttcggccaccggaggagcgggagccaagcaggcggagctcggcgggagaggtgcgggccgaatccgagccgagcggagaggaatccggcagtagagagcggactccagccggcggaccctgcagccctcgcctgggacagcggcgcgctgggcaggcgcccaagagagcatcgagcagcggaacccgcgaagccggcccgcagccgcgacccgcgcagcctgccgctctcccgccgccggtccgggcagcatgaggcgcgcggcgctctggctctggctgtgcgcgctggcgctgagcctgcagccggccctgccgcaaattgtggctactaatttgccccctgaagatcaagatggctctggggatgactctgacaacttctccggctcaggtgcaggtgctttgcaagatatcaccttgtcacagcagaccccctccacttggaaggacacgcagctcctgacggctattcccacgtctccagaacccaccggcctggaggctacagctgcctccacctccaccctgccggctggagaggggcccaaggagggagaggctgtagtcctgccagaagtggagcctggcctcaccgcccgggagcaggaggccaccccccgacccagggagaccacacagctcccgaccactcatctggcctcaacgaccacagccaccacggcccaggagcccgccacctcccacccccacagggacatgcagcctggccaccatgagacctcaacccctgcaggacccagccaagctgaccttcacactccccacacagaggatggaggtccttctgccaccgagagggctgctgaggatggagcctccagtcagctcccagcagcagagggctctggggagcaggacttcacctttgaaacctcgggggagaatacggctgtagtggccgtggagcctgaccgccggaaccagtccccagtggatcagggggccacgggggcctcacagggcctcctggacaggaaagaggtgctgggaggggtcattgccggaggcctcgtggggctcatctttgctgtgtgcctggtgggtttcatgctgtaccgcatgaagaagaaggacgaaggcagctactccttggaggagccgaaacaagccaacggcggggcctaccagaagcccaccaaacaggaggaattctatgcctgacgcgggagccatgcgccccctccgccctgccactcactaggcccccacttgcctcttccttgaagaactgcaggccctggcctcccctgccaccaggccacctccccagcattccagcccctctggtcgctcctgcccacggagtcgtggggtgtgctgggagctccactctgcttctctgacttctgcctggagacttagggcaccaggggtttctcgcataggacctttccaccacagccagcacctggcatcgcaccattctgactcggtttctccaaactgaagcagcctctccccaggtccagctctggaggggagggggatccgactgctttggacctaaatggcctcatgtggctggaagatcctgcgggtggggcttggggctcacacacctgtagcacttactggtaggaccaagcatcttgggggggtggccgctgagtggcaggggacaggagtccactttgtttcgtggggaggtctaatctagatatcgacttgtttttgcacatgtttcctctagttctttgttcatagcccagtagaccttgttacttctgaggtaagttaagtaagttgattcggtatccccccatcttgcttccctaatctatggtcgggagacagcatcagggttaagaagactttttttttttttttttaaactaggagaaccaaatctggaagccaaaatgtaggcttagtttgtgtgttgtctcttgagtttgtcgctcatgtgtgcaacagggtatggactatctgtctggtggccccgtttctggtggtctgttggcaggctggccagtccaggctgccgtggggccgccgcctctttcaagcagtcgtgcctgtgtccatgcgctcagggccatgctgaggcctgggccgctgccacgttggagaagcccgtgtgagaagtgaatgctgggactcagccttcagacagagaggactgtagggagggcggcaggggcctggagatcctcctgcagaccacgcccgtcctgcctgtggcgccgtctccaggggctgcttcctcctggaaattgacgaggggtgtcttgggcagagctggctctgagcgcctccatccaaggccaggttctccgttagctcctgtggccccaccctgggccctgggctggaatcaggaatattttccaaagagtgatagtcttttgcttttggcaaaactctacttaatccaatgggtttttccctgtacagtagattttccaaatgtaataaactttaatataaagtagtcctgtgaatgccactgccttcgcttcttgcctctgtgctgtgtgtgacgtgaccggacttttctgcaaacaccaacatgttgggaaacttggctcgaatctctgtgccttcgtctttcccatggggagggattctggttccagggtccctctgtgtatttgcttttttgttttggctgaaattctcctggaggtcggtaggttcagccaaggttttataaggctgatgtcaatttctgtgttgccaagctccaagccccatcttctaaatggcaaaggaaggtggatggccccagcacagcttgacctgaggctgtggtcacagcggaggtgtggagccgaggcctaccccgcagacaccttggacatcctcctcccacccggctgcagaggccagaggcccccagcccagggctcctgcacttacttgcttatttgacaacgtttcagcgactccgttggccactccgagaggtgggccagtctgtggatcagagatgcaccaccaagccaagggaacctgtgtccggtattcgatactgcgactttctgcctggagtgtatgactgcacatgactcgggggtggggaaaggggtcggctgaccatgctcatctgctggtccgtgggacggtgcccaagccagaggctgggttcatttgtgtaacgacaataaacggtacttgtcatttcgggc

SEQ ID NO: 30698 - DNA, 3751 bp, Homo sapiens
  source 1..3751: mol_type = unassigned DNA
agaaaagctacatacgtctctcgtttcttcactaattgttctctagaaaagggaaagtgaagaagggaaagagaaaagacaacggggaagaaaagagcatagaggagagaggaaaagtggggagagaaaggaagaaaaggactgagaaaacgcaggagccctggcttgccggtgagcagagccggcgcagccacagcgcggagccgcggcgcccactggtcctcggagctgccaatcggcgtgtaatcctgtaggaatttctcccgggtttatctgggagtcacactgccgcctcctctccccagtcgcccaggggagcccggagaagcaggctcaggagggagggagccagaggaaaagaagaggaggagaaggaggaggacccggggagggaggcgcggcgcgggaggaggaggggcgcagccgcggagccagtggccccgcttggacgcgctgctctccagatacccccggagctccagccgcgcggatcgcgcgctcccgccgctctgcccctaaacttctgccgtagctccctttcaagccagcgaatttattccttaaaaccagaaactgaacctcggcacgggaaaggagtccgcggaggagcaaaaccacagcagagcaagaagagcttcagagagcagccttcccggagcaccaactccgtgtcgggagtgcagaaaccaacaagtgagagggcgccgcgttcccggggcgcagctgcgggcggcgggagcaggcgcaggaggaggaagcgagcgcccccgagccccgagcccgagtccccgagcctgagccgcaatcgctgcggtactctgctccggattcgtgtgcgcgggctgcgccgagcgctgggcaggaggcttcgttttgccctggttgcaagcagcggctgggagcagccggtccctggggaatatgcggcgcgcgtggatcctgctcaccttgggcttggtggcctgcgtgtcggcggagtcgagagcagagctgacatctgataaagacatgtaccttgacaacagctccattgaagaagcttcaggagtgtatcctattgatgacgatgactacgcttctgcgtctggctcgggagctgatgaggatgtagagagtccagagctgacaacatctcgaccacttccaaagatactgttgactagtgctgctccaaaagtggaaaccacgacgctgaatatacagaacaagatacctgctcagacaaagtcacctgaagaaactgataaagagaaagttcacctctctgactcagaaaggaaaatggacccagccgaagaggatacaaatgtgtatactgagaaacactcagacagtctgtttaaacggacagaagtcctagcagctgtcattgctggtggagttattggctttctctttgcaatttttcttatcctgctgttggtgtatcgcatgagaaagaaggatgaaggaagctatgaccttggagaacgcaaaccatccagtgctgcttatcagaaggcacctactaaggagttttatgcgtaaaactccaacttagtgtctctatttatgagatcactgaacttttcaaaataaagcttttgcatagaataatgaagatctttgttttttgttttcattaaagagccattctggcactttaatgataaaatcccattgtatttaaaacatttcatgtatttctttagaacaacataaaattaaaatttaacatctgcagtgttctgtgaatagcagtggcaaaatattatgttatgaaaaccctcgatgttcatggaattggtttaaacttttatgcgcaaatacaaaatgattgtctttttcctatgactcaaagatgaaagctgtttcatttgtgtcagcatgtctcagattgaccttaccaagttggtcttactttgttaatttatctgttgtccccttcctctcctctgccctcccttcttgtgcccttaaaaccaaaccctatgccttttgtagctgtcatggtgcaatttgtctttggaaaattcagataatggtaatttagtgtatatgtgattttcaaatatgtaaactttaacttccactttgtataaatttttaagtgtcagactatccattttacacttgctttatttttcattacctgtagctttgggcagatttgcaacagcaaattaatgtgtaaaattggattattactacaaaaccgtttagtcatatctatctaatcagatcttcttttgggaggatttgatgtaagttactgacaagcctcagcaaacccaaagatgttaacagtattttaagaagttgctgcagattcctttggccactgtatttgttaatttcttgcaatttgaaggtacgagtagaggtttaaagaaaaatcagtttttgttcttaaaaatgcatttaagttgtaaacgtctttttaagcctttgaagtgcctctgattctatgtaacttgttgcagactggtgttaatgagtatatgtaacagtttaaaaaaaaagttggtattttataagcacagacaattctaatggtaacttttgtagtcttatgaatagacataaattgtaatttgggaacataaaaactactgaataaatcatgtggcctaatattgaaaatgtcactgttataaattttgtacatttttgatcaaatgtacatctcccctttgctaacggccgtctgctctcaaggatgacgtgggtttgatttctaagtgtttcacagtgtctgtaaatcaagaccaaagagcctgtcgatgagactgtttattaccagattcacttctgaattggccagaggaaatctgaatgtattatcctgtgtgtgtctaggtagagatattggaaggctgccaggggatttcgaagtttgcaacctttataggataactgatggcaatattaagacagacgcctgcttttgcaaataacttacaagactgtaaattccaaagatctgaatggggctttcctgatgttggtatctaaggcttaggcctatagattgatttacctttggaattgtgctccaaatgtctactgaagcttaaccgaagaactaataaatggactacagtagctcacgttacagggaaggagggtaggcagggaggctctgtgtgttaaaatgagggtctcactgctttaggattgaagtggctggaaagagtgatgcctggggaaggagatggagttatgagggtactgtggctggtactttctgtactaaacatttcctttttctattttaccactaattttgttttaaactgtgagccgtccaagtcagaagaagacagcaaaaaaagcaacttttccaacatacaatttacttttaataaagtatgaatatttcattttgagaacattccctggaattgccacataattcattaaaaacatttttttaagcaacacttggaacagtgtttactttaaatccttaatggccttaattaattctcagattcctgccccatcacttacagaaccaattcactttagagtgactaaaaggaaacgatagcctagctttctaaagccacgctgtgtccctcaattacagagggtaggaatgggtatacctctaactgtgcaaagcagagtgaaattcaattcatagaataacaactgctgggaatatccgtgccaggaaaagaaaaatttctggcaaatattttgtcactgctgtaaagcaaaatatttgtgaaagtgccaaaataaagtctgtcatgccaaaagtaaa

SEQ ID NO: 30699 - DNA, 1583 bp, Homo sapiens
  source 1..1583: mol_type = unassigned DNA
agatacccccggagctccagccgcgcggatcgcgcgctcccgccgctctgcccctaaacttctgccgtagctccctttcaagccagcgaatttattccttaaaaccagaaactgaacctcggcacgggaaaggagtccgcggaggagcaaaaccacagcagagcaagaagagcttcagagagcagccttcccggagcaccaactccgtgtcgggagtgcagaaaccaacaagtgagagggcgccgcgttcccggggcgcagctgcgggcggcgggagcaggcgcaggaggaggaagcgagcgcccccgagccccgagcccgagtccccgagcctgagccgcaatcgctgcggtactctgctccggattcgtgtgcgcgggctgcgccgagcgctgggcaggaggcttcgttttgccctggttgcaagcagcggctgggagcagccggtccctggggaatatgcggcgcgcgtggatcctgctcaccttgggcttggtggcctgcgtgtcggcggagtcggtgagagctgatgaggatgtagagagtccagagctgacaacatctcgaccacttccaaagatactgttgactagtgctgctccaaaagtggaaaccacgacgctgaatatacagaacaagatacctgctcagacaaagtcacctgaagaaactgataaagagaaagttcacctctctgactcagaaaggaaaatggacccagccgaagaggatacaaatgtgtatactgagaaacactcagacagtctgtttaaacggacagaagtcctagcagctgtcattgctggtggagttattggctttctctttgcaatttttcttatcctgctgttggtgtatcgcatgagaaagaaggatgaaggaagctatgaccttggagaacgcaaaccatccagtgctgcttatcagaaggcacctactaaggagttttatgcgtaaaactccaacttagtgtctctatttatgagatcactgaacttttcaaaataaagcttttgcatagaataatgaagatctttgttttttgttttcattaaagagccattctggcactttaatgataaaatcccattgtatttaaaacatttcatgtatttctttagaacaacataaaattaaaatttaacatctgcagtgttctgtgaatagcagtggcaaaatattatgttatgaaaaccctcgatgttcatggaattggtttaaacttttatgcgcaaatacaaaatgattgtctttttcctatgactcaaagatgaaagctgtttcatttgtgtcagcatgtctcagattgaccttaccaagttggtcttactttgttaatttatctgttgtccccttcctctcctctgccctcccttcttgtgcccttaaaaccaaaccctatgccttttgtagctgtcatggtgcaatttgtctttggaaaattcagataatggtaatttagtgtatatgtgattttcaaatatgtaaactttaacttccactttgtataaatttttaagtgtcagactatccattttacacttgctttatttttcattacctgtagctttgggcagatttgc

SEQ ID NO: 30700 - DNA, 1318 bp, Homo sapiens
  source 1..1318: mol_type = unassigned DNA
gtctttgttccagagcatttgccaaagccaggtatgtccagtcaaagggataatgcaaccgatagctcccaagcctccatatcctcagctgttgcttgttgccactgaggggtggacatgttttcatttggcatcttacatgtgagcatcatgactacagactcatcttataccaattaaataataaactccactctgtgggcagaggttctgtctggagagagcagagctgacatctgataaagacatgtaccttgacaacagctccattgaagaagcttcaggagtgtatcctattgatgacgatgactacgcttctgcgtctggctcgggagctgatgaggatgtagagagtccagagctgacaacatctcgaccacttccaaagatactgttgactagtgctgctccaaaagtggaaaccacgacgctgaatatacagaacaagatacctgctcagacaaagtcacctgaagaaactgataaagagaaagttcacctctctgactcagaaaggaaaatggacccagccgaagaggatacaaatgtgtatactgagaaacactcagacagtctgtttaaacggacagaagtcctagcagctgtcattgctggtggagttattggctttctctttgcaatttttcttatcctgctgttggtgtatcgcatgagaaagaaggatgaaggaagctatgaccttggagaacgcaaaccatccagtgctgcttatcagaaggcacctactaaggagttttatgcgtaaaactccaacttagtgtctctatttatgagatcactgaacttttcaaaataaagcttttgcatagaataatgaagatctttgttttttgttttcattaaagagccattctggcactttaatgataaaatcccattgtatttaaaacatttcatgtatttctttagaacaacataaaattaaaatttaacatctgcagtgttctgtgaatagcagtggcaaaatattatgttatgaaaaccctcgatgttcatggaattggtttaaacttttatgcgcaaatacaaaatgattgtctttttcctatgactcaaagatgaaagctgtttcatttgtgtcagcatgtctcagattgaccttaccaagttggtcttactttgttaatttatctgttgtccccttcctctcctctgccctcccttcttgtgcccttaaaaccaaaccctatgccttttgtagctgtcatggtgcaatttgtctttggaaaattcagataatggtaatttagtgtatatgtgattttcaaatatgtaaactttaacttccactttgtat

SEQ ID NO: 30701 - DNA, 677 bp, Homo sapiens
  source 1..677: mol_type = unassigned DNA
gcaccaactccgtgtcgggagtgcagaaaccaacaaagagcagagctgacatctgataaagacatgtaccttgacaacagctccattgaagaagcttcaggagtgtatcctattgatgacgatgactacgcttctgcgtctggctcgggagctgatgaggatgtagagagtccagagctgacaacatctcgaccacttccaaagatactgttgactagtgctgctccaaaagtggaaaccacgacgctgaatatacagaacaagatacctgctcagacaaagtcacctgaagaaactgataaagagaaagttcacctctctgactcagaaaggaaaatggacccagccgaagaggatacaaatgtgtatactgagaaacactcagacagtctgtttaaacggacagaagtcctagcagctgtcattgctggtggagttattggctttctctttgcaatttttcttatcctgctgttggtgtatcgcatgagaaagaaggatgaaggaagctatgaccttggagaacgcaaaccatccagtgctgcttatcagaaggcacctactaaggagttttatgcgtaaaactccaacttagtgtctctatttatgagatcactgaacttttcaaaataaagcttttgcatagaataatgaagatctttgttttttgttttcat

SEQ ID NO: 30702 - DNA, 2116 bp, Homo sapiens
  source 1..2116: mol_type = unassigned DNA
agatacccccggagctccagccgcgcggatcgcgcgctcccgccgctctgcccctaaacttctgccgtagctccctttcaagccagcgaatttattccttaaaaccagaaactgaacctcggcacgggaaaggagtccgcggaggagcaaaaccacagcagagcaagaagagcttcagagagcagccttcccggagcaccaactccgtgtcgggagtgcagaaaccaacaagtgagagggcgccgcgttcccggggcgcagctgcgggcggcgggagcccgagtccccgagcctgagccgcaatcgctgcggtactctgctccggattcgtgtgcgcgggctgcgccgagcgctgggcaggaggcttcgttttgccctggttgcaagcagcggctgggagcagccggtccctggggaatatgcggcgcgcgtggatcctgctcaccttgggcttggtggcctgcgtgtcggcggagtcgagagcagagctgacatctgataaagacatgtaccttgacaacagctccattgaagaagcttcaggagtgtatcctattgatgacgatgactacgcttctgcgtctggctcgggagctgatgaggatgtagagagtccagagctgacaacatctcgaccacttccaaagatactgttgactagtgctgctccaaaagtggaaaccacgacgctgaatatacagaacaagatacctgctcagacaaagtcacctgaagaaactgataaagagaaagttcacctctctgactcagaaaggaaaatggacccagccgaagaggatacaaatgtgtatactgagaaacactcagacagtctgtttaaacggacagaagtcctagcagctgtcattgctggtggagttattggctttctctttgcaatttttcttatcctgctgttggtgtatcgcatgagaaagaaggatgaaggaagctatgaccttggagaacgcaaaccatccagtgctgcttatcagaaggcacctactaaggagttttatgcgtaaaactccaacttagtgtctctatttatgagatcactgaacttttcaaaataaagcttttgcatagaataatgaagatctttgttttttgttttcattaaagagccattctggcactttaatgataaaatcccattgtatttaaaacatttcatgtatttctttagaacaacataaaattaaaatttaacatctgcagtgttctgtgaatagcagtggcaaaatattatgttatgaaaaccctcgatgttcatggaattggtttaaacttttatgcgcaaatacaaaatgattgtctttttcctatgactcaaagatgaaagctgtttcatttgtgtcagcatgtctcagattgaccttaccaagttggtcttactttgttaatttatctgttgtccccttcctctcctctgccctcccttcttgtgcccttaaaaccaaaccctatgccttttgtagctgtcatggtgcaatttgtctttggaaaattcagataatggtaatttagtgtatatgtgattttcaaatatgtaaactttaacttccactttgtataaatttttaagtgtcagactatccattttacacttgctttatttttcattacctgtagctttgggcagatttgcaacagcaaattaatgtgtaaaattggattattactacaaaaccgtttagtcatatctatctaatcagatcttcttttgggaggatttgatgtaagttactgacaagcctcagcaaacccaaagatgttaacagtattttaagaagttgctgcagattcctttggccactgtatttgttaatttcttgcaatttgaaggtacgagtagaggtttaaagaaaaatcagtttttgttcttaaaaatgcatttaagttgtaaacgtctttttaagcctttgaagtgcctctgattctatgtaacttgttgcagactggtgttaatgagtatatgtaacagtttaaaaaaaaagttggtattttataagcacagacaattctaatggtaacttttgtagtcttatgaatagacataaattgtaatttgggaacataaaaactactgaataaatcatgtggcctaatattg

SEQ ID NO: 30703 - DNA, 1473 bp, Homo sapiens
  source 1..1473: mol_type = unassigned DNA
agatacccccggagctccagccgcgcggatcgcgcgctcccgccgctctgcccctaaacttctgccgtagctccctttcaagccagcgaatttattccttaaaaccagaaactgaacctcggcacgggaaaggagtccgcggaggagcaaaaccacagcagagcaagaagagcttcagagagcagccttcccggagcaccaactccgtgtcgggagtgcagaaaccaacaagtgagagggcgccgcgttcccggggcgcagctgcgggcggcgggagcaggcgcaggaggcttcgttttgccctggttgcaagcagcggctgggagcagccggtccctggggaatatgcgggtggcctgcgtgtcggcggagtcgagagcagagctgacatctgataaagacatgtaccttgacaacagctccattgaagaagcttcaggagtgtatcctattgatgacgatgactacgcttctgcgtctggctcgggagctgatgaggatgtagagagtccagagctgacaacatctcgaccacttccaaagatactgttgactagtgctgctccaaaagtggaaaccacgacgctgaatatacagaacaagatacctgctcagacaaagtcacctgaagaaactgataaagagaaagttcacctctctgactcagaaaggaaaatggacccagccgaagaggatacaaatgtgtatactgagaaacactcagacagtctgtttaaacggacagaagtcctagcagctgtcattgctggtggagttattggctttctctttgcaatttttcttatcctgctgttggtgtatcgcatgagaaagaaggatgaaggaagctatgaccttggagaacgcaaaccatccagtgctgcttatcagaaggcacctactaaggagttttatgcgtaaaactccaacttagtgtctctatttatgagatcactgaacttttcaaaataaagcttttgcatagaataatgaagatctttgttttttgttttcattaaagagccattctggcactttaatgataaaatcccattgtatttaaaacatttcatgtatttctttagaacaacataaaattaaaatttaacatctgcagtgttctgtgaatagcagtggcaaaatattatgttatgaaaaccctcgatgttcatggaattggtttaaacttttatgcgcaaatacaaaatgattgtctttttcctatgactcaaagatgaaagctgtttcatttgtgtcagcatgtctcagattgaccttaccaagttggtcttactttgttaatttatctgttgtccccttcctctcctctgccctcccttcttgtgcccttaaaaccaaaccctatgccttttgtagctgtcatggtgcaatttgtctttggaaaattcagataatggtaatttagtgtatatgtgattttcaaatatgtaaactttaacttccactttgtat

SEQ ID NO: 30704 - DNA, 6392 bp, Homo sapiens
  source 1..6392: mol_type = unassigned DNA
gcccagcgctggcgcagtgagaacttcgagagacccgtggacctggagggctctggggatgatgactcctttcccgatgatgaactggatgacctctactcggggtcgggctcgggctgtaagtacccccctccctacctctgcctgggggcagtgaccagtctgtatccagcctcaactctgagaagcccacggggggcttgcttcagtgaggcagggggcattcactgcctgggtcaggcaagttcttcttgctctggatccccagaacaagaagggcagaacatccttctggggatagaacaagacctgggaggacctcagggcccagaatgtccaggtctccagggtcccacgtctgcatctttgtgtgtgctatgtggctttctctgcagaccttgcttggttccggtggtcccgtcaggtgcaataagctgtggccaatggtggggttagggcagtgatgacacagggcaggtgcttcaagtggtgcctgggatggccccgccctggggaaggggagccaggtcagctgggtctagcagaatctcgggagagaagggcaccgcgaaccccactctgccatgtagcaactgtgtgcccctcggtgctccccctccctgaatccctgtattttcacctgtggatggtgagaaatacgacttcttctcagtgcctctaggagggtttgggataggaagctggggtctggcacagaggaggagctctcaaaatggtagcaaaaagaaggcagctgagactgggcccagtgagggcacgggctggcatctgaggagatggtacggggtctgcacgccacagagctggctccccacagccctcgcctctggtctcccctccttagccaagtcctttgagcctctttcaaattaatctttgtaaaacccgtttatattgggtcacatctctattcgcaaagttccctggctcccctccctcctgcctggttccgagcccaggagctggctgtggcttctccctcccccatcccctactccccatctcatttcctcccaagttccttcactgtcccggctttgcgtcagccagattgctcaagcagttcccctgcctcaagggcttcttttcccttttaccctccgcctctgcctctgggggaagcccttagtgtaccacccctgccttgagcttgtggtaggggtgcctttggggtctgactcttcccagaatgccactcctgtgttcccctgcaagccccagcaagttttgcagccagtagcgcctcagttgctgctgcctggattcaacctcatagaaactgtaggctgggtgggcaggaatagtcaaggaaggcttcccgggagaggcggcccccagaatttttgacttggcagagagaagttggggaacatcagcaactgaccacctttagctgggctgtgccttcctcctttctctcatcttttctgggaaaattgggtaaagagagggggttgggagacctaatcttgatggccattgcttacctgggatcctcatgcccctcacaaccacccagctccctagctctctccctctcccccaccccctcagacttcgagcaggagtcgggcattgagacagccatgcgcttcagcccagatgtagccctggcggtgtccaccacacctgcggtgctgcccaccacgaacatccagcctgtgggcacaccatttgaagagctcccctctgagcgccccaccctggagccagccaccagccccctggtggtgacagaagtcccggaagagcccagccagagagccaccaccgtctccactaccatggctaccactgctgccacaagcacaggggacccgactgtggccacagtgcctgccacagtggccaccgccacccccagcacccctgcagcacccccttttacggccaccactgctgttataaggaccactggcgtacggaggcttctgcctctcccactgaccacagtggctacggcacgggccactacccccgaggcgccctccccgcccaccacggcggctgtcttggacaccgaggccccaacacccaggctggtcagcacagctacctcccggccaagagcccttcccaggccggccaccacccaggagcctgacatccctgagaggagcaccctgcccctggggaccactgcccctggacccacagaggtggctcagaccccaactccagagaccttcctgaccacaatccgggatgagccagaggttccggtgagtggggggcccagtggagacttcgagctgccagaagaagagaccacacaaccagacacagccaatgaggtggtagctgtgggaggggctgcggccaaggcatcatctccacctgggacactgcccaagggtgcccgcccgggccctggcctcctggacaatgccatcgactcgggcagctcagctgctcagctgcctcagaagagtatcctggagcggaaggaggtgctcgtagctgtgattgtgggcggggtggtgggcgccctctttgctgccttcttggtcacactgctcatctatcgtatgaagaaaaaggatgagggcagctacacgctggaggaacccaagcaggcgagcgtcacataccagaagcctgacaagcaggaggagttctatgcctagtggagccacagtgcctccctgcagcctcaacaccaccctgctgtccagtccccagcctggccccaccagcccaagcctgggactgggcctggaacctggccccagttcttctctgccctctctcccaaggtctgcccaggctgccagcctcacacagatcttccccgaggaagaggggctgctgccatctgccccagactgtgcccttacgagctcatctcttgttcccctcatccctgccaccagtctggggcttcaggacctcatgtcagatggatgggaggaagaaagctcctgattggctggtggtggaagaaagggtggggcttgagatgagcctgagccctgacttggcacccacagtgctcactgagatctcctttttggggcagagaggcactcaggctggtttccaggacaaacatttggtaaacacagcccttgaaatcatctagacactgcaacctcttgctcgtatcccagggcctctctctagctgggtgagagggtgtcccttgtcaccagcctgttttgtcctggtctctctggggttgttgaatctctcctcttgcctgccaagtacacatgtacccagacttcatttctttctgcatcttcccccaagaaacagcttcctgagggtgctggggcagccactggtgaggaggggctgctctgatgtccctcctatgaggggactctgcacagacaccattgcccacactatcaccatattttcactcagtcacacacaagacaaaagcatgcaatgacaaaaccatacgcaatcctgaccgcccagccaatcaagacatatcacagaacacacgcgtccttccaagaatgtttatcctcatgcatcacttacacacccccagacacgtactgcaatgcaagtcactagtcatggtcacatgacagtgacagtgtggcctcctcctaccccaaatacacccacactctggcaccacacacattgtctccagctttcaggcttactggggagggtggaatcgagccagaacaatcagcccatattgggtccccctaagttgccccgtcatactcagtcccatgccatggtgcccacaccaaccatgcagccgccaaccccagccagtgtcagacacaatcccatgtggatgcacagtctcactccacatgacctgctctcaatgctggagggaaacaggcaggcccttgcctttctcggaaaaagtgtggggccacagcccttttagggcattgcatgcaggtgggcctggcttcacccctacctgcttcctccccaccgcagctggcagagggggaggtttggggccagacccccactagctgggagcctgggggctcctctaaggctgaggaaggaaatttggccccaggttgttggggggtcttgggtctcccaggacggaaggcccagggcagggagggggcatgtggttgggctcctttatctccctgtgtccccttcctgctttgagctagggggctgactctgcctcccaggacacaagtctccaaagtgcctgtgagggcgggccctccgcaccctctgccctctgcctggcaggccaacctcagcccacctgcccagaggccctccctgtggacaccccctcacctatttggccaaacaattctggctgcagcttcaggggccatggctggaagcagcccctgcagatccctcaggccccgaggtcagggtttgagggatgagaccaggtgatagtgggggaggggttacttcctttgttacctagcaagtagggctatttccatcggtattttaaatgtggggtcacagatcttttggggagggtgtgcttggcagggggcctcttggagccaaagggatgtggtgtgagttgcgattggctggcactcacacccccacccctcacccacatcccagattcaagtcaggaaggcaggttttatttcagggcccttttcaagatgccctggcagcagatttctgcaggatgaggggtagcggtgtgtaggcagtgagggggaggttccaggggctgtcccacagcctgtcttttccaggctgggctccatcttccagtcccaaaaccctccttcacagggcccagaggcttgtgaggaagccaggtggacccagccttagaagagtgggcatggggggcccctgatatctggagggggcgggttggcctcagtcatctttggagcagaagggctgggtcctggggccacagaccacaaggctcagcctccctaccctgctccctggggtgctgctgtcttggagagcacagctctggtgagacggcctgggcaggccgaggctgagaaaccagggaggatagaggagaaaagggcttgggcccccagccccagaagatgctggaccccaggtgggagacccaacagtgggtgcagtttctcagtagggctggagccaatggtgggggtggccccggcaggcctggctcctcacatcccaggggttggcttctgatttggggcttgggctccaggcactggcttctcttctctgtgtccttagcatttgagagaagaggccaggggccttgttcatggatccctggacccaaggcagatgtccaggctttatcctcctgaggatgaggagtctgaccagcccaaatctgccctggccggcctgaccggggcaaggcagtccaagagagttcagtgaggaccagctaggctctcccaggtgcaatgtgggtgcagggccctcatgtccccctacccctgcctgtgatggagtgttctgaggggctttggcatttgctggaagcacagggagttccaaatgagagggagcttctgtggcttgagagcctctggggccttggctgccagagcacgaggcaggccaggacctggagagcccagaccctgtctccaggaggccaggaggccagatgggggccttgcctgaaagactggtccccttgatcgctggaggcatgtgggtggcaaccagggctgggcagggcttagggtgtgtgggccaaacccccctggggttggcaaagccgcctgtcaggcctcctggtgggggcccctggacacagggagcagaccctctgcctcatggggtaggagtggctgcctcctgtgttctctggatttcttctcccaacaactacaaccctggacttgcctccccaggcctcttgcctgtaaatagaagcccgcaaactgtacagatttacagaggcatcgagactgggccctgggagttgccatctgagagccgatggccccagcatcccccaggtgcctgcctggcaccacagtgaccctggcctcagcgtggcaaatgcatgtaaatatttttcgtaggcagcgtggctccagagagccccctgaagacagtgtccctccctcctgtgagtcctttctcctgtacagaacctgcctggggtgggtgggggtctgccattccctcccccaggccttccctgccccttctctcccctgtaacctgtttattaaccatacctgtcctgagttcatggccaaaaccttaaataagaaaaacaaaagaaaaagacagtggaaaaaagagaccaaggcgcctgccccactgcgggtactctcctgttccagccttgtgaaggaactggttttgtttttgtttttttttttttttttttttttttgtttgtttgtttttttaacacttcctgtgctgtgcccatttataagaggaaataaaattaagctgaaatg

SEQ ID NO: 30705 - DNA, 1580 bp, Homo sapiens
  source 1..1580: mol_type = unassigned DNA
gctgtgggcgcggagctgcgaggcggagccgggcggccgagccgggagcccgcgagcctagagcgcgtcggtccagccgccgggccgcgccgccgccaagcagccgccccgcgcgccgcgcctcgggaacaaaggcgcccgcccgccgcccgccgcccgcgcccgcgccgccgccatgaagccggggccgccgcaccgtgccggggccgcccacggggccggcgccggggccggggccgcggccgggcccggggcccgcgggctgctcctgccaccgctgctgctgctgctgctggcggggcgcgccgcgggggcccagcgctggcgcagtgagaacttcgagagacccgtggacctggagggctctggggatgatgactcctttcccgatgatgaactggatgacctctactcggggtcgggctcgggctacttcgagcaggagtcgggcattgagacagccatgcgcttcagcccagatgtagccctggcggtgtccaccacacctgcggtgctgcccaccacgaacatccagcctgtgggcacaccatttgaagagctcccctctgagcgccccaccctggagccagccaccagccccctggtggtgacagaagtcccggaagagcccagccagagagccaccaccgtctccactaccatggctaccactgctgccacaagcacaggggacccgactgtggccacagtgcctgccacagtggccaccgccacccccagcacccctgcagcacccccttttacggccaccactgctgttataaggaccactggcgtacggaggcttctgcctctcccactgaccacagtggctacggcacgggccactacccccgaggcgccctccccgcccaccacggcggctgtcttggacaccgaggccccaacacccaggctggtcagcacagctacctcccggccaagagcccttcccaggccggccaccacccaggagcctgacatccctgagaggagcaccctgcccctggggaccactgcccctggacccacagaggtggctcagaccccaactccagagaccttcctgaccacaatccgggatgagccagaggttccggtgagtggggggcccagtggagacttcgagctgccagaagaagagaccacacaaccagacacagccaatgaggtggtagctgtgggaggggctgcggccaaggcatcatctccacctgggacactgcccaagggtgcccgcccgggccctggcctcctggacaatgccatcgactcgggcagctcagctgctcagctgcctcagaagagtatcctggagcggaaggaggtgctcgtagctgtgattgtgggcggggtggtgggcgccctctttgctgccttcttggtcacactgctcatctatcgtatgaagaaaaaggatgagggcagctacacgctggaggaacccaagcaggcgagcgtcacataccagaagcctgacaagcaggaggagttctatgcctagtggagccacagtgcctccctgcagcctcaacaccaccctgctgtccagtccccagcctggccccaccagcccaagc

SEQ ID NO: 30706 - DNA, 2613 bp, Homo sapiens
  source 1..2613: mol_type = unassigned DNA
actcgccgcagcctgcgcgccttctccagtccgcggtgccatggcccccgcccgtctgttcgcgctgctgctgttcttcgtaggcggagtcgccgagtcgatccgagagactgaggtcatcgacccccaggacctcctagaaggccgatacttctccggagccctaccagacgatgaggatgtagtggggcccgggcaggaatctgatgactttgagctgtctggctctggagatctggatgacttggaagactccatgatcggccctgaagttgtccatcccttggtgcctctagataaccatatccctgagagggcagggtctgggagccaagtccccaccgaacccaagaaactagaggagaatgaggttatccccaagagaatctcacccgttgaagagagtgaggatgtgtccaacaaggtgtcaatgtccagcactgtgcagggcagcaacatctttgagagaacggaggtcctggcagctctgattgtgggtggcatcgtgggcatcctctttgccgtcttcctgatcctactgctcatgtaccgtatgaagaagaaggatgaaggcagctatgacctgggcaagaaacccatctacaagaaagcccccaccaatgagttctacgcgtgaagcttgcttgtgggcactggcttggactttagcggggagggaagccaggggattttgaagggtggacattagggtagggtgaggtcaacctaatactgacttgtcagtatctccagctctgattacctttgaagtgttcagaagagacattgtcttctactgttctgccaggttcttcttgagctttgggcctcagttgccctggcagaaaaatggattcaacttggcctttctgaaggcaagactgggattggatcacttcttaaacttccagttaagaatctaggtccgccctcaagcccatactgaccatgcctcatccagagctcctctgaagccagggggctaacggatgttgtgtggagtcctggctggaggtcctcccccagtggccttcctcccttcctttcacagccggtctctctgccaggaaatgggggaaggaactagaaccacctgcaccttgagatgtttctgtaaatgggtacttgtgatcacactacgggaatctctgtggtatatacctggggccattctaggctctttcaagtgacttttggaaatcaaccttttttatttgggggggaggatggggaaaagagctgagagtttatgctgaaatggatttatagaatatttgtaaatctatttttagtgtttgttcgtttttttaactgttcattcctttgtgcagagtgtatatctctgcctgggcaagagtgtggaggtgccgaggtgtcttcattctctcgcacatttccacagcacctgctaagtttgtatttaatggtttttgtttttgtttttgtttgtttcttgaaaatgagagaagagccggagagatgatttttattaattttttttttttttttttttttttactatttatagctttagatagggcctcccttcccctcttctttctttgttctctttcattaaaccccttccccagttttttttttatactttaaaccccgctcctcatggccttggccctttctgaagctgcttcctcttataaaatagcttttgccgaaacatagtttttttttagcagatcccaaaatataatgaaggggatggtgggatatttgtgtctgtgttcttataatatattattattcttccttggttctagaaaaatagataaatatatttttttcaggaaatagtgtggtgtttccagtttgatgttgctgggtggttgagtgagtgaattttcatgtggctgggtgggtttttgcctttttctcttgccctgttcctggtgccttctgatggggctggaatagttgaggtggatggttctaccctttctgccttctgtttgggacccagctggtgttctttggtttgctttcttcaggctctagggctgtgctatccaatacagtaaccacatgcggctgtttaaagttaagccaattaaaatcacataagattaaaaattccttcctcagttgcactaaccacgtttctagaggcgtcactgtatgtagttcatggctactgtactgacagcgagagcatgtccatctgttggacagcactattctagagaactaaactggcttaacgagtcacagcctcagctgtgctgggacgacccttgtctccctgggtaggggggggggaatgggggagggctgatgaggccccagctggggcctgttgtctgggaccctccctctcctgagaggggaggcctggtggcttagcctgggcaggtcgtgtctcctcctgaccccagtggctgcggtgaggggaaccaccctcccttgctgcaccagtggccattagctcccgtcaccactgcaacccagggtcccagctggctgggtcctcttctgcccccagtgcccttccccttgggctgtgttggagtgagcacctcctctgtaggcacctctcacactgttgtctgttactgattttttttgataaaaagataataaaacctggtactttctaaa

SEQ ID NO: 30707 - DNA, 1286 bp, Homo sapiens
  source 1..1286: mol_type = unassigned DNA
actcgccgcagcctgcgcgccttctccagtccgcggtgccatggcccccgcccgtctgttcgcgctgctgctgttcttcgtaggcggagtcgccgagtcgatgacttggaagactccatgatcggccctgaagttgtccatcccttggtgcctctagataaccatatccctgagagggcagggtctgggagccaagtccccaccgaacccaagaaactagaggagaatgaggttatccccaagagaatctcacccgttgaagagagtgaggatgtgtccaacaaggtgtcaatgtccagcactgtgcagggcagcaacatctttgagagaacggaggtcctggcagctctgattgtgggtggcatcgtgggcatcctctttgccgtcttcctgatcctactgctcatgtaccgtatgaagaagaaggatgaaggcagctatgacctgggcaagaaacccatctacaagaaagcccccaccaatgagttctacgcgtgaagcttgcttgtgggcactggcttggactttagcggggagggaagccaggggattttgaagggtggacattagggtagggtgaggtcaacctaatactgacttgtcagtatctccagctctgattacctttgaagtgttcagaagagacattgtcttctactgttctgccaggttcttcttgagctttgggcctcagttgccctggcagaaaaatggattcaacttggcctttctgaaggcaagactgggattggatcacttcttaaacttccagttaagaatctaggtccgccctcaagcccatactgaccatgcctcatccagagctcctctgaagccagggggctaacggatgttgtgtggagtcctggctggaggtcctcccccagtggccttcctcccttcctttcacagccggtctctctgccaggaaatgggggaaggaactagaaccacctgcaccttgagatgtttctgtaaatgggtacttgtgatcacactacgggaatctctgtggtatatacctggggccattctaggctctttcaagtgacttttggaaatcaaccttttttatttgggggggaggatggggaaaagagctgagagtttatgctgaaatggatttatagaatatttgtaaatctatttttagtgtttgttcgtttttttaactgttcattcctttgtgcagagtgtatatctctgcctgggcaagagtgtggaggtgccgaggtgtcttcattctctcgcacatttccacagcacctgctaagtttgtatttaat

SEQ ID NO: 30708 - DNA, 3048 bp, Homo sapiens
  source 1..3048: mol_type = unassigned DNA
gggggtggggagtgttgttaaccggaggggcagccgcagtcgcgcggattgagcgggctcgcggcgctgggttcctggtctccgggccagggcaatgttccgcacggcagtgatgatggcggccagcctggcgctgaccggggctgtggtggctcacgcctactacctcaaacaccagttctaccccactgtggtgtacctgaccaagtccagccccagcatggcagtcctgtacatccaggcctttgtccttgtcttccttctgggcaaggtgatgggcaaggtgttctttgggcaactgagggcagcagagatggagcaccttctggaacgttcctggtacgccgtcacagagacttgtctggccttcaccgtttttcgggatgacttcagcccccgctttgttgcactcttcactcttcttctcttcctcaaatgtttccactggctggctgaggaccgtgtggactttatggaacgcagccccaacatctcctggctctttcactgccgcattgtctctcttatgttcctcctgggcatcctggacttcctcttcgtcagccacgcctatcacagcatcctgacccgtggggcctctgtgcagctggtgtttggctttgagtatgccatcctgatgacgatggtgctcaccatcttcatcaagtatgtgctgcactccgtggacctccagagtgagaacccctgggacaacaaggctgtgtacatgctctacacagagctgtttacaggcttcatcaaggttctgctgtacatggccttcatgaccatcatgatcaaggtgcacaccttcccactctttgccatccggcccatgtacctggccatgagacagttcaagaaagctgtgacagatgccatcatgtctcgccgagccatccgcaacatgaacaccctgtatccagatgccaccccagaggagctccaggcaatggacaatgtctgcatcatctgccgagaagagatggtgactggtgccaagagactgccctgcaaccacattttccataccagctgcctgcgctcctggttccagcggcagcagacctgccccacctgccgtatggatgtccttcgtgcatcgctgccagcgcagtcaccaccacccccggagcctgcggatcaggggccaccccctgccccccaccccccaccactcttgcctcagccccccaacttcccccagggcctcctgcctccttttcctccaggcatgttcccactgtggccccccatgggcccctttccacctgtcccgcctccccccagctcaggagaggctgtggctcctccatccaccagtgcagccctttctcggcccagtggagcagctacaaccacagctgctggcaccagtgctactgctgcttctgccacagcatctggcccaggctctggctctgccccagaggctggccctgcccctggtttccccttccctcctccctggatgggtatgcccctgcctccaccctttgccttccccccaatgcctgtgccccctgcgggctttgctgggctgaccccagaggagctacgagctctggagggccatgagcggcagcacctggaggcccggctgcagagcctgcgtaacatccacacactgctggacgccgccatgctgcagatcaaccagtacctcaccgtgctggcctccttggggcccccccggcctgccacttcagtcaactccactgaggagactgccactacagttgttgctgctgcctcctccaccagcatccctagctcagaggccacgaccccaaccccaggagcctccccaccagcccctgaaatggaaaggcctccagctcctgagtcagtgggcacagaggagatgcctgaggatggagagcccgatgcagcagagctccgccggcgccgcctgcagaagctggagtctcctgttgcccactgacactgccccagcccagccccagcctctgctcttttgagcagccctcgctggaacatgtcctgccaccaagtgccagctccctctctgtctgcaccagggagtagtacccccagctctgagaaagaggcggcatcccctaggccaagtggaaagaggctggggttcccatttgactccagtcccaggcagccatggggatctcgggtcagttccagccttcctctccaactcttcagccctgtgttctgctggggccatgaaggcagaaggtttagcctctgagaagccctcttcttcccccacccctttccaggagaaggggctgcccctccaagccctacttgtatgtgcggagtcacactgcagtgccgaacagtattagctcccgttcccaagtgtggactccagaggggctggaggcaagctatgaacttgctcgctggcccacccctaagactggtacccatttccttttcttaccctgatctccccagaagcctcttgtggtggtggctgtgccccctatgccctgtggcatttctgcgtcttactggcaaccacacaactcagggaaaggaatgcctgggagtgggggtgcaggcgggcagcactgagggaccctgccccgcccctccccccaggcccctttcctctgcagcttctcaagtgagactgacctgtctcacccagcagccactgcccagccgcactccaggcaagggccagtgcgcctgctcctgaccactgcaatcccagcgcccaaggaaggccacttctcaactggcagaacttctgaagtttagaattggaattacttccttactagtgtcttttggcttaaattttgtcttttgaagttgaatgcttaatcccgggaaagaggaacaggagtgccagactcctggtctttccagtttagaaaaggctctgtgccaaggagggaccacaggagctgggacctgcctgcccctgtcttttccccttggttttgtgttacaagagttgttggagacagtttcagatgattatttaatttgtaaatattgtacaaattttaatagcttaaattgtatatacagccaaataaaaacttgcattaacaa

SEQ ID NO: 30709 - DNA, 2841 bp, Homo sapiens
  source 1..2841: mol_type = unassigned DNA
gcgggctcgcggcgctgggttcctggtctccgggccagggcaatgttccgcacggcagtgatgatggcggccagcctggcgctgaccggggctgtggtggctcacgcctactacctcaaacaccagttctaccccactgtggtgtacctgaccaagtccagccccagcatggcagtcctgtacatccaggcctttgtccttgtcttccttctgggcaaggtgatgggcaaggtgttctttgggcaactgagggcagcagagatggagcaccttctggaacgttcctggtacgccgtcacagagacttgtctggccttcaccgtttttcgggatgacttcagcccccgctttgttgcactcttcactcttcttctcttcctcaaatgtttccactggctggctgaggaccgtgtggacttttatgccatcctgatgacgatggtgctcaccatcttcatcaagtatgtgctgcactccgtggacctccagagtgagaacccctgggacaacaaggctgtgtacatgctctacacagagctgtttacaggcttcatcaaggttctgctgtacatggccttcatgaccatcatgatcaaggtgcacaccttcccactctttgccatccggcccatgtacctggccatgagacagttcaagaaagctgtgacagatgccatcatgtctcgccgagccatccgcaacatgaacaccctgtatccagatgccaccccagaggagctccaggcaatggacaatgtctgcatcatctgccgagaagagatggtgactggtgccaagagactgccctgcaaccacattttccataccagctgcctgcgctcctggttccagcggcagcagacctgccccacctgccgtatggatgtccttcgtgcatcgctgccagcgcagtcaccaccacccccggagcctgcggatcaggggccaccccctgccccccaccccccaccactcttgcctcagccccccaacttcccccagggcctcctgcctccttttcctccaggcatgttcccactgtggccccccatgggcccctttccacctgtcccgcctccccccagctcaggagaggctgtggctcctccatccaccagtgcagccctttctcggcccagtggagcagctacaaccacagctgctggcaccagtgctactgctgcttctgccacagcatctggcccaggctctggctctgccccagaggctggccctgcccctggtttccccttccctcctccctggatgggtatgcccctgcctccaccctttgccttccccccaatgcctgtgccccctgcgggctttgctgggctgaccccagaggagctacgagctctggagggccatgagcggcagcacctggaggcccggctgcagagcctgcgtaacatccacacactgctggacgccgccatgctgcagatcaaccagtacctcaccgtgctggcctccttggggcccccccggcctgccacttcagtcaactccactgaggagactgccactacagttgttgctgctgcctcctccaccagcatccctagctcagaggccacgaccccaaccccaggagcctccccaccagcccctgaaatggaaaggcctccagctcctgagtcagtgggcacagaggagatgcctgaggatggagagcccgatgcagcagagctccgccggcgccgcctgcagaagctggagtctcctgttgcccactgacactgccccagcccagccccagcctctgctcttttgagcagccctcgctggaacatgtcctgccaccaagtgccagctccctctctgtctgcaccagggagtagtacccccagctctgagaaagaggcggcatcccctaggccaagtggaaagaggctggggttcccatttgactccagtcccaggcagccatggggatctcgggtcagttccagccttcctctccaactcttcagccctgtgttctgctggggccatgaaggcagaaggtttagcctctgagaagccctcttcttcccccacccctttccaggagaaggggctgcccctccaagccctacttgtatgtgcggagtcacactgcagtgccgaacagtattagctcccgttcccaagtgtggactccagaggggctggaggcaagctatgaacttgctcgctggcccacccctaagactggtacccatttccttttcttaccctgatctccccagaagcctcttgtggtggtggctgtgccccctatgccctgtggcatttctgcgtcttactggcaaccacacaactcagggaaaggaatgcctgggagtgggggtgcaggcgggcagcactgagggaccctgccccgcccctccccccaggcccctttcctctgcagcttctcaagtgagactgacctgtctcacccagcagccactgcccagccgcactccaggcaagggccagtgcgcctgctcctgaccactgcaatcccagcgcccaaggaaggccacttctcaactggcagaacttctgaagtttagaattggaattacttccttactagtgtcttttggcttaaattttgtcttttgaagttgaatgcttaatcccgggaaagaggaacaggagtgccagactcctggtctttccagtttagaaaaggctctgtgccaaggagggaccacaggagctgggacctgcctgcccctgtcttttccccttggttttgtgttacaagagttgttggagacagtttcagatgattatttaatttgtaaatattgtacaaattttaatagcttaaattgtatatacagccaaataaaaacttgcattaac

SEQ ID NO: 30710 - DNA, 3052 bp, Homo sapiens
  source 1..3052: mol_type = unassigned DNA
agggggtggggagtgttgttaaccggaggggcagccgcagtcgcgcggattgagcgggctcgcggcgctgggttcctggtctccgggccagggcaatgttccgcacggcagtgatgatggcggccagcctggcgctgaccggggctgtggtggctcacgcctactacctcaaacaccagttctaccccactgtggtgtacctgaccaagtccagccccagcatggcagtcctgtacatccaggcctttgtccttgtcttccttctgggcaaggtgatgggcaaggtgttctttgggcaactgagggcagcagagatggagcaccttctggaacgttcctggtacgccgtcacagagacttgtctggccttcaccgtttttcgggatgacttcagcccccgctttgttgcactcttcactcttcttctcttcctcaaatgtttccactggctggctgaggaccgtgtggactttatggaacgcagccccaacatctcctggctctttcactgccgcattgtctctcttatgttcctcctgggcatcctggacttcctcttcgtcagccacgcctatcacagcatcctgacccgtggggcctctgtgcagctggtgtttggctttgagtatgccatcctgatgacgatggtgctcaccatcttcatcaagtatgtgctgcactccgtggacctccagagtgagaacccctgggacaacaaggctgtgtacatgctctacacagagctgtttacaggcttcatcaaggttctgctgtacatggccttcatgaccatcatgatcaaggtgcacaccttcccactctttgccatccggcccatgtacctggccatgagacagttcaagaaagctgtgacagatgccatcatgtctcgccgagccatccgcaacatgaacaccctgtatccagatgccaccccagaggagctccaggcaatggacaatgtctgcatcatctgccgagaagagatggtgactggtgccaagagactgccctgcaaccacattttccataccagctgcctgcgctcctggttccagcggcagcagacctgccccacctgccgtatggatgtccttcgtgcatcgctgccagcgcagtcaccaccacccccggagcctgcggatcaggggccaccccctgccccccaccccccaccactcttgcctcagccccccaacttcccccagggcctcctgcctccttttcctccaggcatgttcccactgtggccccccatgggcccctttccacctgtcccgcctccccccagctcaggagaggctgtggctcctccatccaccagtgcagcagccctttctcggcccagtggagcagctacaaccacagctgctggcaccagtgctactgctgcttctgccacagcatctggcccaggctctggctctgccccagaggctggccctgcccctggtttccccttccctcctccctggatgggtatgcccctgcctccaccctttgccttccccccaatgcctgtgccccctgcgggctttgctgggctgaccccagaggagctacgagctctggagggccatgagcggcagcacctggaggcccggctgcagagcctgcgtaacatccacacactgctggacgccgccatgctgcagatcaaccagtacctcaccgtgctggcctccttggggcccccccggcctgccacttcagtcaactccactgaggagactgccactacagttgttgctgctgcctcctccaccagcatccctagctcagaggccacgaccccaaccccaggagcctccccaccagcccctgaaatggaaaggcctccagctcctgagtcagtgggcacagaggagatgcctgaggatggagagcccgatgcagcagagctccgccggcgccgcctgcagaagctggagtctcctgttgcccactgacactgccccagcccagccccagcctctgctcttttgagcagccctcgctggaacatgtcctgccaccaagtgccagctccctctctgtctgcaccagggagtagtacccccagctctgagaaagaggcggcatcccctaggccaagtggaaagaggctggggttcccatttgactccagtcccaggcagccatggggatctcgggtcagttccagccttcctctccaactcttcagccctgtgttctgctggggccatgaaggcagaaggtttagcctctgagaagccctcttcttcccccacccctttccaggagaaggggctgcccctccaagccctacttgtatgtgcggagtcacactgcagtgccgaacagtattagctcccgttcccaagtgtggactccagaggggctggaggcaagctatgaacttgctcgctggcccacccctaagactggtacccatttccttttcttaccctgatctccccagaagcctcttgtggtggtggctgtgccccctatgccctgtggcatttctgcgtcttactggcaaccacacaactcagggaaaggaatgcctgggagtgggggtgcaggcgggcagcactgagggaccctgccccgcccctccccccaggcccctttcctctgcagcttctcaagtgagactgacctgtctcacccagcagccactgcccagccgcactccaggcaagggccagtgcgcctgctcctgaccactgcaatcccagcgcccaaggaaggccacttctcaactggcagaacttctgaagtttagaattggaattacttccttactagtgtcttttggcttaaattttgtcttttgaagttgaatgcttaatcccgggaaagaggaacaggagtgccagactcctggtctttccagtttagaaaaggctctgtgccaaggagggaccacaggagctgggacctgcctgcccctgtcttttccccttggttttgtgttacaagagttgttggagacagtttcagatgattatttaatttgtaaatattgtacaaattttaatagcttaaattgtatatacagccaaataaaaacttgcattaacaa

SEQ ID NO: 30711 - DNA, 3049 bp, Homo sapiens
  source 1..3049: mol_type = unassigned DNA
agggggtggggagtgttgttaaccggaggggcagccgcagtcgcgcggattgagcgggctcgcggcgctgggttcctggtctccgggccagggcaatgttccgcacggcagtgatgatggcggccagcctggcgctgaccggggctgtggtggctcacgcctactacctcaaacaccagttctaccccactgtggtgtacctgaccaagtccagccccagcatggcagtcctgtacatccaggcctttgtccttgtcttccttctgggcaaggtgatgggcaaggtgttctttgggcaactgagggcagcagagatggagcaccttctggaacgttcctggtacgccgtcacagagacttgtctggccttcaccgtttttcgggatgacttcagcccccgctttgttgcactcttcactcttcttctcttcctcaaatgtttccactggctggctgaggaccgtgtggactttatggaacgcagccccaacatctcctggctctttcactgccgcattgtctctcttatgttcctcctgggcatcctggacttcctcttcgtcagccacgcctatcacagcatcctgacccgtggggcctctgtgcagctggtgtttggctttgagtatgccatcctgatgacgatggtgctcaccatcttcatcaagtatgtgctgcactccgtggacctccagagtgagaacccctgggacaacaaggctgtgtacatgctctacacagagctgtttacaggcttcatcaaggttctgctgtacatggccttcatgaccatcatgatcaaggtgcacaccttcccactctttgccatccggcccatgtacctggccatgagacagttcaagaaagctgtgacagatgccatcatgtctcgccgagccatccgcaacatgaacaccctgtatccagatgccaccccagaggagctccaggcaatggacaatgtctgcatcatctgccgagaagagatggtgactggtgccaagagactgccctgcaaccacattttccataccagctgcctgcgctcctggttccagcggcagcagacctgccccacctgccgtatggatgtccttcgtgcatcgctgccagcgcagtcaccaccacccccggagcctgcggatcaggggccaccccctgccccccaccccccaccactcttgcctcagccccccaacttcccccagggcctcctgcctccttttcctccaggcatgttcccactgtggccccccatgggcccctttccacctgtcccgcctccccccagctcaggagaggctgtggctcctccatccaccagtgcagcagccctttctcggcccagtggagcagctacaaccacagctgctggcaccagtgctactgctgcttctgccacagcatctggcccaggctctggctctgccccagaggctggccctgcccctggtttccccttccctcctccctggatgggtatgcccctgcctccaccctttgccttccccccaatgcctgtgccccctgcgggctttgctgggctgaccccagaggagctacgagctctggagggccatgagcggcagcacctggaggcccggctgcagagcctgcgtaacatccacacactgctggacgccgccatgctgcagatcaaccagtacctcaccgtgctggcctccttgggcccccccggcctgccacttcagtcaactccactgaggagactgccactacagttgttgctgctgcctcctccaccagcatccctagctcagaggccacgaccccaaccccaggagcctccccaccagcccctgaaatggaaaggcctccagctcctgagtcagtgggcacagaggagatgcctgaggatggagagcccgatgcagcagagctccgccggcgccgcctgcagaagctggagtctcctgttgcccactgacactgccccagcccagccccagcctctgctcttttgagcagccctcgctggaacatgtcctgccaccaagtgccagctccctctctgtctgcaccagggagtagtacccccagctctgagaaagaggcggcatcccctaggccaagtggaaagaggctggggttcccatttgactccagtcccaggcagccatggggatctcgggtcagttccagccttcctctccaactcttcagccctgtgttctgctggggccatgaaggcagaaggtttagcctctgagaagccctcttcttcccccacccctttccaggagaaggggctgcccctccaagccctacttgtatgtgcggagtcacactgcagtgccgaacagtattagctcccgttcccaagtgtggactccagaggggctggaggcaagctatgaacttgctcgctggcccacccctaagactggtacccatttccttttcttaccctgatctccccagaagcctcttgtggtggtggctgtgccccctatgccctgtggcatttctgcgtcttactggcaaccacacaactcagggaaaggaatgcctgggagtgggggtgcaggcgggcagcactgagggaccctgccccgcccctccccccaggcccctttcctctgcagcttctcaagtgagactgacctgtctcacccagcagccactgcccagccgcactccaggcaagggccagtgcgcctgctcctgaccactgcaatcccagcgcccaaggaaggccacttctcaactggcagaacttctgaagtttagaattggaattacttccttactagtgtcttttggcttaaattttgtcttttgaagttgaatgcttaatcccgggaaagaggaacaggagtgccagactcctggtctttccagtttagaaaaggctctgtgccaaggagggaccacaggagctgggacctgcctgcccctgtcttttccccttggttttgtgttacaagagttgttggagacagtttcagatgattatttaatttgtaaatattgtacaaattttaatagcttaaattgtatatacagccaaataaaaacttgcattaac

SEQ ID NO: 30712 - DNA, 3144 bp, Homo sapiens
  source 1..3144: mol_type = unassigned DNA
ttgtggttggggtcgggacccgaaccttccccttgaggtctccggagtcggcacgcccctcagccccgccgcacgctttcggcctgtcagctggccggagacctcagacgccggtgcggccgctttgctcaagcctgggccctgcctgcgacgcccgcaactcctggtgctcacaggtctccgggccagggcaatgttccgcacggcagtgatgatggcggccagcctggcgctgaccggggctgtggtggctcacgcctactacctcaaacaccagttctaccccactgtggtgtacctgaccaagtccagccccagcatggcagtcctgtacatccaggcctttgtccttgtcttccttctgggcaaggtgatgggcaaggtgttctttgggcaactgagggcagcagagatggagcaccttctggaacgttcctggtacgccgtcacagagacttgtctggccttcaccgtttttcgggatgacttcagcccccgctttgttgcactcttcactcttcttctcttcctcaaatgtttccactggctggctgaggaccgtgtggactttatggaacgcagccccaacatctcctggctctttcactgccgcattgtctctcttatgttcctcctgggcatcctggacttcctcttcgtcagccacgcctatcacagcatcctgacccgtggggcctctgtgcagctggtgtttggctttgagtatgccatcctgatgacgatggtgctcaccatcttcatcaagtatgtgctgcactccgtggacctccagagtgagaacccctgggacaacaaggctgtgtacatgctctacacagagctgtttacaggcttcatcaaggttctgctgtacatggccttcatgaccatcatgatcaaggtgcacaccttcccactctttgccatccggcccatgtacctggccatgagacagttcaagaaagctgtgacagatgccatcatgtctcgccgagccatccgcaacatgaacaccctgtatccagatgccaccccagaggagctccaggcaatggacaatgtctgcatcatctgccgagaagagatggtgactggtgccaagagactgccctgcaaccacattttccataccagctgcctgcgctcctggttccagcggcagcagacctgccccacctgccgtatggatgtccttcgtgcatcgctgccagcgcagtcaccaccacccccggagcctgcggatcaggggccaccccctgccccccaccccccaccactcttgcctcagccccccaacttcccccagggcctcctgcctccttttcctccaggcatgttcccactgtggccccccatgggcccctttccacctgtcccgcctccccccagctcaggagaggctgtggctcctccatccaccagtgcagccctttctcggcccagtggagcagctacaaccacagctgctggcaccagtgctactgctgcttctgccacagcatctggcccaggctctggctctgccccagaggctggccctgcccctggtttccccttccctcctccctggatgggtatgcccctgcctccaccctttgccttccccccaatgcctgtgccccctgcgggctttgctgggctgaccccagaggagctacgagctctggagggccatgagcggcagcacctggaggcccggctgcagagcctgcgtaacatccacacactgctggacgccgccatgctgcagatcaaccagtacctcaccgtgctggcctccttggggcccccccggcctgccacttcagtcaactccactgaggagactgccactacagttgttgctgctgcctcctccaccagcatccctagctcagaggccacgaccccaaccccaggagcctccccaccagcccctgaaatggaaaggcctccagctcctgagtcagtgggcacagaggagatgcctgaggatggagagcccgatgcagcagagctccgccggcgccgcctgcagaagctggagtctcctgttgcccactgacactgccccagcccagccccagcctctgctcttttgagcagccctcgctggaacatgtcctgccaccaagtgccagctccctctctgtctgcaccagggagtagtacccccagctctgagaaagaggcggcatcccctaggccaagtggaaagaggctggggttcccatttgactccagtcccaggcagccatggggatctcgggtcagttccagccttcctctccaactcttcagccctgtgttctgctggggccatgaaggcagaaggtttagcctctgagaagccctcttcttcccccacccctttccaggagaaggggctgcccctccaagccctacttgtatgtgcggagtcacactgcagtgccgaacagtattagctcccgttcccaagtgtggactccagaggggctggaggcaagctatgaacttgctcgctggcccacccctaagactggtacccatttccttttcttaccctgatctccccagaagcctcttgtggtggtggctgtgccccctatgccctgtggcatttctgcgtcttactggcaaccacacaactcagggaaaggaatgcctgggagtgggggtgcaggcgggcagcactgagggaccctgccccgcccctccccccaggcccctttcctctgcagcttctcaagtgagactgacctgtctcacccagcagccactgcccagccgcactccaggcaagggccagtgcgcctgctcctgaccactgcaatcccagcgcccaaggaaggccacttctcaactggcagaacttctgaagtttagaattggaattacttccttactagtgtcttttggcttaaattttgtcttttgaagttgaatgcttaatcccgggaaagaggaacaggagtgccagactcctggtctttccagtttagaaaaggctctgtgccaaggagggaccacaggagctgggacctgcctgcccctgtcttttccccttggttttgtgttacaagagttgttggagacagtttcagatgattatttaatttgtaaatattgtacaaattttaatagcttaaattgtatatacagccaaataaaaacttgcattaa

SEQ ID NO: 30713 - DNA, 4493 bp, Homo sapiens
  source 1..4493: mol_type = unassigned DNA
cacgggctgagccccgcgccgccaccatgtccgtggccttcgcgtctgcccggccaagaggcaaaggggaggttacgcagcaaaccatccagaagatgctggacgagaaccaccacctgatccagtgcatcctggagtaccagagcaagggcaagacggccgagtgcacgcagtaccagcagatcctgcaccggaacctggtatacctggccacgatcgcagactccaaccagaacatgcagtccctgcttcctgccccgcccacgcagaacatgaacctgggccctggagccctgactcagagcggctccagccagggcctgcactctcagggcagcctgagtgacgccatcagcacgggcctgccaccctcctccctcctgcagggccagattggcaacgggccgagccacgtgtccatgcagcagacggcgcctaacacgctgcccaccacctccatgagcatctctgggcccggctacagccacgcgggacccgcctcgcagggcgtccccatgcaggggcaaggcaccatcggcaactacgtgtctcggaccaacatcaacatgcagtccaacccagtctccatgatgcagcagcaggcggccacgtcgcactacagctcggcgcagggcggcagccagcactaccagggccagtcgtccatcgccatgatggggcagggcagccaggggagcagcatgatggggcagcggcccatggcgccctaccggccctcccagcaaggctcttcccagcagtacctgggccaggaggagtactatggcgagcagtacagccacagccagggcgccgcggagcccatgggccagcagtactaccccgacggccatggcgattacgcctaccagcagtcatcctacacggagcagagctacgaccggtccttcgaggagtccacgcagcactactatgaggggggaaactcccagtacagccagcagcaggccgggtaccagcagggtgccgcgcagcagcagacgtactcccagcagcagtaccccagccagcagagctaccccgggcagcagcagggctacgggtctgcccagggagccccgtcacagtaccccggctaccagcaaggccaaggccagcagtacggaagctaccgagcaccgcagacagcgccgtctgcccagcagcagcggccctacggctatgaacagggccagtatggaaattaccagcagtaagggacacacattctggctggagcccttgtggtagcgtgttcatccaggggccggatgggctggcggcagctctggtgaattgtgacatgttggttacctgttcgcccagtgccacgtctgcatgtgaagcgtgctcatttcatgctgggtatgacgccgagcgcacaccactggcgtgagacagcgcttggtggtgtgatacttttggtgctgtgtatagtattgtatgtcggtacacggagaggtatcctttttttgtcccccgcccccttctcaatgtttctagctagctttgggggtcattttgtcatcagagcattctgtgcccagggacaggacagatctcgaggacaccacagtccacctgttcccgtcaacagacgttaggtctcattttcctcctcatgcagtgttgtagtgtgggttgtcaacttttctttaactggctacgccacagctggacacacatgcagcccctggagggcagcctcttcctgtgcctcgatggggtgggtgggagggcatcttctgtgcgttgggtcagtttctgttacgtaacgaaaaggataaacatctcccacgggagaggccacagatggccacttccagagcttgcccattgcctgtctctcgccaattccgtttatccaaaaaggtacatgtttttgtattaaaaagtaaacagggatcagtgactgtattccaaataaatatgaatccctaagggccgtggacaaattgcctaacccagggccagcggtattgctgaaggaaaggggcagctctctgggaagtgggccctcagagattactctggctttgacccttgtttagctgatggtcatttctgggattggaatatttaataagcccaattctaagttgataggtaattttaaatattcaaaccaaatcttcccaacagttggcaagttgtttattttatattatttcttccaggacctacttgctcagatctccaagcaagcatttcttttcttttagggatgtctgaaagtcacatccagttacattactgtgttctttctaatgaaaagtaaaggttttatatagagaaacttgagtaatttttacatttctaagacattaaatcccatttaaattctgtgtgaacattaaagacagcacacttgcaaaagtatggtcaaaggaaaaaaatcccacatttcaattaacaagtagcatggacatttgatcaacctttagttggaataataatattcatatttgctatgaatccttttaaaaaaatctttggataaatgctgacagatttccaagaactaccaagaaaatacaagagatatccaatgcttgatatatgaggcctagtaataacgatatttctctttaattgatgttttgttttaaaagttaaaagtaattcttggcgtggtggttcacgcctgtaatcccagcactttgggaggccgaagcgggcggatcacctgaggtcgggagttcgagaccagcctgaccaacatggagaaaccccgtccctactaaaaatacaaaattagccaggtatggtggtgcatacctgtaatcccagctactcgggaacctgaggcaggagaatggcttgaacccaggagacagaggttgtggtggggcaagatcgcaccattgcacccgagcctaggcaacaagagtgaaattccgtctcaaaaaaataaataaataaataaataaataagttaaaattaattctttatccagagtcgggtgctttagaatttataagtcacttatgtgttttgcttgaattaattctgacagcccctatgaggaaatctggaggcaggtaacagttcccattttagagatgaagaactgaggcacagattaaaggacttgcctgtgttgaataccagtcctgttctaggacattctcccctctcctaggagacggatgtcacgcacaaatggggagagaagtgtttattttgtaggcactaagggtttctaaaacccttaacactggtaagggctcaaaaataaacgtatgtgttcatattcgatcaccgaaatgagagttcttaattgctaattgacaaacgcgttagcaatttcagttagggagtcatctcccttgattgtgttcttttcctgtcaattttcatagacctaatttgcaaactcaatcggggactaaaatttcccactgaaaatgttaaacattttagataactgtgaagatagtttatttttattccttgccaatctgggaatatgccttttttgtgtgtttgtgtgtttttttaagtgctgtattaataatactttctgaaagaaaaggacacttaccccaaaacttcaatctgaaatgtcttacattaagaatatcttgaatgttgtgtatatattttaaaaagcactttgcaaaatagtttgtacatttatttcctaatttatacatgatttttggtgttaatatatttaatgattaataacagaatgtttatttaatgtgctgtccatttttatgtaatattatggggaaagtgatgccagcagttccttttcattattctatcttctgtcatatgaatgttgagcaaagcttaggccaacatgaattgtttgtgaagtgtggttgatggtgctttgtttttttctgactacttctatggaaggccagtgaagaagcaaaggaagacatgaaaattgacgctcattcttcttcctattgttccctgacatccagcaaattgtgaatttgaaaaatgatggccagttttcagaagtgctgacaaattcatattggtatgcaaaagctcatcacccattaaggtttgttgttgaatcaacagtactcagcatattaaaacagtacatcagaactcatgccaacagtctttatgatgggattaaggtggacaagatctcctaagatctgtgaatgggattaaggtggacaagatctcctaagatctgaaaagaaaccttaatacgctcatatggttggagtgttaagtgaacctctgattttgtcagggtttttctacgtgtaggcgtgaatagggggcaccccttcaaaactgtacaaagaagacgactgttttccatttccatttaaacatttttagccacttcatttctatttattgaacaggtcaaatttgtcttgttatttgtgagtacagtacatttaaaaaacatccttatcggttatttttttttcagtcggagtttgacgtataaattgtttatgcttttggtgtaatctcttaataaactggttcttcaaaaatc

SEQ ID NO: 30714 - DNA, 3657 bp, Homo sapiens
  source 1..3657: mol_type = unassigned DNA
atgcagagtctaagcacagaggccagatacgtcccaagagtcccccagcacagagatcagataagtcccaggagtccccagcacggaggccagatatgtcccaggagtcccctgcacagaggccagatatgtcccaggagtcccccagcacggaggtaccagcagatcctgcaccggaacctggtatacctggccacgatcgcagactccaaccagaacatgcagtccctgcttcctgccccgcccacgcagaacatgaacctgggccctggagccctgactcagagcggctccagccagggcctgcactctcagggcagcctgagtgacgccatcagcacgggcctgccaccctcctccctcctgcagggccagattggcaacgggccgagccacgtgtccatgcagcagacggcgcctaacacgctgcccaccacctccatgagcatctctgggcccggctacagccacgcgggacccgcctcgcagggcgtccccatgcaggggcaaggcaccatcggcaactacgtgtctcggaccaacatcaacatgcagtccaacccagtctccatgatgcagcagcaggcggccacgtcgcactacagctcggcgcagggcggcagccagcactaccagggccagtcgtccatcgccatgatggggcagggcagccaggggagcagcatgatggggcagcggcccatggcgccctaccggccctcccagcaaggctcttcccagcagtacctgggccaggaggagtactatggcgagcagtacagccacagccagggcgccgcggagcccatgggccagcagtactaccccgacggccatggcgattacgcctaccagcagtcatcctacacggagcagagctacgaccggtccttcgaggagtccacgcagcactactatgaggggggaaactcccagtacagccagcagcaggccgggtaccagcagggtgccgcgcagcagcagacgtactcccagcagcagtaccccagccagcagagctaccccgggcagcagcagggctacgggtctgcccagggagccccgtcacagtaccccggctaccagcaaggccaaggccagcagtacggaagctaccgagcaccgcagacagcgccgtctgcccagcagcagcggccctacggctatgaacagggccagtatggaaattaccagcagtaagggacacacattctggctggagcccttgtggtagcgtgttcatccaggggccggatgggctggcggcagctctggtgaattgtgacatgttggttacctgttcgcccagtgccacgtctgcatgtgaagcgtgctcatttcatgctgggacctacttgctcagatctccaagcaagcatttcttttcttttagggatgtctgaaagtcacatccagttacattactgtgttctttctaatgaaaagtaaaggttttatatagagaaacttgagtaatttttacatttctaagacattaaatcccatttaaattctgtgtgaacattaaagacagcacacttgcaaaagtatggtcaaaggaaaaaaatcccacatttcaattaacaagtagcatggacatttgatcaacctttagttggaataataatattcatatttgctatgaatccttttaaaaaaatctttggataaatgctgacagatttccaagaactaccaagaaaatacaagagatatccaatgcttgatatatgaggcctagtaataacgatatttctctttaattgatgttttgttttaaaagttaaaagtaattcttggcgtggtggttcacgcctgtaatcccagcactttgggaggccgaagcgggcggatcacctgaggtcgggagttcgagaccagcctgaccaacatggagaaaccccgtccctactaaaaatacaaaattagccaggtatggtggtgcatacctgtaatcccagctactcgggaacctgaggcaggagaatggcttgaacccaggagacagaggttgtggtggggcaagatcgcaccattgcacccgagcctaggcaacaagagtgaaattccgtctcaaaaaaataaataaataaataaataaataagttaaaattaattctttatccagagtcgggtgctttagaatttataagtcacttatgtgttttgcttgaattaattctgacagcccctatgaggaaatctggaggcaggtaacagttcccattttagagatgaagaactgaggcacagattaaaggacttgcctgtgttgaataccagtcctgttctaggacattctcccctctcctaggagacggatgtcacgcacaaatggggagagaagtgtttattttgtaggcactaagggtttctaaaacccttaacactggtaagggctcaaaaataaacgtatgtgttcatattcgatcaccgaaatgagagttcttaattgctaattgacaaacgcgttagcaatttcagttagggagtcatctcccttgattgtgttcttttcctgtcaattttcatagacctaatttgcaaactcaatcggggactaaaatttcccactgaaaatgttaaacattttagataactgtgaagatagtttatttttattccttgccaatctgggaatatgccttttttgtgtgtttgtgtgtttttttaagtgctgtattaataatactttctgaaagaaaaggacacttaccccaaaacttcaatctgaaatgtcttacattaagaatatcttgaatgttgtgtatatattttaaaaagcactttgcaaaatagtttgtacatttatttcctaatttatacatgatttttggtgttaatatatttaatgattaataacagaatgtttatttaatgtgctgtccatttttatgtaatattatggggaaagtgatgccagcagttccttttcattattctatcttctgtcatatgaatgttgagcaaagcttaggccaacatgaattgtttgtgaagtgtggttgatggtgctttgtttttttctgactacttctatggaaggccagtgaagaagcaaaggaagacatgaaaattgacgctcattcttcttcctattgttccctgacatccagcaaattgtgaatttgaaaaatgatggccagttttcagaagtgctgacaaattcatattggtatgcaaaagctcatcacccattaaggtttgttgttgaatcaacagtactcagcatattaaaacagtacatcagaactcatgccaacagtctttatgatgggattaaggtggacaagatctcctaagatctgtgaatgggattaaggtggacaagatctcctaagatctgaaaagaaaccttaatacgctcatatggttggagtgttaagtgaacctctgattttgtcagggtttttctacgtgtaggcgtgaatagggggcaccccttcaaaactgtacaaagaagacgactgttttccatttccatttaaacatttttagccacttcatttctatttattgaacaggtcaaatttgtcttgttatttgtgagtacagtacatttaaaaaacatccttatcggttatttttttttcagtcggagtttgacgtataaattgtttatgcttttggtgtaatctcttaataaactggttcttc

SEQ ID NO: 30715 - DNA, 3703 bp, Homo sapiens
  source 1..3703: mol_type = unassigned DNA
agcgcagccggagtatccacctcgatgaccacgggctgagccccgcgccgccaccatgtccgtggccttcgcgtctgcccggccaagaggcaaaggggaggttacgcagcaaaccatccagaagatgctggacgagaaccaccacctgatccagtgcatcctggagtaccagagcaagggcaagacggccgagtgcacgcagtaccagcagatcctgcaccggaacctggtatacctggccacgatcgcagactccaaccagaacatgcagtccctgcttcctgccccgcccacgcagaacatgaacctgggccctggagccctgactcagagcggctccagccagggcctgcactctcagggcagcctgagtgacgccatcagcacgggcctgccaccctcctccctcctgcagggccagattggcaacgggccgagccacgtgtccatgcagcagacggcgcctaacacgctgcccaccacctccatgagcatctctgggcccggctacagccacgcgggacccgcctcgcagggcgtccccatgcaggggcaaggcaccatcggcaactacgtgtctcggaccaacatcaacatgcagtccaacccagtctccatgatgcagcagcaggcggccacgtcgcactacagctcggcgcagggcggcagccagcactaccagggccagtcgtccatcgccatgatggggcagggcagccaggggagcagcatgatggggcagcggcccatggcgccctaccggccctcccagcaaggctcttcccagcagtacctgggccaggaggagtactatggcgagcagtacagccacagccagggcgccgcggagcccatgggccagcagtactaccccgacggccatggcgattacgcctaccagcagtcatcctacacggagcagagctacgaccggtccttcgaggagtccacgcagcactactatgaggggggaaactcccagtacagccagcagcaggccgggtaccagcagggtgccgcgcagcagcagacgtactcccagcagcagtaccccagccagcagagctaccccgggcagcagcagggctacgggtctgcccagggagccccgtcacagtaccccggctaccagcaaggccaaggccagcagtacggaagctaccgagcaccgcagacagcgccgtctgcccagcagcagcggccctacggctatgaacagggccagtatggaaattaccagcagtaagggacacacattctggctggagcccttgtggtagcgtgttcatccaggggccggatgggctggcggcagctctggtgaattgtgacatgttggttacctgttcgcccagtgccacgtctgcatgtgaagcgtgctcatttcatgctgggacctacttgctcagatctccaagcaagcatttcttttcttttagggatgtctgaaagtcacatccagttacattactgtgttctttctaatgaaaagtaaaggttttatatagagaaacttgagtaatttttacatttctaagacattaaatcccatttaaattctgtgtgaacattaaagacagcacacttgcaaaagtatggtcaaaggaaaaaaatcccacatttcaattaacaagtagcatggacatttgatcaacctttagttggaataataatattcatatttgctatgaatccttttaaaaaaatctttggataaatgctgacagatttccaagaactaccaagaaaatacaagagatatccaatgcttgatatatgaggcctagtaataacgatatttctctttaattgatgttttgttttaaaagttaaaagtaattcttggcgtggtggttcacgcctgtaatcccagcactttgggaggccgaagcgggcggatcacctgaggtcgggagttcgagaccagcctgaccaacatggagaaaccccgtccctactaaaaatacaaaattagccaggtatggtggtgcatacctgtaatcccagctactcgggaacctgaggcaggagaatggcttgaacccaggagacagaggttgtggtggggcaagatcgcaccattgcacccgagcctaggcaacaagagtgaaattccgtctcaaaaaaataaataaataaataaataaataagttaaaattaattctttatccagagtcgggtgctttagaatttataagtcacttatgtgttttgcttgaattaattctgacagcccctatgaggaaatctggaggcaggtaacagttcccattttagagatgaagaactgaggcacagattaaaggacttgcctgtgttgaataccagtcctgttctaggacattctcccctctcctaggagacggatgtcacgcacaaatggggagagaagtgtttattttgtaggcactaagggtttctaaaacccttaacactggtaagggctcaaaaataaacgtatgtgttcatattcgatcaccgaaatgagagttcttaattgctaattgacaaacgcgttagcaatttcagttagggagtcatctcccttgattgtgttcttttcctgtcaattttcatagacctaatttgcaaactcaatcggggactaaaatttcccactgaaaatgttaaacattttagataactgtgaagatagtttatttttattccttgccaatctgggaatatgccttttttgtgtgtttgtgtgtttttttaagtgctgtattaataatactttctgaaagaaaaggacacttaccccaaaacttcaatctgaaatgtcttacattaagaatatcttgaatgttgtgtatatattttaaaaagcactttgcaaaatagtttgtacatttatttcctaatttatacatgatttttggtgttaatatatttaatgattaataacagaatgtttatttaatgtgctgtccatttttatgtaatattatggggaaagtgatgccagcagttccttttcattattctatcttctgtcatatgaatgttgagcaaagcttaggccaacatgaattgtttgtgaagtgtggttgatggtgctttgtttttttctgactacttctatggaaggccagtgaagaagcaaaggaagacatgaaaattgacgctcattcttcttcctattgttccctgacatccagcaaattgtgaatttgaaaaatgatggccagttttcagaagtgctgacaaattcatattggtatgcaaaagctcatcacccattaaggtttgttgttgaatcaacagtactcagcatattaaaacagtacatcagaactcatgccaacagtctttatgatgggattaaggtggacaagatctcctaagatctgtgaatgggattaaggtggacaagatctcctaagatctgaaaagaaaccttaatacgctcatatggttggagtgttaagtgaacctctgattttgtcagggtttttctacgtgtaggcgtgaatagggggcaccccttcaaaactgtacaaagaagacgactgttttccatttccatttaaacatttttagccacttcatttctatttattgaacaggtcaaatttgtcttgttatttgtgagtacagtacatttaaaaaacatccttatcggttatttttttttcagtcggagtttgacgtataaattgtttatgcttttggtgtaatctcttaataaactggttcttc

SEQ ID NO: 30716 - DNA, 781 bp, Homo sapiens
  source 1..781: mol_type = unassigned DNA
cacgggctgagccccgcgccgccaccatgtccgtggccttcgcgtctgcccggccaagaggcaaaggggaggttacgcagcaaaccatccagaagtttttgaagaatgccggccagtcatcgagtgcccttggtttgggtacaaggtgcgttttcctaacttgcgggtctgaaagtgcgtccattcccccttcacgcctggttgcggtttcggcggactagaatttctacgcagaagtctccctcaggatcagaccgtagcccttccggaaacctccatgatgctggacgagaaccaccacctgatccagtgcatcctggagtaccagagcaagggcaagacggccgagtgcacgcagtgagtgcccgccatacaccggaacacttggagggtgtcatgcagagtctaagcacagaggccagatacgtcccaagagtcccccagcacagagatcagataagtcccaggagtccccagcacggaggccagatatgtcccaggagtcccctgcacagaggccagatatgtcccaggagtcccccagcacggaggtaccagcagatcctgcaccggaacctggtatacctggccacgatcgcagactccaaccagaacatgcagtccctgcttcctgccccgcccacgcagaacatgaacctgggccctggagccctgactcagagcggctccagccagggcctgcactctcagggcagcctgagtgacgccatcagcacgggcctgccaccctcctccctcctgcagggccagattggcaacg

SEQ ID NO: 30717 - DNA, 815 bp, Homo sapiens
  source 1..815: mol_type = unassigned DNA
taggcgggagcatccaatcaacttcgagagcgtaggccccacctatcgtgggtcgagttgcttggcggtcgtggttccggaggttcctcgggatgtcggtggccttcgtaccggactggctgaggggcaaggcggaagtcaatcaagagactatccagcggctccttgaggagaatgaccagctgatccgctgtattgtggagtatcagaacaagggccgcgggaacgagtgcgtgcagtaccagcatgtgttacatagaaatctcatttatttggctaccattgcagatgccagtccaaccagcacttcaaaagcaatggaataatctttcaaaagcaatagaataatcttccatttggctgtcgtgaggagtaattgaatgtaatccatctcttacaaaatggagacagggtctttaccaactcaactggttaaaacatgaatgaaacctctgtggctctttcgaaacgtgaaaatgtgaagaaagctactaacttagctgtattctcatgtaaatattttttaaataattaagcaaatccctcaataagttgagcccaggtgtcctctttcctgaacttggagcatgtttggataacaaagacatcactgggatgttcaagtctactttttagtttcaacctgaagaggaaactcagtaggtgttgggcaggaattggtgagattcctgacttgataccttgctaaatggacatgtaactgtgtgctccttcctatcagtttgtaaatgtggtccccctgactgctgttttcagattgctttgaaataaagcttatttttctataaaatact

SEQ ID NO: 30718 - DNA, 1047 bp, Homo sapiens
  source 1..1047: mol_type = unassigned DNA
cctcacctcgcccggacggcggccttcggaagtcggcgcctgccagctacccgccgcctcctcagcaatcttagccgaccgggagggctcggcccaggtcaccggcagcccaggcgcaggcgggagcatccaatcaacttcgagagcgtaggccccacctatcgtgggtcgagttgcttggcggtcgtggttccggaggttcctcgggatgtcggtggccttcgtaccggactggctgaggggcaaggcggaagtcaatcaagagactatccagcggctccttgaggagaatgaccagctgatccgctgtattgtggagtatcagaacaagggccgcgggaacgagtgcgtgcagtaccagcatgtgttacatagaaatctcatttatttggctaccattgcagatgccagtccaaccagcacttcaaaagcaatggaataatctttcaaaagcaatagaataatcttccatttggctgtcgtgaggagtaattgaatgtaatccatctcttacaaaatggagacagggtctttaccaactcaactggttaaaacatgaatgaaacctctgtggctctttcgaaacgtgaaaatgtgaagaaagctactaacttagctgtattctcatgtaaatattttttaaataattaagcaaatccctcaataagttgagcccaggtgtcctctttcctgaacttggagcatgtttggataacaaagacatcactgggatgttcaagtctactttttagtttcaacctgaagaggaaactcagtaggtgttgggcaggaattggtgagattcctgacttgataccttgctaaatggacatgtaactgtgtgctccttcctatcagtttgtaaatgtggtccccctgactgctgttttcagattgctttgaaataaagcttatttttctataaaatactgatgtggaggtatagaagttttcatgtaataagtattccatttggttttcaagaataactgtgaggacttaaccataaagtatataaaaacaatactattatcattgccaacaaaa

SEQ ID NO: 30719 - DNA, 3341 bp, Homo sapiens
  source 1..3341: mol_type = unassigned DNA
gagaggccggcgtctctcccccagtttgccgttcacccggagcgctcgggacttgccgatagtggtgacggcggcaacatgtctgtggctttcgcggccccgaggcagcgaggcaagggggagatcactcccgctgcgattcagaagatgttggatgacaataaccatcttattcagtgtataatggactctcagaataaaggaaagacctcagagtgttctcagtatcagcagatgttgcacacaaacttggtataccttgctacaatagcagattctaatcaaaatatgcagtctcttttaccagcaccacccacacagaatatgcctatgggtcctggagggatgaatcagagcggccctcccccacctccacgctctcacaacatgccttcagatggaatggtaggtgggggtcctcctgcaccgcacatgcagaaccagatgaacggccagatgcctgggcctaaccatatgcctatgcagggacctggacccaatcaactcaatatgacaaacagttccatgaatatgccttcaagtagccatggatccatgggaggttacaaccattctgtgccatcatcacagagcatgccagtacagaatcagatgacaatgagtcagggacaaccaatgggaaactatggtcccagaccaaatatgagtatgcagccaaaccaaggtccaatgatgcatcagcagcctccttctcagcaatacaatatgccacagggaggcggacagcattaccaaggacagcagccacctatgggaatgatgggtcaagttaaccaaggcaatcatatgatgggtcagagacagattcctccctatagacctcctcaacagggcccaccacagcagtactcaggccaggaagactattacggggaccaatacagtcatggtggacaaggtcctccagaaggcatgaaccagcaatattaccctgatggaaattcacagtatggccaacagcaagatgcataccagggaccacctccacaacagggatatccaccccagcagcagcagtacccagggcagcaaggttacccaggacagcagcagggctacggtccttcacagggtggtccaggtcctcagtatcctaactacccacagggacaaggtcagcagtatggaggatatagaccaacacagcctggaccaccacagccaccccagcagaggccttatggatatgaccagggacagtatggaaattaccagcagtgaaaaagtacttacattccagtagccagtatctattagcagccatattgtcacctcagcactgtggacacctccctgtgaagagatccttccattccatctagtttttggaaaaaccttgtggataagtggctgtttcatcagtaagcagcctttgtggtttagttataaaaggctttagtagctcaaaaatactcttgatttcacatttctactctagatggcaacattggacagaaaatgcaatgacataaccaatttgtaatgattttggaactgtgtttcaaatggactgttacagactgaaaggtgtgaacagctttgtatgtttatgaagggtaagggaatttaatacttttccacagatttttttgtaaggggaagagggaaatgtacactttttacagcagcaatattttgtatattatgtttatttcatgtggtgaatatgcaaggcggtacactacgcactggacagcatcagaaatcctctgttaatgtggactggaacatggtagatgcttgattgttttggtctcaaaatggtgtgctataaagataaaggtgaggggaagacaaagcacaccatatgtccactgttctgttctcatagaggaaattcaaatcccttttatctattagataatcaagggcactgtgatacagttttgagtaaaaagacattttttaaaagccttccagttttgtggattaaacctttttataaagatcatttataatactgttttaaaatgtgaggcaataagaattactttgtgttggatctgaggaggctttggtaaaacagtttcatctaaatgaaagtggtaatcctcttctaaaatagcaataactgaaaatgaaagtgttaattttaccttgtttgagttatcagggaacttagtaagtaatatcaaagcattttataaatgatatcaaagaagagtcaacattgatccagtcattttattttgtaatattgagggataattggttattaaactgaatagttcaggagactttacaaacctttgtttcaactttcttatctggaaataatatcatttataaagggacacttttatgtttttcccttttttatgttggttgatataacacaaagagatatttaggaaaatgcttattgatgaggtttattctatctgtttttaaagcaccgaggttgcattctagataaccttgtttattagcatggcatattttaatcattatttgagactgtcctgtgcctgattattttagctaaattcagggagattgcgtggggcaggaaagcatgcattgaaaaatttctaaccacggttatttaagcataatctgaaaacatctagcccaaaggtaagttgctattttcatcacagttgcctatgcccagggaataagatgtattctttataattgaattggtttttcccacgtctaactggaaacaaaacagaaggggcgtcataaatttgaataagcagaacatactgttctcaacatactgtaatcaaaaggaggaatttcagtgggtctctgtgtgtgtatgagagagagagtgtgtgtttgtgtgtttcaaggtcagaacaggtttttttgtttttgttttttgttctttgtttttttttttgagatggagtcttgctcttgtcgcccaggctggagtgcagtggcgcaatctcagctcactgcaacctccgcctcccaggttcaagcagttctcctgcctcagcctcctgagtagctgggatgacaggcacccgccaccacacccagctaatttttgtacttttagtagagacgaggtttcgccatgttggccaggctggtctcgaactcctgacctcaggtgatccacccgcctcggccttccaaagtgctgggattacaggcgtgagccaccgtgcctggccagaataggttttttctttcaacttgatcagtagaaaatggacatcaagtttgaacagataaatcatggacagccttattgtgattgaaatgcttgtaggttctgtgccaattttccaccactgtgtactttgttgctatttaaaactgtatcaactctaacggaagaataaattatttgtgatttt

SEQ ID NO: 30720 - DNA, 3434 bp, Homo sapiens
  source 1..3434: mol_type = unassigned DNA
gagaggccggcgtctctcccccagtttgccgttcacccggagcgctcgggacttgccgatagtggtgacggcggcaacatgtctgtggctttcgcggccccgaggcagcgaggcaagggggagatcactcccgctgcgattcagaagatgttggatgacaataaccatcttattcagtgtataatggactctcagaataaaggaaagacctcagagtgttctcagtatcagcagatgttgcacacaaacttggtataccttgctacaatagcagattctaatcaaaatatgcagtctcttttaccagcaccacccacacagaatatgcctatgggtcctggagggatgaatcagagcggccctcccccacctccacgctctcacaacatgccttcagatggaatggtaggtgggggtcctcctgcaccgcacatgcagaaccagatgaacggccagatgcctgggcctaaccatatgcctatgcagggacctggacccaatcaactcaatatgacaaacagttccatgaatatgccttcaagtagccatggatccatgggaggttacaaccattctgtgccatcatcacagagcatgccagtacagaatcagatgacaatgagtcagggacaaccaatgggaaactatggtcccagaccaaatatgagtatgcagccaaaccaaggtccaatgatgcatcagcagcctccttctcagcaatacaatatgccacagggaggcggacagcattaccaaggacagcagccacctatgggaatgatgggtcaagttaaccaaggcaatcatatgatgggtcagagacagattcctccctatagacctcctcaacagggcccaccacagcagtactcaggccaggaagactattacggggaccaatacagtcatggtggacaaggtcctccagaaggcatgaaccagcaatattaccctgatggtcataatgattacggttatcagcaaccgtcgtatcctgaacaaggctacgataggccttatgaggattcctcacaacattactacgaaggaggaaattcacagtatggccaacagcaagatgcataccagggaccacctccacaacagggatatccaccccagcagcagcagtacccagggcagcaaggttacccaggacagcagcagggctacggtccttcacagggtggtccaggtcctcagtatcctaactacccacagggacaaggtcagcagtatggaggatatagaccaacacagcctggaccaccacagccaccccagcagaggccttatggatatgaccagggacagtatggaaattaccagcagtgaaaaagtacttacattccagtagccagtatctattagcagccatattgtcacctcagcactgtggacacctccctgtgaagagatccttccattccatctagtttttggaaaaaccttgtggataagtggctgtttcatcagtaagcagcctttgtggtttagttataaaaggctttagtagctcaaaaatactcttgatttcacatttctactctagatggcaacattggacagaaaatgcaatgacataaccaatttgtaatgattttggaactgtgtttcaaatggactgttacagactgaaaggtgtgaacagctttgtatgtttatgaagggtaagggaatttaatacttttccacagatttttttgtaaggggaagagggaaatgtacactttttacagcagcaatattttgtatattatgtttatttcatgtggtgaatatgcaaggcggtacactacgcactggacagcatcagaaatcctctgttaatgtggactggaacatggtagatgcttgattgttttggtctcaaaatggtgtgctataaagataaaggtgaggggaagacaaagcacaccatatgtccactgttctgttctcatagaggaaattcaaatcccttttatctattagataatcaagggcactgtgatacagttttgagtaaaaagacattttttaaaagccttccagttttgtggattaaacctttttataaagatcatttataatactgttttaaaatgtgaggcaataagaattactttgtgttggatctgaggaggctttggtaaaacagtttcatctaaatgaaagtggtaatcctcttctaaaatagcaataactgaaaatgaaagtgttaattttaccttgtttgagttatcagggaacttagtaagtaatatcaaagcattttataaatgatatcaaagaagagtcaacattgatccagtcattttattttgtaatattgagggataattggttattaaactgaatagttcaggagactttacaaacctttgtttcaactttcttatctggaaataatatcatttataaagggacacttttatgtttttcccttttttatgttggttgatataacacaaagagatatttaggaaaatgcttattgatgaggtttattctatctgtttttaaagcaccgaggttgcattctagataaccttgtttattagcatggcatattttaatcattatttgagactgtcctgtgcctgattattttagctaaattcagggagattgcgtggggcaggaaagcatgcattgaaaaatttctaaccacggttatttaagcataatctgaaaacatctagcccaaaggtaagttgctattttcatcacagttgcctatgcccagggaataagatgtattctttataattgaattggtttttcccacgtctaactggaaacaaaacagaaggggcgtcataaatttgaataagcagaacatactgttctcaacatactgtaatcaaaaggaggaatttcagtgggtctctgtgtgtgtatgagagagagagtgtgtgtttgtgtgtttcaaggtcagaacaggtttttttgtttttgttttttgttctttgtttttttttttgagatggagtcttgctcttgtcgcccaggctggagtgcagtggcgcaatctcagctcactgcaacctccgcctcccaggttcaagcagttctcctgcctcagcctcctgagtagctgggatgacaggcacccgccaccacacccagctaatttttgtacttttagtagagacgaggtttcgccatgttggccaggctggtctcgaactcctgacctcaggtgatccacccgcctcggccttccaaagtgctgggattacaggcgtgagccaccgtgcctggccagaataggttttttctttcaacttgatcagtagaaaatggacatcaagtttgaacagataaatcatggacagccttattgtgattgaaatgcttgtaggttctgtgccaattttccaccactgtgtactttgttgctatttaaaactgtatcaactctaacggaagaataaattatttgtgatttt

SEQ ID NO: 30721 - DNA, 3434 bp, Homo sapiens; identical to SEQ ID NO: 30720
  source 1..3434: mol_type = unassigned DNA

SEQ ID NO: 30722 - DNA, 1307 bp, Homo sapiens
  source 1..1307: mol_type = unassigned DNA
agtttgccgttcacccggagcgctcgggacttgccgatagtggtgacggcggcaacatgtctgtggctttcgcggccccgaggcagcgaggcaagggggagatcactcccgctgcgattcagaagatgttggatgacaataaccatcttattcagtgtataatggactctcagaataaaggaaagacctcagagtgttctcagtatcagcagatgttgcacacaaacttggtataccttgctacaatagcagattctaatcaaaatatgcagtctcttttaccagcaccacccacacagaatatgcctatgggtcctggagggatgaatcagagcggccctcccccacctccacgctctcacaacatgccttcagatggaatggtaggtgggggtcctcctgcaccgcacatgcagaaccagatgaacggccagatgcctgggcctaaccatatgcctatgcagggacctggacccaatcaactcaatatgacaaacagttccatgaatatgccttcaagtagccatggatccatgggaggttacaaccattctgtgccatcatcacagagcatgccagtacagaatcagatgacaatgagtcagggacaaccaatgggaaactatggtcccagaccaaatatgagtatgcagccaaaccaaggtccaatgatgcatcagcagcctccttctcagcaatacaatatgccacagggaggcggacagcattaccaaggacagcagccacctatgggaatgatgggtcaagttaaccaaggcaatcatatgatgggtcagagacagattcctccctatagacctcctcaacagggcccaccacagcagtactcaggccaggaagactattacggggaccaatacagtcatggtggacaaggtcctccagaaggcatgaaccagcaatattaccctgatggtcataatgattacggttatcagcaaccgtcgtatcctgaacaaggctacgataggccttatgaggattcctcacaacattactacgaaggaggaaattcacagtatggccaacagcaagatgcataccagggaccacctccacaacagggatatccaccccagcagcagcagtacccagggcagcaaggttacccaggacagcagcagggctacggtccttcacagggtggtccaggtcctcagtatcctaactacccacagggacaaggtcagcagtatggaggatatagaccaacacagcctggaccaccacagccaccccagcagaggccttatggatatgaccagaattctaggtggacagtttgt

SEQ ID NO: 30723 - DNA, 1548 bp, Homo sapiens
  source 1..1548: mol_type = unassigned DNA
gacttgccgatagtggtgacggcggcaacatgtctgtggctttcgcggccccgaggcagcgaggcaagggggagatcactcccgctgcgattcagaagatgttggatgacaataaccatcttattcagtgtataatggactctcagaataaaggaaagacctcagagtgttctcaccacccacacagaatatgcctatgggtcctggagggatgaatcagagcggccctcccccacctccacgctctcacaacatgccttcagatggaatggtaggtgggggtcctcctgcaccgcacatgcagaaccagatgaacggccagatgcctgggcctaaccatatgcctatgcagggacctggacccaatcaactcaatatgacaaacagttccatgaatatgccttcaagtagccatggatccatgggaggttacaaccattctgtgccatcatcacagagcatgccagtacagaatcagatgacaatgagtcagggacaaccaatgggaaactatggtcccagaccaaatatgagtatgcagccaaaccaaggtccaatgatgcatcagcagcctccttctcagcaatacaatatgccacagggaggcggacagcattaccaaggacagcagccacctatgggaatgatgggtcaagttaaccaaggcaatcatatgatgggtcagagacagattcctccctatagacctcctcaacagggcccaccacagcagtactcaggccaggaagactattacggggaccaatacagtcatggtggacaaggtcctccagaaggcatgaaccagcaatattaccctgatggtcataatgattacggttatcagcaaccgtcgtatcctgaacaaggctacgataggccttatgaggattcctcacaacattactacgaaggaggaaattcacagtatggccaacagcaagatgcataccagggaccacctccacaacagggatatccaccccagcagcagcagtacccagggcagcaaggttacccaggacagcagcagggctacggtccttcacagggtggtccaggtcctcagtatcctaactacccacagggacaaggtcagcagtatggaggatatagaccaacacagcctggaccaccacagccaccccagcagaggccttatggatatgaccagggacagtatggaaattaccagcagtgaaaaagtacttacattccagtagccagtatctattagcagccatattgtcacctcagcactgtggacacctccctgtgaagagatccttccattccatctagtttttggaaaaaccttgtggataagtggctgtttcatcagtaagcagcctttgtggtttagttataaaaggctttagtagctcaaaaatactcttgatttcacatttctactctagatggcaacattggacagaaaatgcaatgacataaccaatttgtaatgattttggaactgtgtttcaaatggactgttacagactgaaaggtgtgaacagctttgtatgtttatgaagggtaagggaattt

SEQ ID NO: 30724 - DNA, 2304 bp, Homo sapiens
  source 1..2304: mol_type = unassigned DNA
atctcggcagatgctccacggatttgcacgaactcccgagtcttgacctccctcccctctccgggctgccgggacaactcggggcggccactcttgccaggaggcatgttggatgacaataaccatcttattcagtgtataatggactctcagaataaaggaaagacctcagagtgttctcagtatcagcagatgttgcacacaaacttggtataccttgctacaatagcagattctaatcaaaatatgcagtctcttttaccagcaccacccacacagaatatgcctatgggtcctggagggatgaatcagagcggccctcccccacctccacgctctcacaacatgccttcagatggaatggtaggtgggggtcctcctgcaccgcacatgcagaaccagatgaacggccagatgcctgggcctaaccatatgcctatgcagggacctggacccaatcaactcaatatgacaaacagttccatgaatatgccttcaagtagccatggatccatgggaggttacaaccattctgtgccatcatcacagagcatgccagtacagaatcagatgacaatgagtcagggacaaccaatgggaaactatggtcccagaccaaatatgagtatgcagccaaaccaaggtccaatgatgcatcagcagcctccttctcagcaatacaatatgccacagggaggcggacagcattaccaaggacagcagccacctatgggaatgatgggtcaagttaaccaaggcaatcatatgatgggtcagagacagattcctccctatagacctcctcaacagggcccaccacagcagtactcaggccaggaagactattacggggaccaatacagtcatggtggacaaggtcctccagaaggcatgaaccagcaatattaccctgatggtcataatgattacggttatcagcaaccgtcgtatcctgaacaaggctacgataggccttatgaggattcctcacaacattactacgaaggaggaaattcacagtatggccaacagcaagatgcataccagggaccacctccacaacagggatatccaccccagcagcagcagtacccagggcagcaaggttacccaggacagcagcagggctacggtccttcacagggtggtccaggtcctcagtatcctaactacccacagggacaaggtcagcagtatggaggatatagaccaacacagcctggaccaccacagccaccccagcagaggccttatggatatgaccagggacagtatggaaattaccagcagtgaaaaagtacttacattccagtagccagtatctattagcagccatattgtcacctcagcactgtggacacctccctgtgaagagatccttccattccatctagtttttggaaaaaccttgtggataagtggctgtttcatcagtaagcagcctttgtggtttagttataaaaggctttagtagctcaaaaatactcttgatttcacatttctactctagatggcaacattggacagaaaatgcaatgacataaccaatttgtaatgattttggaactgtgtttcaaatggactgttacagactgaaaggtgtgaacagctttgtatgtttatgaagggtaagggaatttaatacttttccacagatttttttgtaaggggaagagggaaatgtacactttttacagcagcaatattttgtatattatgtttatttcatgtggtgaatatgcaaggcggtacactacgcactggacagcatcagaaatcctctgttaatgtggactggaacatggtagatgcttgattgttttggtctcaaaatggtgtgctataaagataaaggtgaggggaagacaaagcacaccatatgtccactgttctgttctcatagaggaaattcaaatcccttttatctattagataatcaagggcactgtgatacagttttgagtaaaaagacattttttaaaagccttccagttttgtggattaaacctttttataaagatcatttataatactgttttaaaatgtgaggcaataagaattactttgtgttggatctgaggaggctttggtaaaacagtttcatctaaatgaaagtggtaatcctcttctaaaatagcaataactgaaaatgaaagtgttaattttaccttgtttgagttatcagggaacttagtaagtaatatcaaagcattttataaatgatatcaaagaagagtcaacattgatccagtcattttattttgtaatattgagggataattggttattaaactgaatagttca

SEQ ID NO: 30725 - DNA, 1827 bp, Homo sapiens
  source 1..1827: mol_type = unassigned DNA
acttgccgatagtggtgacggcggcaacatgtctgtggctttcgcggccccgaggcagcgaggcaagggggagatcactcccgctgcgattcagaagatgttggatgacaataaccatcttattcagtgtataatggactctcagaataaaggaaagacctcagagtgttctcaggtgagtccaaactattccagagttgcataaatttcaaacaacaaaaaaaattagtgtcgatcattcatcgtaatttaaaagagttgtttaaatctgtagtttggaagataacttttattctataaagtgcattcccgttgtctaataaatattcatagcttctaggtatcagcagatgttgcacacaaacttggtataccttgctacaatagcagattctaatcaaaatatgcagtctcttttaccagcaccacccacacagaatatgcctatgggtcctggagggatgaatcagagcggccctcccccacctccacgctctcacaacatgccttcagatggaatggtaggtgggggtcctcctgcaccgcacatgcagaaccagatgaacggccagatgcctgggcctaaccatatgcctatgcagggacctggacccaatcaactcaatatgacaaacagttccatgaatatgccttcaagtagccatggatccatgggaggttacaaccattctgtgccatcatcacagagcatgccagtacagaatcagatgacaatgagtcagggacaaccaatgggaaactatggtcccagaccaaatatgagtatgcagccaaaccaaggtccaatgatgcatcagcagcctccttctcagcaatacaatatgccacagggaggcggacagcattaccaaggacagcagccacctatgggaatgatgggtcaagttaaccaaggcaatcatatgatgggtcagagacagattcctccctatagacctcctcaacagggcccaccacagcagtactcaggccaggaagactattacggggaccaatacagtcatggtggacaaggtcctccagaaggcatgaaccagcaatattaccctgatggaaattcacagtatggccaacagcaagatgcataccagggaccacctccacaacagggatatccaccccagcagcagcagtacccagggcagcaaggttacccaggacagcagcagggctacggtccttcacagggtggtccaggtcctcagtatcctaactacccacagggacaaggtcagcagtatggaggatatagaccaacacagcctggaccaccacagccaccccagcagaggccttatggatatgaccagggacagtatggaaattaccagcagtgaaaaagtacttacattccagtagccagtatctattagcagccatattgtcacctcagcactgtggacacctccctgtgaagagatccttccattccatctagtttttggaaaaaccttgtggataagtggctgtttcatcagtaagcagcctttgtggtttagttataaaaggctttagtagctcaaaaatactcttgatttcacatttctactctagatggcaacattggacagaaaatgcaatgacataaccaatttgtaatgattttggaactgtgtttcaaatggactgttacagactgaaaggtgtgaacagctttgtatgtttatgaagggtaagggaatttaatacttttccacagatttttttgtaaggggaagagggaaatgtacactttttacagcagcaatattttgtatattatgtttatttcatgtggtgaatatgcaaggcggtacactacgcact

SEQ ID NO: 30726 - DNA, 1545 bp, Homo sapiens
  source 1..1545: mol_type = unassigned DNA
acttgccgatagtggtgacggcggcaacatgtctgtggctttcgcggccccgaggcagcgaggcaagggggagatcactcccgctgcgattcagaagatgttggatgacaataaccatcttattcagtgtataatggactctcagaataaaggaaagacctcagagtgttctcaggtcatgaataaaccacatctgttagtatggtttggtcagtggtcctcagaaaatctcatgtcgtgcaaccatactaatactcaagcaaaggaaaacttgaaggcctagactgaaacaggtatcagcagatgttgcacacaaacttggtataccttgctacaatagcagattctaatcaaaatatgcagtctcttttaccagcaccacccacacagaatatgcctatgggtcctggagggatgaatcagagcggccctcccccacctccacgctctcacaacatgccttcagatggaatggtaggtgggggtcctcctgcaccgcacatgcagaaccagatgaacggccagatgcctgggcctaaccatatgcctatgcagggacctggacccaatcaactcaatatgacaaacagttccatgaatatgccttcaagtagccatggatccatgggaggttacaaccattctgtgccatcatcacagagcatgccagtacagaatcagatgacaatgagtcagggacaaccaatgggaaactatggtcccagaccaaatatgagtatgcagccaaaccaaggtccaatgatgcatcagcagcctccttctcagcaatacaatatgccacagggaggcggacagcattaccaaggacagcagccacctatgggaatgatgggtcaagttaaccaaggcaatcatatgatgggtcagagacagattcctccctatagacctcctcaacagggcccaccacagcagtactcaggccaggaagactattacggggaccaatacagtcatggtggacaaggtcctccagaaggcatgaaccagcaatattaccctgatggaaattcacagtatggccaacagcaagatgcataccagggaccacctccacaacagggatatccaccccagcagcagcagtacccagggcagcaaggttacccaggacagcagcagggctacggtccttcacagggtggtccaggtcctcagtatcctaactacccacagggacaaggtcagcagtatggaggatatagaccaacacagcctggaccaccacagccaccccagcagaggccttatggatatgaccagggacagtatggaaattaccagcagtgaaaaagtacttacattccagtagccagtatctattagcagccatattgtcacctcagcactgtggacacctccctgtgaagagatccttccattccatctagtttttggaaaaaccttgtggataagtggctgtttcatcagtaagcagcctttgtggtttagttataaaaggctttagtagctcaaaaatactcttgatttcacatttctactctagatggcaacattggacag

SEQ ID NO: 30727 - DNA, 1298 bp, Homo sapiens
  source 1..1298: mol_type = unassigned DNA
tcctggagcaatgacattgcagaatattttctcctcctccagccacactttgtcaccaactgctgccaactcgccaccactgctgccgacctcgcaaccactgctttgtctctgaagtgagactgctcctggtgccatgaacggagacgacacctttgcaaagagacccagggatgatgctaaagcatcagagaagagaagcaaggcctttgatgatattgccacatacttctctaagaaagagtggaaaaagatgaaatactcggagaaaatcagctatgtgtatatgaagagaaactataaggccatgactaaactaggtttcaaagtcaccctcccacctttcatgtgtaataaacaggccacagacttccaggggaatgattttgataatgaccataaccgcaggattcaggttgaacatcctcagatgactttcggcaggctccacagaatcatcccgaagatcatgcccaagaagccagcagaggacgaaaatgattcgaagggagtgtcagaagcatctggcccacaaaacgatgggaaacaactgcaccccccaggaaaagcaaatatttctgagaagattaataagagatctggacccaaaagggggaaacatgcctggacccacagactgcgtgagagaaagcagctggtgatttatgaagagatcagtgaccctgaggaagatgacgagtaactcccctgggggatacgacacatgcccttgatgagaagcagaacgtggtgacctttcacgaacatgggcatggctgcggctccctcgtcatcaggtgcatagcaagtgaaagcaagtgttcacaacggtgaaacttgagcgtcatttttcttagtgtgccaagagttcgatgttagtgtttccattgtattttcttacagtgtgccattctgttagatactatccttataattgatgagcaagacatactgaatgcatatttcggtttgtgtatccatgcacctacgtcagaaaacaagtattgtcaggtattctctccatagaacagcactatcctcatctctccccagatgtgactactgagggcagttctgagtgtttaatttcagactttttcctctgcatttacacacacacacacacacacacgcacacacacacaccaagtaccagtataagcatctcccatctgcttttcccattgccatgcgtcctggtcaagcccccctcactctgtttcctgttcagcatgtactcccctcatccgattcccctgtatcagtcactgacagttaataaacctttgcaaacgttc

SEQ ID NO: 30728 - DNA, 1410 bp, Homo sapiens
  source 1..1410: mol_type = unassigned DNA
ctcagagtacgcacggtctgattttctctttggattcttccaaaatcagagtcagactgctcccggtgccatgaacggagacgacgcctttgcaaggagacccacggttggtgctcaaataccagagaagatccaaaaggccttcgatgatattgccaaatacttctctaaggaagagtgggaaaagatgaaagcctcggagaaaatcttctatgtgtatatgaagagaaagtatgaggctatgactaaactaggtttcaaggccaccctcccacctttcatgtgtaataaacgggccgaagacttccaggggaatgatttggataatgaccctaaccgtgggaatcaggttgaacgtcctcagatgactttcggcaggctccagggaatctccccgaagatcatgcccaagaagccagcagaggaaggaaatgattcggaggaagtgccagaagcatctggcccacaaaatgatgggaaagagctgtgccccccgggaaaaccaactacctctgagaagattcacgagagatctggaaatagggaggcccaagaaaaggaagagagacgcggaacagctcatcggtggagcagtcagaacacacacaacattggtcgattcagtttgtcaacttctatgggtgcagttcatggtacccccaaaacaattacacacaacagggacccaaaaggggggaacatgcctggacccacagactgcgtgagagaaaacagctggtgatttatgaagagatcagcgaccctgaggaagatgacgagtaactcccctcagggatacgacacatgcccatgatgagaagcagaacgtggtgacctttcacgaacatgggcatggctgcggacccctcgtcatcaggtgcatagcaagtgaaagcaagtgttcacaacagtgaaaagttgagcgtcatttttcttagtgtgccaagagttcgatgttagcgtttacgttgtattttcttacactgtgtcattctgttagatactaacattttcattgatgagcaagacatacttaatgcatattttggtttgtgtatccatgcacctaccttagaaaacaagtattgtcggttacctctgcatggaacagcattaccctcctctctccccagatgtgactactgagggcagttctgagtgtttaatttcagattttttcctctgcatttacacacacacgcacacaaaccacaccacacacacacacacacacacacacacacacacacacacacaccaagtaccagtataagcatctgccatctgcttttcccattgccatgcgtcctggtcaagctcccctcactctgtttcctggtcagcatgtactcccctcatccgattcccctgtagcagtcactgacagttaataaacctttgcaaacgttc

SEQ ID NO: 30729 - DNA, 1292 bp, Homo sapiens
  source 1..1292: mol_type = unassigned DNA
actttctctctctttcgattcttccatactcagagtacgcacggtctgattttctctttggattcttccaaaatcagagtcagactgctcccggtgccatgaacggagacgacgcctttgcaaggagacccacggttggtgctcaaataccagagaagatccaaaaggccttcgatgatattgccaaatacttctctaaggaagagtgggaaaagatgaaagcctcggagaaaatcttctatgtgtatatgaagagaaagtatgaggctatgactaaactaggtttcaaggccaccctcccacctttcatgtgtaataaacgggccgaagacttccaggggaatgatttggataatgaccctaaccgtgggaatcaggttgaacgtcctcagatgactttcggcaggctccagggaatctccccgaagatcatgcccaagaagccagcagaggaaggaaatgattcggaggaagtgccagaagcatctggcccacaaaatgatgggaaagagctgtgccccccgggaaaaccaactacctctgagaagattcacgagagatctggacccaaaaggggggaacatgcctggacccacagactgcgtgagagaaaacagctggtgatttatgaagagatcagcgaccctgaggaagatgacgagtaactcccctcagggatacgacacatgcccatgatgagaagcagaacgtggtgacctttcacgaacatgggcatggctgcggacccctcgtcatcaggtgcatagcaagtgaaagcaagtgttcacaacagtgaaaagttgagcgtcatttttcttagtgtgccaagagttcgatgttagcgtttacgttgtattttcttacactgtgtcattctgttagatactaacattttcattgatgagcaagacatacttaatgcatattttggtttgtgtatccatgcacctaccttagaaaacaagtattgtcggttacctctgcatggaacagcattaccctcctctctccccagatgtgactactgagggcagttctgagtgtttaatttcagattttttcctctgcatttacacacacacgcacacaaaccacaccacacacacacacacacacacacacacacacacacacacacaccaagtaccagtataagcatctgccatctgcttttcccattgccatgcgtcctggtcaagctcccctcactctgtttcctggtcagcatgtactcccctcatccgattcccctgtagcagtcactgacagttaataaacctttgcaaacgttc

SEQ ID NO: 30730 - DNA, 1232 bp, Homo sapiens
  source 1..1232: mol_type = unassigned DNA
ctgattttctctttggattcttccaaaatcagagtcagactactccctgtgccatgaacggagatgacacctttgcaaggagacccacggttggtgctcaaataccagagaagatacaaaaggccttcgatgatattgccaaatacttctctaaggaagagtgggaaaagatgaaagtctcggagaaaatcgtctatgtgtatatgaagagaaagtatgaggccatgactaaactaggtttcaaggccatcctcccatctttcatgcgtaataaacgggtcacagacttccaggggaatgattttgataatgaccctaaccgtgggaatcaggttcaacgtcctcagatgactttcggcaggctccagggaatcttcccgaagatcatgcccaagaagccagcagaggaaggaaatgtttcgaaggaagtgccagaagcatctggcccacaaaacgatgggaaacagctgtgccccccgggaaaaccaactacctctgagaagattaacatgatatctggacccaaaaggggggaacatgcctggacccacagactgcgtgagagaaagcagctggtgatttatgaagagatcagcgatcctgaggaagatgatgagtaactccccttggggatatgacacatgcccatgatgagaagcagaacgtggtgacctttcacgaacatgggcatggctgtggacccctcgtcatcaggtgcatagcaagtgaaagcaagtgttcacaacagtgaaaagttgagcgtcatttttcttagtgtgccaagagtacgatattagcgtttccattgtattttcttgaagtgtgtcattctgttagatattaacattttcactgatgagcaagacatacttaatgcatattttggtttgtgtatccatgcacctaccttagaaaacaagtattgtcagttacctctgcatggaacagcattaccctcctctctccctagatgtgactactgagggcagttctgagtgtttaatttcagattttttcctctgcatttacacacacacacaaaccacaccacacacacacacacacacacacagacacacaccaagtaccagtataagcatctcccatctgcttttcccattgccatgcgtcctggtcaggcttccctcactctgtttcctggtcagcatgtactcccctcatccgattcccctgtagcagtcactgacagtaaataaacctttgcaaacgtt

SEQ ID NO: 30731 - DNA, 800 bp, Homo sapiens
  source 1..800: mol_type = unassigned DNA
ctctctctttcgattcttccatactcaagagtacgcacggtctgattttctctttggattcttccaaaatcagagtcagactactccctgtgccatgaacggagatgacacctttgcaaggagacccacggttggtgctcaaataccagagaagatacaaaaggccttcgatgatattgccaaatacttctctaaggaagagtgggaaaagatgaaagtctcggagaaaatcgtctatgtgtatatgaagagaaagtatgaggccatgactaaactaggtttcaaggccatcctcccatctttcatgcgtaataaacgggtcacagacttccaggggaatgattttgataatgaccctaaccgtgggaatcaggttcaacgtcctcagatgactttcggcaggctccagggaatcttcccgaagatcatgcccaagaagccagcagaggaaggaaatgtttcgaaggaagtgccagaagcatctggcccacaaaacgatgggaaacagctgtgccccccgggaaaaccaactacctctgagaagattaacatgatatctggtgtccttcagagatactgcaggttcggttccagaccactgcaataaagaaatagggaggcccaagaaaaggaagagagacgcggaacagctcatcggtggagcagtcagaagacacaaaacattaatcgattaagtttgtcatattctatgggtgcagttcctggtacccccaaaacaattacacacaacagggtgattatagtcaataataacttaattgtacttaaaaaaactaaaa

SEQ ID NO: 30732 - DNA, 799 bp, Homo sapiens
  source 1..799: mol_type = unassigned DNA
ataagcctctgctgcagaataccctgatgcgacagaagtctctctagagtttggaaacctttaccaacaatgaaaaattctgatgtattctctttcagttcaacgtcctcagatgactttcggcaggctccagggaatcttcccgaagatcatgcccaagaagccagcagaggaaggaaatgtttcgaaggaagtgccagaagcatctggcccacaaaacgatgggaaacagctgtgccccccgggaaaaccaactacctctgagaagattaacatgatatctggacccaaaaggggggaacatgcctggacccacagactgcgtgagagaaagcagctggtgatttatgaagagatcagcgatcctgaggaagatgatgagtaactccccttggggatatgacacatgcccatgatgagaagcagaacgtggtgacctttcacgaacatgggcatggctgtggacccctcgtcatcaggtgcatagcaagtgaaagcaagtgttcacaacagtgaaaagttgagcgtcatttttcttagtgtgccaagagtacgatattagcgtttccattgtattttcttgaagtgtgtcattctgttagatattaacattttcactgatgagcaagacatacttaatgcatattttggtttgtgtatccatgcacctaccttagaaaacaagtattgtcagttacctctgcatggaacagcattaccctcctctctccctagatgtgactactgagggcagttctgagtgtttaatttcagattttttcctctgcatttacacaca

SEQ ID NO: 30733 - DNA, 615 bp, Homo sapiens
  source 1..615: mol_type = unassigned DNA
ggattggctactttaaattcagagtacgcacacgccgatttgcccttttgattcttccacaatcagggtgagactgctcccagtgccatgaacggagacgacgcctttgcaaggagacccagggatgatgctcaaatatcagagaagttacgaaaggccttcgatgatattgccaaatacttctctaagaaagagtgggaaaagatgaaatcctcggagaaaatcgtctatgtgtatatgaagctaaactatgaggtcatgactaaactaggtttcaaggtcaccctcccacctttcatgcgtagtaaacgggctgcagacttccacgggaatgattttggtaacgatcgaaaccacaggaatcaggttgaacgtcctcagatgactttcggcagcctccagagaatcttcccgaaggacccaaaagggggaaacatgcctggacccacagactgcgtgagagaaagcagctggtggtttatgaagagatcagcgaccctgaggaagatgacgagtaactcccctcggggatatgacacatgcccatgatgagaagcagaacgtggtgacctttcacgaacatgggcatggctgcggacccctcgtcatcaggtg

SEQ ID NO: 30734 - DNA, 1322 bp, Homo sapiens
  source 1..1322: mol_type = unassigned DNA
ccaggctctagggacagaaccttcccaaggcgggggggaggggagactctgattttcccgccgaaagcgtccccttggattggctactttaaattcagagtacgcacacgccgatttgcccttttgattcttccacaatcagggtgagactgctcccagtgccatgaacggagacgacgcctttgcaaggagacccagggatgatgctcaaatatcagagaagttacgaaaggccttcgatgatattgccaaatacttctctaagaaagagtgggaaaagatgaaatcctcggagaaaatcgtctatgtgtatatgaagctaaactatgaggtcatgactaaactaggtttcaaggtcaccctcccacctttcatgcgtagtaaacgggctgcagacttccacgggaatgattttggtaacgatcgaaaccacaggaatcaggttgaacgtcctcagatgactttcggcagcctccagagaatcttcccgaagatcatgcccaagaagccagcagaggaagaaaatggtttgaaggaagtgccagaggcatctggcccacaaaatgatgggaaacagctgtgccccccgggaaatccaagtaccttggagaagattaacaagacatctggacccaaaagggggaaacatgcctggacccacagactgcgtgagagaaagcagctggtggtttatgaagagatcagcgaccctgaggaagatgacgagtaactcccctcggggatatgacacatgcccatgatgagaagcagaacgtggtgacctttcacgaacatgggcatggctgcggacccctcgtcatcaggtgcatagcaagtgaaagcaagtgttcacaacagtgaaaagttgagcgtcatttttcttagtgtgccaagagttcgatgttggcgtttccgctgtattttcttgcagtgtgccattctgttagacattagcgttttcgttgatgagcaagacatgcttaatgcatatttcggcttgtgtatccatgcacctacctcagaaaacaagtattgtcaggtattctctccatagaacagcactaccctcctctctccccagatgtgactactgaggggaggtctgagtgtttaatttccgattttttcctctgcatttacacacacaccacacacgcacacacacacaccaagtaccagtataagcatctcccatctgcttttctccattgccatgcgacctggtcaagcccccctcactctgtttcctgttcagcatgtactcccctcatccgattccgttgtatcagtcactgacagttaataaacctttgcaaacgttc

SEQ ID NO: 30735 - DNA, 2870 bp, Homo sapiens
  source 1..2870: mol_type = unassigned DNA
aatcggcggcagtggcggcggcggcgcgttggagcctcaccaagagccgccgcccgcagcccgcgccggctcagcgcagtctcctcgctccgtgctcgcaggtgcctcctcctggacggcggcagcggcggcgcgaggagccggcgggcagcggcgcgatggggcccctccgcgagagcaagaaggagcacagagtgcagcatcatgacaaggagatttctcgaagccgaattccccggttgattcttcggccccatatgccccaacaacagcacaaagtgtccccagcctctgagtctcctttctctgaggaagagagcagagagttcaaccccagcagctctgggcgctcagcgaggaccgttagcagcaacagcttctgctcagatgacacaggctgtcctagcagccagtcagtgtctcctgtgaagacaccctcagatgctggaaacagccccattggcttttgccctggaagtgatgaaggcttcaccagaaagaaatgcacgattggaatggttggtgaaggaagcattcagtcctctcgatataagaaggaatcaaagtcaggccttgtgaaaccaggtagtgaagctgattttagctcctcgagcagcacaggcagcatttccgctcctgaggtccatatgtcgactgcgggaagcaagcggtcttcttcttcacgcaatcgaggtcctcatgggcggagtaatggagcttcgtcacacaagcctggcagcagcccatcatccccgcgggaaaaggaccttctgtccatgctgtgcaggaatcagctgagccctgtcaatatccatcccagttatgcaccttcttccccaagcagtagcaactcaggctcctacaaaggaagcgactgtagccccatcatgaggcgttctggaaggtacatgtcttgcggtgaaaatcatggtgtcagacccccaaacccagagcagtatttgactccactgcagcagaaagaggtgacagtgagacacctcaaaaccaagctgaaggaatctgagcgccgactccatgaaagggaaagtgaaatcgtggagcttaagtcccagctggcccgcatgcgagaggactggattgaggaggagtgtcaccgggtagaggcccagttggcactcaaagaagccaggaaagagattaaacagctcaaacaggtcatcgaaaccatgcggagcagcttggctgataaagataaaggcattcagaaatattttgtggacataaacatccaaaacaagaagctggagtctctccttcagagcatggagatggcacacagtggctctctgagggacgaactgtgcctagactttccatgtgattccccagagaagagcttaaccctcaacccccctcttgacacaatggcagatgggttatctctggaagagcaggtcacgggggaaggggctgacagggagctactggtaggagatagcatagccaacagcacagatttgttcgatgagatagtgacagccaccaccacagaatctggtgacctggagcttgtgcattccacccctggggctaacgtcctggagctgctgcccatagtcatgggtcaggaggagggcagtgtggtggtggagcgagccgttcagaccgacgtggtgccctacagcccagccatctcagagctcattcagagtgtgctgcagaagctccaggacccctgtccctcgagcttggcgtcccctgatgagtctgaaccagactcgatggagagcttcccagagtccctctctgccttagtggttgatttaactccaagaaatccaaactcagccatccttttgtctcccgtggagaccccctacgccaatgtggatgcagaagttcatgcaaaccgcctcatgagagagctggattttgcagcctgcgtggaagagaggttggatggtgtcatcccactggctcgcgggggcgtcgtgaggcagtactggagcagcagcttcctggtggatctcctggctgtggctgcccccgtggtccccacggttctgtgggcattcagtactcagagagggggaacggatcctgtgtataacatcggggccttgctcaggggctgttgcgtggttgccctgcattcgctccgccgcaccgccttccgtatcaaaacctaaatagaagttgttgttaccgtgtgccaatgtgtcccatgtgggttgtgccaggtagagaaacaggaagtcaatcatctgtgacagtctctattctgtcgttttgctccttggtatttgatttgcactatatttagttgaagcctgttcactgtttaaaaccggaggtatcttcaaaggcatggagacctggttccagtaaatgtcccaccagtggggtatagaaagcatgctcatgaccctgccgtgtcgtctgaggtacccgttcttatcctagtggttcaggaagagaaaacgcagtttgcactttcaagacagcttctctaaggctggcatgttatctccttgctttgctttttgccgttttaaaatgtgtaattgttccagcattccaatggtcttgtgcatagcaggggactgtaaccaaaaataaacatgtatttgtgtaattggtttgaagaagtcttgaatagctctttactgtcttacttggggttgataagatttgagtgtttgcaattttttactaaatgtagctccaaagtcttaaatggcttgtttgttcttaaactgttaattgatgaaactgtgcataagtttacaatgtactaacttattttgcttattatatatagtgttttattggaaattgtaaccacacacttcagcatgatgaaaataaagattagtgtttccatttaaataaatgttttatcctcccat

SEQ ID NO: 30736 - DNA, 3435 bp, Homo sapiens
  source 1..3435: mol_type = unassigned DNA
atttttaaaaccacgaaatggcagggtacttcatgctgcgtttttaaggagaaagaaaaatctcttcttatggatgtcctgtaaggaaaacaaaaattaaagatgatgtaaaaggtggagccatcttcccgagtatcggatttgtgtttgcttttctgttggcaacaagccttgtgtaccaggatattaacgaataattaagatcctgtccagaagaggagggattttaaagataattgtgtgtgagctatcaggaaataactgttccaggtatagggttcaactttgtgaggagacaagaaaacaagtcagactgtcacagctaatttagggaaagcaaaatggaagtctgaaggctatcaagtaagccagagtgtggtgttaataaagagcctttgggaggcagaagcttgaatgtgatagaagtcagggtgggaaggtgagtcaggaccagcatagggaagtaggatggccttccagctagtgagtggaggtgtgtatatgtgtgtgtgtgtgtgtgtgtgtgtgccacacagacatgtgctattcagtagattagaaaggttaactcattggaagagttttgaagctcatttcagcaactgagataagaaggactactctgtgaagactcaatactcagaaatgtgatttcttagaaattgatccttgaaggaaccgacaggagttaagagagggaaacgcgtttccttttgttttcttttttgatgtccaattttgagaaggagcacagagtgcagcatcatgacaaggagatttctcgaagccgaattccccggttgattcttcggccccatatgccccaacaacagcacaaagtgtccccagcctctgagtctcctttctctgaggaagagagcagagagttcaaccccagcagctctgggcgctcagcgaggaccgttagcagcaacagcttctgctcagatgacacaggctgtcctagcagccagtcagtgtctcctgtgaagacaccctcagatgctggaaacagccccattggcttttgccctggaagtgatgaaggcttcaccagaaagaaatgcacgattggaatggttggtgaaggaagcattcagtcctctcgatataagaaggaatcaaagtcaggccttgtgaaaccaggtagtgaagctgattttagctcctcgagcagcacaggcagcatttccgctcctgaggtccatatgtcgactgcgggaagcaagcggtcttcttcttcacgcaatcgaggtcctcatgggcggagtaatggagcttcgtcacacaagcctggcagcagcccatcatccccgcgggaaaaggaccttctgtccatgctgtgcaggaatcagctgagccctgtcaatatccatcccagttatgcaccttcttccccaagcagtagcaactcaggctcctacaaaggaagcgactgtagccccatcatgaggcgttctggaaggtacatgtcttgcggtgaaaatcatggtgtcagacccccaaacccagagcagtatttgactccactgcagcagaaagaggtgacagtgagacacctcaaaaccaagctgaaggaatctgagcgccgactccatgaaagggaaagtgaaatcgtggagcttaagtcccagctggcccgcatgcgagaggactggattgaggaggagtgtcaccgggtagaggcccagttggcactcaaagaagccaggaaagagattaaacagctcaaacaggtcatcgaaaccatgcggagcagcttggctgataaagataaaggcattcagaaatattttgtggacataaacatccaaaacaagaagctggagtctctccttcagagcatggagatggcacacagtggctctctgagggacgaactgtgcctagactttccatgtgattccccagagaagagcttaaccctcaacccccctcttgacacaatggcagatgggttatctctggaagagcaggtcacgggggaaggggctgacagggagctactggtaggagatagcatagccaacagcacagatttgttcgatgagatagtgacagccaccaccacagaatctggtgacctggagcttgtgcattccacccctggggctaacgtcctggagctgctgcccatagtcatgggtcaggaggagggcagtgtggtggtggagcgagccgttcagaccgacgtggtgccctacagcccagccatctcagagctcattcagagtgtgctgcagaagctccaggacccctgtccctcgagcttggcgtcccctgatgagtctgaaccagactcgatggagagcttcccagagtccctctctgccttagtggttgatttaactccaagaaatccaaactcagccatccttttgtctcccgtggagaccccctacgccaatgtggatgcagaagttcatgcaaaccgcctcatgagagagctggattttgcagcctgcgtggaagagaggttggatggtgtcatcccactggctcgcgggggcgtcgtgaggcagtactggagcagcagcttcctggtggatctcctggctgtggctgcccccgtggtccccacggttctgtgggcattcagtactcagagagggggaacggatcctgtgtataacatcggggccttgctcaggggctgttgcgtggttgccctgcattcgctccgccgcaccgccttccgtatcaaaacctaaatagaagttgttgttaccgtgtgccaatgtgtcccatgtgggttgtgccaggtagagaaacaggaagtcaatcatctgtgacagtctctattctgtcgttttgctccttggtatttgatttgcactatatttagttgaagcctgttcactgtttaaaaccggaggtatcttcaaaggcatggagacctggttccagtaaatgtcccaccagtggggtatagaaagcatgctcatgaccctgccgtgtcgtctgaggtacccgttcttatcctagtggttcaggaagagaaaacgcagtttgcactttcaagacagcttctctaaggctggcatgttatctccttgctttgctttttgccgttttaaaatgtgtaattgttccagcattccaatggtcttgtgcatagcaggggactgtaaccaaaaataaacatgtatttgtgtaattggtttgaagaagtcttgaatagctctttactgtcttacttggggttgataagatttgagtgtttgcaattttttactaaatgtagctccaaagtcttaaatggcttgtttgttcttaaactgttaattgatgaaactgtgcataagtttacaatgtactaacttattttgcttattatatatagtgttttattggaaattgtaaccacacacttcagcatgatgaaaataaagattagtgtttccatttaaataaatgttttatcctcccataaaa

SEQ ID NO: 30737 - DNA, 2776 bp, Homo sapiens
  source 1..2776: mol_type = unassigned DNA
cccatcaggatatttaagctggaagctttgtcaggctgcgtcagtgttccctgagtaagcaggaatgcaaactgcaattttagcattagcattctacttagaacaaagggaggtgcccggaagcagtacacattagtgcagagttttctggtttccctttaaagagaaggcacagccatttgactcttgagcttatttaaacaagtcaccagtccttgactccagaactgaagctttatatgttctttctatttggctgagccagtaatttttgattgcttcttcttcccaagagatgacacaggctgtcctagcagccagtcagtgtctcctgtgaagacaccctcagatgctggaaacagccccattggcttttgccctggaagtgatgaaggcttcaccagaaagaaatgcacgattggaatggttggtgaaggaagcattcagtcctctcgatataagaaggaatcaaagtcaggccttgtgaaaccaggtagtgaagctgattttagctcctcgagcagcacaggcagcatttccgctcctgaggtccatatgtcgactgcgggaagcaagcggtcttcttcttcacgcaatcgaggtcctcatgggcggagtaatggagcttcgtcacacaagcctggcagcagcccatcatccccgcgggaaaaggaccttctgtccatgctgtgcaggaatcagctgagccctgtcaatatccatcccagttatgcaccttcttccccaagcagtagcaactcaggctcctacaaaggaagcgactgtagccccatcatgaggcgttctggaaggtacatgtcttgcggtgaaaatcatggtgtcagacccccaaacccagagcagtatttgactccactgcagcagaaagaggtgacagtgagacacctcaaaaccaagctgaaggaatctgagcgccgactccatgaaagggaaagtgaaatcgtggagcttaagtcccagctggcccgcatgcgagaggactggattgaggaggagtgtcaccgggtagaggcccagttggcactcaaagaagccaggaaagagattaaacagctcaaacaggtcatcgaaaccatgcggagcagcttggctgataaagataaaggcattcagaaatattttgtggacataaacatccaaaacaagaagctggagtctctccttcagagcatggagatggcacacagtggctctctgagggacgaactgtgcctagactttccatgtgattccccagagaagagcttaaccctcaacccccctcttgacacaatggcagatgggttatctctggaagagcaggtcacgggggaaggggctgacagggagctactggtaggagatagcatagccaacagcacagatttgttcgatgagatagtgacagccaccaccacagaatctggtgacctggagcttgtgcattccacccctggggctaacgtcctggagctgctgcccatagtcatgggtcaggaggagggcagtgtggtggtggagcgagccgttcagaccgacgtggtgccctacagcccagccatctcagagctcattcagagtgtgctgcagaagctccaggacccctgtccctcgagcttggcgtcccctgatgagtctgaaccagactcgatggagagcttcccagagtccctctctgccttagtggttgatttaactccaagaaatccaaactcagccatccttttgtctcccgtggagaccccctacgccaatgtggatgcagaagttcatgcaaaccgcctcatgagagagctggattttgcagcctgcgtggaagagaggttggatggtgtcatcccactggctcgcgggggcgtcgtgaggcagtactggagcagcagcttcctggtggatctcctggctgtggctgcccccgtggtccccacggttctgtgggcattcagtactcagagagggggaacggatcctgtgtataacatcggggccttgctcaggggctgttgcgtggttgccctgcattcgctccgccgcaccgccttccgtatcaaaacctaaatagaagttgttgttaccgtgtgccaatgtgtcccatgtgggttgtgccaggtagagaaacaggaagtcaatcatctgtgacagtctctattctgtcgttttgctccttggtatttgatttgcactatatttagttgaagcctgttcactgtttaaaaccggaggtatcttcaaaggcatggagacctggttccagtaaatgtcccaccagtggggtatagaaagcatgctcatgaccctgccgtgtcgtctgaggtacccgttcttatcctagtggttcaggaagagaaaacgcagtttgcactttcaagacagcttctctaaggctggcatgttatctccttgctttgctttttgccgttttaaaatgtgtaattgttccagcattccaatggtcttgtgcatagcaggggactgtaaccaaaaataaacatgtatttgtgtaattggtttgaagaagtcttgaatagctctttactgtcttacttggggttgataagatttgagtgtttgcaattttttactaaatgtagctccaaagtcttaaatggcttgtttgttcttaaactgttaattgatgaaactgtgcataagtttacaatgtactaacttattttgcttattatatatagtgttttattggaaattgtaaccacacacttcagcatgatgaaaataaagattagtgtttccatttaaataaatgttttatcctccc

SEQ ID NO: 30738 - DNA, 2983 bp, Homo sapiens
  source 1..2983: mol_type = unassigned DNA
accacacacacaaaaaaatctcacgatgccccagaatgcagtttctttccttcgtgacgtgttgtgaagcacgtcagctgctccttgttgctgtgcagatcacccaacattaggtcaccgagagagacagcagctcttgctcacacagctgataggattaggagatggtgctttgtcagccctgattgagcccaagaaaaccccctgcatacacaggtgcctcctcctggacggcggcagcggcggcgcgaggagccggcgggcagcggcgcgatggggcccctccgcgagagcaagaaggagcacagagtgcagcatcatgacaaggagatttctcgaagccgaattccccggttgattcttcggccccatatgccccaacaacagcacaaagtgtccccagcctctgagtctcctttctctgaggaagagagcagagagttcaaccccagcagctctgggcgctcagcgaggaccgttagcagcaacagcttctgctcagatgacacaggctgtcctagcagccagtcagtgtctcctgtgaagacaccctcagatgctggaaacagccccattggcttttgccctggaagtgatgaaggcttcaccagaaagaaatgcacgattggaatggttggtgaaggaagcattcagtcctctcgatataagaaggaatcaaagtcaggccttgtgaaaccaggtagtgaagctgattttagctcctcgagcagcacaggcagcatttccgctcctgaggtccatatgtcgactgcgggaagcaagcggtcttcttcttcacgcaatcgaggtcctcatgggcggagtaatggagcttcgtcacacaagcctggcagcagcccatcatccccgcgggaaaaggaccttctgtccatgctgtgcaggaatcagctgagccctgtcaatatccatcccagttatgcaccttcttccccaagcagtagcaactcaggctcctacaaaggaagcgactgtagccccatcatgaggcgttctggaaggtacatgtcttgcggtgaaaatcatggtgtcagacccccaaacccagagcagtatttgactccactgcagcagaaagaggtgacagtgagacacctcaaaaccaagctgaaggaatctgagcgccgactccatgaaagggaaagtgaaatcgtggagcttaagtcccagctggcccgcatgcgagaggactggattgaggaggagtgtcaccgggtagaggcccagttggcactcaaagaagccaggaaagagattaaacagctcaaacaggtcatcgaaaccatgcggagcagcttggctgataaagataaaggcattcagaaatattttgtggacataaacatccaaaacaagaagctggagtctctccttcagagcatggagatggcacacagtggctctctgagggacgaactgtgcctagactttccatgtgattccccagagaagagcttaaccctcaacccccctcttgacacaatggcagatgggttatctctggaagagcaggtcacgggggaaggggctgacagggagctactggtaggagatagcatagccaacagcacagatttgttcgatgagatagtgacagccaccaccacagaatctggtgacctggagcttgtgcattccacccctggggctaacgtcctggagctgctgcccatagtcatgggtcaggaggagggcagtgtggtggtggagcgagccgttcagaccgacgtggtgccctacagcccagccatctcagagctcattcagagtgtgctgcagaagctccaggacccctgtccctcgagcttggcgtcccctgatgagtctgaaccagactcgatggagagcttcccagagtccctctctgccttagtggttgatttaactccaagaaatccaaactcagccatccttttgtctcccgtggagaccccctacgccaatgtggatgcagaagttcatgcaaaccgcctcatgagagagctggattttgcagcctgcgtggaagagaggttggatggtgtcatcccactggctcgcgggggcgtcgtgaggcagtactggagcagcagcttcctggtggatctcctggctgtggctgcccccgtggtccccacggttctgtgggcattcagtactcagagagggggaacggatcctgtgtataacatcggggccttgctcaggggctgttgcgtggttgccctgcattcgctccgccgcaccgccttccgtatcaaaacctaaatagaagttgttgttaccgtgtgccaatgtgtcccatgtgggttgtgccaggtagagaaacaggaagtcaatcatctgtgacagtctctattctgtcgttttgctccttggtatttgatttgcactatatttagttgaagcctgttcactgtttaaaaccggaggtatcttcaaaggcatggagacctggttccagtaaatgtcccaccagtggggtatagaaagcatgctcatgaccctgccgtgtcgtctgaggtacccgttcttatcctagtggttcaggaagagaaaacgcagtttgcactttcaagacagcttctctaaggctggcatgttatctccttgctttgctttttgccgttttaaaatgtgtaattgttccagcattccaatggtcttgtgcatagcaggggactgtaaccaaaaataaacatgtatttgtgtaattggtttgaagaagtcttgaatagctctttactgtcttacttggggttgataagatttgagtgtttgcaattttttactaaatgtagctccaaagtcttaaatggcttgtttgttcttaaactgttaattgatgaaactgtgcataagtttacaatgtactaacttattttgcttattatatatagtgttttattggaaattgtaaccacacacttcagcatgatgaaaataaagattagtgtttccatttaaataaatgttttatcctccc

SEQ ID NO: 30739 - DNA, 3223 bp, Homo sapiens
  source 1..3223: mol_type = unassigned DNA
agcggcttcttcaagaaacagatcctgcagcataatctgccagggccctggcaacaggaaccggtccttcaggcagcgagcccagggagcagaatcctggcgcccccggcgcgcggccctcagcgtgctcacgccgctgcgccccacccagcggtgcctgccctttggtcccccgcccttctctccattttgtcctcagccccagcagccgcccggctggctgcagaggccgaggggccgagggcaccggagcgcaagggattccgcggcaccacgtgtccaagccgggctaaggcgggcggagcgggccgggcccggctccccgggcctgagcgcaaaccagcagcgacgcggggtcccgtccgcaccggcacccggcccagccggggcccggtctcccgggcgcacgtaggtgcctcctcctggacagcgcgatggggcccttctgggcgagaaagggtgcctcctcctggacggcggcagcggcggcgcgaggagccggcgggcagcggcgcgatggggcccctccgcgagagcaaggagcacagagtgcagcatcatgacaaggagatttctcgaagccgaattccccggttgattcttcggccccatatgccccaacaacagcacaaagtgtccccagcctctgagtctcctttctctgaggaagagagcagagagttcaaccccagcagctctgggcgctcagcgaggaccgttagcagcaacagcttctgctcagatgacacaggctgtcctagcagccagtcagtgtctcctgtgaagacaccctcagatgctggaaacagccccattggcttttgccctggaagtgatgaaggcttcaccagaaagaaatgcacgattggaatggttggtgaaggaagcattcagtcctctcgatataagaaggaatcaaagtcaggccttgtgaaaccaggtagtgaagctgattttagctcctcgagcagcacaggcagcatttccgctcctgaggtccatatgtcgactgcgggaagcaagcggtcttcttcttcacgcaatcgaggtcctcatgggcggagtaatggagcttcgtcacacaagcctggcagcagcccatcatccccgcgggaaaaggaccttctgtccatgctgtgcaggaatcagctgagccctgtcaatatccatcccagttatgcaccttcttccccaagcagtagcaactcaggctcctacaaaggaagcgactgtagccccatcatgaggcgttctggaaggtacatgtcttgcggtgaaaatcatggtgtcagacccccaaacccagagcagtatttgactccactgcagcagaaagaggtgacagtgagacacctcaaaaccaagctgaaggaatctgagcgccgactccatgaaagggaaagtgaaatcgtggagcttaagtcccagctggcccgcatgcgagaggactggattgaggaggagtgtcaccgggtagaggcccagttggcactcaaagaagccaggaaagagattaaacagctcaaacaggtcatcgaaaccatgcggagcagcttggctgataaagataaaggcattcagaaatattttgtggacataaacatccaaaacaagaagctggagtctctccttcagagcatggagatggcacacagtggctctctgagggacgaactgtgcctagactttccatgtgattccccagagaagagcttaaccctcaacccccctcttgacacaatggcagatgggttatctctggaagagcaggtcacgggggaaggggctgacagggagctactggtaggagatagcatagccaacagcacagatttgttcgatgagatagtgacagccaccaccacagaatctggtgacctggagcttgtgcattccacccctggggctaacgtcctggagctgctgcccatagtcatgggtcaggaggagggcagtgtggtggtggagcgagccgttcagaccgacgtggtgccctacagcccagccatctcagagctcattcagagtgtgctgcagaagctccaggacccctgtccctcgagcttggcgtcccctgatgagtctgaaccagactcgatggagagcttcccagagtccctctctgccttagtggttgatttaactccaagaaatccaaactcagccatccttttgtctcccgtggagaccccctacgccaatgtggatgcagaagttcatgcaaaccgcctcatgagagagctggattttgcagcctgcgtggaagagaggttggatggtgtcatcccactggctcgcgggggcgtcgtgaggcagtactggagcagcagcttcctggtggatctcctggctgtggctgcccccgtggtccccacggttctgtgggcattcagtactcagagagggggaacggatcctgtgtataacatcggggccttgctcaggggctgttgcgtggttgccctgcattcgctccgccgcaccgccttccgtatcaaaacctaaatagaagttgttgttaccgtgtgccaatgtgtcccatgtgggttgtgccaggtagagaaacaggaagtcaatcatctgtgacagtctctattctgtcgttttgctccttggtatttgatttgcactatatttagttgaagcctgttcactgtttaaaaccggaggtatcttcaaaggcatggagacctggttccagtaaatgtcccaccagtggggtatagaaagcatgctcatgaccctgccgtgtcgtctgaggtacccgttcttatcctagtggttcaggaagagaaaacgcagtttgcactttcaagacagcttctctaaggctggcatgttatctccttgctttgctttttgccgttttaaaatgtgtaattgttccagcattccaatggtcttgtgcatagcaggggactgtaaccaaaaataaacatgtatttgtgtaattggtttgaagaagtcttgaatagctctttactgtcttacttggggttgataagatttgagtgtttgcaattttttactaaatgtagctccaaagtcttaaatggcttgtttgttcttaaactgttaattgatgaaactgtgcataagtttacaatgtactaacttattttgcttattatatatagtgttttattggaaattgtaaccacacacttcagcatgatgaaaataaagattagtgtttccatttaaataaatgttttatcctccc

SEQ ID NO: 30740 - DNA, 3226 bp, Homo sapiens
  source 1..3226: mol_type = unassigned DNA
agcggcttcttcaagaaacagatcctgcagcataatctgccagggccctggcaacaggaaccggtccttcaggcagcgagcccagggagcagaatcctggcgcccccggcgcgcggccctcagcgtgctcacgccgctgcgccccacccagcggtgcctgccctttggtcccccgcccttctctccattttgtcctcagccccagcagccgcccggctggctgcagaggccgaggggccgagggcaccggagcgcaagggattccgcggcaccacgtgtccaagccgggctaaggcgggcggagcgggccgggcccggctccccgggcctgagcgcaaaccagcagcgacgcggggtcccgtccgcaccggcacccggcccagccggggcccggtctcccgggcgcacgtaggtgcctcctcctggacagcgcgatggggcccttctgggcgagaaagggtgcctcctcctggacggcggcagcggcggcgcgaggagccggcgggcagcggcgcgatggggcccctccgcgagagcaagaaggagcacagagtgcagcatcatgacaaggagatttctcgaagccgaattccccggttgattcttcggccccatatgccccaacaacagcacaaagtgtccccagcctctgagtctcctttctctgaggaagagagcagagagttcaaccccagcagctctgggcgctcagcgaggaccgttagcagcaacagcttctgctcagatgacacaggctgtcctagcagccagtcagtgtctcctgtgaagacaccctcagatgctggaaacagccccattggcttttgccctggaagtgatgaaggcttcaccagaaagaaatgcacgattggaatggttggtgaaggaagcattcagtcctctcgatataagaaggaatcaaagtcaggccttgtgaaaccaggtagtgaagctgattttagctcctcgagcagcacaggcagcatttccgctcctgaggtccatatgtcgactgcgggaagcaagcggtcttcttcttcacgcaatcgaggtcctcatgggcggagtaatggagcttcgtcacacaagcctggcagcagcccatcatccccgcgggaaaaggaccttctgtccatgctgtgcaggaatcagctgagccctgtcaatatccatcccagttatgcaccttcttccccaagcagtagcaactcaggctcctacaaaggaagcgactgtagccccatcatgaggcgttctggaaggtacatgtcttgcggtgaaaatcatggtgtcagacccccaaacccagagcagtatttgactccactgcagcagaaagaggtgacagtgagacacctcaaaaccaagctgaaggaatctgagcgccgactccatgaaagggaaagtgaaatcgtggagcttaagtcccagctggcccgcatgcgagaggactggattgaggaggagtgtcaccgggtagaggcccagttggcactcaaagaagccaggaaagagattaaacagctcaaacaggtcatcgaaaccatgcggagcagcttggctgataaagataaaggcattcagaaatattttgtggacataaacatccaaaacaagaagctggagtctctccttcagagcatggagatggcacacagtggctctctgagggacgaactgtgcctagactttccatgtgattccccagagaagagcttaaccctcaacccccctcttgacacaatggcagatgggttatctctggaagagcaggtcacgggggaaggggctgacagggagctactggtaggagatagcatagccaacagcacagatttgttcgatgagatagtgacagccaccaccacagaatctggtgacctggagcttgtgcattccacccctggggctaacgtcctggagctgctgcccatagtcatgggtcaggaggagggcagtgtggtggtggagcgagccgttcagaccgacgtggtgccctacagcccagccatctcagagctcattcagagtgtgctgcagaagctccaggacccctgtccctcgagcttggcgtcccctgatgagtctgaaccagactcgatggagagcttcccagagtccctctctgccttagtggttgatttaactccaagaaatccaaactcagccatccttttgtctcccgtggagaccccctacgccaatgtggatgcagaagttcatgcaaaccgcctcatgagagagctggattttgcagcctgcgtggaagagaggttggatggtgtcatcccactggctcgcgggggcgtcgtgaggcagtactggagcagcagcttcctggtggatctcctggctgtggctgcccccgtggtccccacggttctgtgggcattcagtactcagagagggggaacggatcctgtgtataacatcggggccttgctcaggggctgttgcgtggttgccctgcattcgctccgccgcaccgccttccgtatcaaaacctaaatagaagttgttgttaccgtgtgccaatgtgtcccatgtgggttgtgccaggtagagaaacaggaagtcaatcatctgtgacagtctctattctgtcgttttgctccttggtatttgatttgcactatatttagttgaagcctgttcactgtttaaaaccggaggtatcttcaaaggcatggagacctggttccagtaaatgtcccaccagtggggtatagaaagcatgctcatgaccctgccgtgtcgtctgaggtacccgttcttatcctagtggttcaggaagagaaaacgcagtttgcactttcaagacagcttctctaaggctggcatgttatctccttgctttgctttttgccgttttaaaatgtgtaattgttccagcattccaatggtcttgtgcatagcaggggactgtaaccaaaaataaacatgtatttgtgtaattggtttgaagaagtcttgaatagctctttactgtcttacttggggttgataagatttgagtgtttgcaattttttactaaatgtagctccaaagtcttaaatggcttgtttgttcttaaactgttaattgatgaaactgtgcataagtttacaatgtactaacttattttgcttattatatatagtgttttattggaaattgtaaccacacacttcagcatgatgaaaataaagattagtgtttccatttaaataaatgttttatcctccc

SEQ ID NO: 30741 - DNA, 3104 bp, Homo sapiens
  source 1..3104: mol_type = unassigned DNA
accacacacacaaaaaaatctcacgatgccccagaatgcagtttctttccttcgtgacgtgttgtgaagcacgtcagctgctccttgttgctgtgcagatcacccaacattaggtcaccgagagagacagcagctcttgctcacacagctgataggattaggagatggtgctttgtcagccctgattgagcccaagaaaaccccctgcatacacaggcatcaacaaatattgactggatcatctggacctgacttagctgccctttggaaagttctgttcaatcagctggatagagctgtttgttttcctcacctaaccctcacagctatcctagaggtgcctcctcctggacggcggcagcggcggcgcgaggagccggcgggcagcggcgcgatggggcccctccgcgagagcaagaaggagcacagagtgcagcatcatgacaaggagatttctcgaagccgaattccccggttgattcttcggccccatatgccccaacaacagcacaaagtgtccccagcctctgagtctcctttctctgaggaagagagcagagagttcaaccccagcagctctgggcgctcagcgaggaccgttagcagcaacagcttctgctcagatgacacaggctgtcctagcagccagtcagtgtctcctgtgaagacaccctcagatgctggaaacagccccattggcttttgccctggaagtgatgaaggcttcaccagaaagaaatgcacgattggaatggttggtgaaggaagcattcagtcctctcgatataagaaggaatcaaagtcaggccttgtgaaaccaggtagtgaagctgattttagctcctcgagcagcacaggcagcatttccgctcctgaggtccatatgtcgactgcgggaagcaagcggtcttcttcttcacgcaatcgaggtcctcatgggcggagtaatggagcttcgtcacacaagcctggcagcagcccatcatccccgcgggaaaaggaccttctgtccatgctgtgcaggaatcagctgagccctgtcaatatccatcccagttatgcaccttcttccccaagcagtagcaactcaggctcctacaaaggaagcgactgtagccccatcatgaggcgttctggaaggtacatgtcttgcggtgaaaatcatggtgtcagacccccaaacccagagcagtatttgactccactgcagcagaaagaggtgacagtgagacacctcaaaaccaagctgaaggaatctgagcgccgactccatgaaagggaaagtgaaatcgtggagcttaagtcccagctggcccgcatgcgagaggactggattgaggaggagtgtcaccgggtagaggcccagttggcactcaaagaagccaggaaagagattaaacagctcaaacaggtcatcgaaaccatgcggagcagcttggctgataaagataaaggcattcagaaatattttgtggacataaacatccaaaacaagaagctggagtctctccttcagagcatggagatggcacacagtggctctctgagggacgaactgtgcctagactttccatgtgattccccagagaagagcttaaccctcaacccccctcttgacacaatggcagatgggttatctctggaagagcaggtcacgggggaaggggctgacagggagctactggtaggagatagcatagccaacagcacagatttgttcgatgagatagtgacagccaccaccacagaatctggtgacctggagcttgtgcattccacccctggggctaacgtcctggagctgctgcccatagtcatgggtcaggaggagggcagtgtggtggtggagcgagccgttcagaccgacgtggtgccctacagcccagccatctcagagctcattcagagtgtgctgcagaagctccaggacccctgtccctcgagcttggcgtcccctgatgagtctgaaccagactcgatggagagcttcccagagtccctctctgccttagtggttgatttaactccaagaaatccaaactcagccatccttttgtctcccgtggagaccccctacgccaatgtggatgcagaagttcatgcaaaccgcctcatgagagagctggattttgcagcctgcgtggaagagaggttggatggtgtcatcccactggctcgcgggggcgtcgtgaggcagtactggagcagcagcttcctggtggatctcctggctgtggctgcccccgtggtccccacggttctgtgggcattcagtactcagagagggggaacggatcctgtgtataacatcggggccttgctcaggggctgttgcgtggttgccctgcattcgctccgccgcaccgccttccgtatcaaaacctaaatagaagttgttgttaccgtgtgccaatgtgtcccatgtgggttgtgccaggtagagaaacaggaagtcaatcatctgtgacagtctctattctgtcgttttgctccttggtatttgatttgcactatatttagttgaagcctgttcactgtttaaaaccggaggtatcttcaaaggcatggagacctggttccagtaaatgtcccaccagtggggtatagaaagcatgctcatgaccctgccgtgtcgtctgaggtacccgttcttatcctagtggttcaggaagagaaaacgcagtttgcactttcaagacagcttctctaaggctggcatgttatctccttgctttgctttttgccgttttaaaatgtgtaattgttccagcattccaatggtcttgtgcatagcaggggactgtaaccaaaaataaacatgtatttgtgtaattggtttgaagaagtcttgaatagctctttactgtcttacttggggttgataagatttgagtgtttgcaattttttactaaatgtagctccaaagtcttaaatggcttgtttgttcttaaactgttaattgatgaaactgtgcataagtttacaatgtactaacttattttgcttattatatatagtgttttattggaaattgtaaccacacacttcagcatgatgaaaataaagattagtgtttccatttaaataaatgttttatcctccc

SEQ ID NO: 30742 - DNA, 3072 bp, Homo sapiens
  source 1..3072: mol_type = unassigned DNA
actcaggctgaagggaccgattggagtgctggcttgaactcgtttttctgagttcaattccagtgctcttcccttagcagtgtgctggagctacttcctggagccgggcagctgcagggcagcgctggggaaaagactgttctctggctacatagcagcctggcttctccaagccggagggagctgcgctgaccactgaaggcctttctgatgcaaccccttccaagtagaatccatcgcagcctttcagatcccggaacccagaggctgtgtcggtcctgacgcactggcttggctgggctccggtgcctcctcctggacggcggcagcggcggcgcgaggagccggcgggcagcggcgcgatggggcccctccgcgagagcaagaaggagcacagagtgcagcatcatgacaaggagatttctcgaagccgaattccccggttgattcttcggccccatatgccccaacaacagcacaaagtgtccccagcctctgagtctcctttctctgaggaagagagcagagagttcaaccccagcagctctgggcgctcagcgaggaccgttagcagcaacagcttctgctcagatgacacaggctgtcctagcagccagtcagtgtctcctgtgaagacaccctcagatgctggaaacagccccattggcttttgccctggaagtgatgaaggcttcaccagaaagaaatgcacgattggaatggttggtgaaggaagcattcagtcctctcgatataagaaggaatcaaagtcaggccttgtgaaaccaggtagtgaagctgattttagctcctcgagcagcacaggcagcatttccgctcctgaggtccatatgtcgactgcgggaagcaagcggtcttcttcttcacgcaatcgaggtcctcatgggcggagtaatggagcttcgtcacacaagcctggcagcagcccatcatccccgcgggaaaaggaccttctgtccatgctgtgcaggaatcagctgagccctgtcaatatccatcccagttatgcaccttcttccccaagcagtagcaactcaggctcctacaaaggaagcgactgtagccccatcatgaggcgttctggaaggtacatgtcttgcggtgaaaatcatggtgtcagacccccaaacccagagcagtatttgactccactgcagcagaaagaggtgacagtgagacacctcaaaaccaagctgaaggaatctgagcgccgactccatgaaagggaaagtgaaatcgtggagcttaagtcccagctggcccgcatgcgagaggactggattgaggaggagtgtcaccgggtagaggcccagttggcactcaaagaagccaggaaagagattaaacagctcaaacaggtcatcgaaaccatgcggagcagcttggctgataaagataaaggcattcagaaatattttgtggacataaacatccaaaacaagaagctggagtctctccttcagagcatggagatggcacacagtggctctctgagggacgaactgtgcctagactttccatgtgattccccagagaagagcttaaccctcaacccccctcttgacacaatggcagatgggttatctctggaagagcaggtcacgggggaaggggctgacagggagctactggtaggagatagcatagccaacagcacagatttgttcgatgagatagtgacagccaccaccacagaatctggtgacctggagcttgtgcattccacccctggggctaacgtcctggagctgctgcccatagtcatgggtcaggaggagggcagtgtggtggtggagcgagccgttcagaccgacgtggtgccctacagcccagccatctcagagctcattcagagtgtgctgcagaagctccaggacccctgtccctcgagcttggcgtcccctgatgagtctgaaccagactcgatggagagcttcccagagtccctctctgccttagtggttgatttaactccaagaaatccaaactcagccatccttttgtctcccgtggagaccccctacgccaatgtggatgcagaagttcatgcaaaccgcctcatgagagagctggattttgcagcctgcgtggaagagaggttggatggtgtcatcccactggctcgcgggggcgtcgtgaggcagtactggagcagcagcttcctggtggatctcctggctgtggctgcccccgtggtccccacggttctgtgggcattcagtactcagagagggggaacggatcctgtgtataacatcggggccttgctcaggggctgttgcgtggttgccctgcattcgctccgccgcaccgccttccgtatcaaaacctaaatagaagttgttgttaccgtgtgccaatgtgtcccatgtgggttgtgccaggtagagaaacaggaagtcaatcatctgtgacagtctctattctgtcgttttgctccttggtatttgatttgcactatatttagttgaagcctgttcactgtttaaaaccggaggtatcttcaaaggcatggagacctggttccagtaaatgtcccaccagtggggtatagaaagcatgctcatgaccctgccgtgtcgtctgaggtacccgttcttatcctagtggttcaggaagagaaaacgcagtttgcactttcaagacagcttctctaaggctggcatgttatctccttgctttgctttttgccgttttaaaatgtgtaattgttccagcattccaatggtcttgtgcatagcaggggactgtaaccaaaaataaacatgtatttgtgtaattggtttgaagaagtcttgaatagctctttactgtcttacttggggttgataagatttgagtgtttgcaattttttactaaatgtagctccaaagtcttaaatggcttgtttgttcttaaactgttaattgatgaaactgtgcataagtttacaatgtactaacttattttgcttattatatatagtgttttattggaaattgtaaccacacacttcagcatgatgaaaataaagattagtgtttccatttaaataaatgttttatcctccc

SEQ ID NO: 30743 - DNA, 2919 bp, Homo sapiens
  source 1..2919: mol_type = unassigned DNA
agcacgtcagctgctccttgttgctgtgcagatcacccaacattaggtcaccgagagagacagcagctcttgctcacacagctgataggattaggagatggtgctttgtcagccctgattgagcccaagaaaaccccctgcatacacaggtgcctcctcctggacggcggcagcggcggcgcgaggagccggcgggcagcggcgcgatggggcccctccgcgagagcaaggagcacagagtgcagcatcatgacaaggagatttctcgaagccgaattccccggttgattcttcggccccatatgccccaacaacagcacaaagtgtccccagcctctgagtctcctttctctgaggaagagagcagagagttcaaccccagcagctctgggcgctcagcgaggaccgttagcagcaacagcttctgctcagatgacacaggctgtcctagcagccagtcagtgtctcctgtgaagacaccctcagatgctggaaacagccccattggcttttgccctggaagtgatgaaggcttcaccagaaagaaatgcacgattggaatggttggtgaaggaagcattcagtcctctcgatataagaaggaatcaaagtcaggccttgtgaaaccaggtagtgaagctgattttagctcctcgagcagcacaggcagcatttccgctcctgaggtccatatgtcgactgcgggaagcaagcggtcttcttcttcacgcaatcgaggtcctcatgggcggagtaatggagcttcgtcacacaagcctggcagcagcccatcatccccgcgggaaaaggaccttctgtccatgctgtgcaggaatcagctgagccctgtcaatatccatcccagttatgcaccttcttccccaagcagtagcaactcaggctcctacaaaggaagcgactgtagccccatcatgaggcgttctggaaggtacatgtcttgcggtgaaaatcatggtgtcagacccccaaacccagagcagtatttgactccactgcagcagaaagaggtgacagtgagacacctcaaaaccaagctgaaggaatctgagcgccgactccatgaaagggaaagtgaaatcgtggagcttaagtcccagctggcccgcatgcgagaggactggattgaggaggagtgtcaccgggtagaggcccagttggcactcaaagaagccaggaaagagattaaacagctcaaacaggtcatcgaaaccatgcggagcagcttggctgataaagataaaggcattcagaaatattttgtggacataaacatccaaaacaagaagctggagtctctccttcagagcatggagatggcacacagtggctctctgagggacgaactgtgcctagactttccatgtgattccccagagaagagcttaaccctcaacccccctcttgacacaatggcagatgggttatctctggaagagcaggtcacgggggaaggggctgacagggagctactggtaggagatagcatagccaacagcacagatttgttcgatgagatagtgacagccaccaccacagaatctggtgacctggagcttgtgcattccacccctggggctaacgtcctggagctgctgcccatagtcatgggtcaggaggagggcagtgtggtggtggagcgagccgttcagaccgacgtggtgccctacagcccagccatctcagagctcattcagagtgtgctgcagaagctccaggacccctgtccctcgagcttggcgtcccctgatgagtctgaaccagactcgatggagagcttcccagagtccctctctgccttagtggttgatttaactccaagaaatccaaactcagccatccttttgtctcccgtggagaccccctacgccaatgtggatgcagaagttcatgcaaaccgcctcatgagagagctggattttgcagcctgcgtggaagagaggttggatggtgtcatcccactggctcgcgggggcgtcgtgaggcagtactggagcagcagcttcctggtggatctcctggctgtggctgcccccgtggtccccacggttctgtgggcattcagtactcagagagggggaacggatcctgtgtataacatcggggccttgctcaggggctgttgcgtggttgccctgcattcgctccgccgcaccgccttccgtatcaaaacctaaatagaagttgttgttaccgtgtgccaatgtgtcccatgtgggttgtgccaggtagagaaacaggaagtcaatcatctgtgacagtctctattctgtcgttttgctccttggtatttgatttgcactatatttagttgaagcctgttcactgtttaaaaccggaggtatcttcaaaggcatggagacctggttccagtaaatgtcccaccagtggggtatagaaagcatgctcatgaccctgccgtgtcgtctgaggtacccgttcttatcctagtggttcaggaagagaaaacgcagtttgcactttcaagacagcttctctaaggctggcatgttatctccttgctttgctttttgccgttttaaaatgtgtaattgttccagcattccaatggtcttgtgcatagcaggggactgtaaccaaaaataaacatgtatttgtgtaattggtttgaagaagtcttgaatagctctttactgtcttacttggggttgataagatttgagtgtttgcaattttttactaaatgtagctccaaagtcttaaatggcttgtttgttcttaaactgttaattgatgaaactgtgcataagtttacaatgtactaacttattttgcttattatatatagtgttttattggaaattgtaaccacacacttcagcatgatgaaaataaagattagtgtttccatttaaataaatgttttatcctcccataaaa

SEQ ID NO: 30744 - DNA, 748 bp, Homo sapiens
  source 1..748: mol_type = unassigned DNA
ctcttatgggaaaacaggcagctctctccctggtaagaaaaatatgggtctccaccccaccccaccacacacacaaaaaaatctcacgatgccccagaatgcagtttctttccttcgtgacgtgttgtgaagcacgtcagctgctccttgttgctgtgcagatcacccaacattaggtcaccgagagagacagcagctcttgctcacacagctgataggattaggagatggtgctttgtcagccctgattgagcccaagaaaaccccctgcatacacaggtgcctcctcctggacggcggcagcggcggcgcgaggagccggcgggcagcggcgcgatggggcccctccgcgagagcaagaaggagcacagagtgcagcatcatgacaaggagatttctcgaagccgaattccccggttgattcttcggccccatatgccccaacaacagcacaaagtgtccccagcctctgagtctcctttctctgaggaagagagcagagagttcaaccccagcagctctgggcgctcagcgaggaccgttagcagcaacagcttctgctcagatgacacaggctgtcctagcagccagtcagtgtctcctgtgaagacaccctcagatgctggaaacagccccattggcttttgccctggaagtgatgaaggcttcaccagaaagaaatgcacgattggaatggttggtgaaggaagcattcagtcctctcgatataagaaggaatcaaagtcag

SEQ ID NO: 30745 - DNA, 582 bp, Homo sapiens
  source 1..582: mol_type = unassigned DNA
tttctttccttcgtgacgtgttgtgaagcacgtcagctgctccttgttgctgtgcagatcacccaacattaggtcaccgagagagacagcagctcttgctcacacagctgataggattaggagatggtgctttgtcagccctgattgagcccaagaaaaccccctgcatacacaggcatcaacaaatattgactggatcatctggacctgacttagctgccctttggaaagttctgttcaatcagctggatagagctgtttgttttcctcacctaaccctcacagctatcctagaggtgcctcctcctggacggcggcagcggcggcgcgaggagccggcgggcagcggcgcgatggggcccctccgcgagagcaagaaggagcacagagtgcagcatcatgacaaggagatttctcgaagccgaattccccggttgattcttcggccccatatgccccaacaacagcacaaagtgtccccagcctctgagtctcctttctctgaggaagagagcagagagttcaaccccagcagctctgggcgctcagcgaggaccgttagcagcaacagcttctgctcag

SEQ ID NO: 30746 - DNA, 559 bp, Homo sapiens
  source 1..559: mol_type = unassigned DNA
atttgactcttgagcttatttaaacaagtcaccagtccttgactccagaactgaagctttatatgttctttctatttggctgagccagtaatttttgattgcttcttcttcccaagaggcatcaacaaatattgactggatcatctggacctgacttagctgccctttggaaagttctgttcaatcagctggatagagctgtttgttttcctcacctaaccctcacagctatcctagagcccgcgccggctcagcgcagtctcctcgctccgtgctcgcaggtgcctcctcctggacggcggcagcggcggcgcgaggagccggcgggcagcggcgcgatggggcccctccgcgagagcaagaaggagcacagagtgcagcatcatgacaaggagatttctcgaagccgaattccccggttgattcttcggccccatatgccccaacaacagcacaaagtgtccccagcctctgagtctcctttctctgaggaagagagcagagagttcaaccccagcagctctgggcgctcagcgaggaccgttagcagcaacagctt

SEQ ID NO: 30747 - DNA, 564 bp, Homo sapiens
  source 1..564: mol_type = unassigned DNA
ttaggagatggtgctttgtcagccctgattgagcccaagaaaaccccctgcatacacagatgacacaggctgtcctagcagccagtcagtgtctcctgtgaagacaccctcagatgctggaaacagccccattggcttttgccctggaagtgatgaaggcttcaccagaaagaaatgcacgattggaatggttggtgaaggaagcattcagtcctctcgatataagaaggaatcaaagtcaggccttgtgaaaccaggtagtgaagctgattttagctcctcgagcagcacaggcagcatttccgctcctgaggtccatatgtcgactgcgggaagcaagcggtcttcttcttcacgcaatcgaggtcctcatgggcggagtaatggagcttcgtcacacaagcctggcagcagcccatcatccccgcgggaaaaggaccttctgtccatgctgtgcaggaatcagctgagccctgtcaatatccatcccagttatgcaccttcttccccaagcagtagcaactcaggctcctacaaaggaagcgactgtagccccatcatgag

SEQ ID NO: 30748 - DNA, 2636 bp, Homo sapiens
  source 1..2636: mol_type = unassigned DNA
agcacgtcagctgctccttgttgctgtgcagatcacccaacattaggtcaccgagagagacagcagctcttgctcacacagctgataggattaggagatggtgctttgtcagccctgattgagcccaagaaaaccccctgcatacacagatgacacaggctgtcctagcagccagtcagtgtctcctgtgaagacaccctcagatgctggaaacagccccattggcttttgccctggaagtgatgaaggcttcaccagaaagaaatgcacgattggaatggttggtgaaggaagcattcagtcctctcgatataagaaggaatcaaagtcaggccttgtgaaaccaggtagtgaagctgattttagctcctcgagcagcacaggcagcatttccgctcctgaggtccatatgtcgactgcgggaagcaagcggtcttcttcttcacgcaatcgaggtcctcatgggcggagtaatggagcttcgtcacacaagcctggcagcagcccatcatccccgcgggaaaaggaccttctgtccatgctgtgcaggaatcagctgagccctgtcaatatccatcccagttatgcaccttcttccccaagcagtagcaactcaggctcctacaaaggaagcgactgtagccccatcatgaggcgttctggaaggtacatgtcttgcggtgaaaatcatggtgtcagacccccaaacccagagcagtatttgactccactgcagcagaaagaggtgacagtgagacacctcaaaaccaagctgaaggaatctgagcgccgactccatgaaagggaaagtgaaatcgtggagcttaagtcccagctggcccgcatgcgagaggactggattgaggaggagtgtcaccgggtagaggcccagttggcactcaaagaagccaggaaagagattaaacagctcaaacaggtcatcgaaaccatgcggagcagcttggctgataaagataaaggcattcagaaatattttgtggacataaacatccaaaacaagaagctggagtctctccttcagagcatggagatggcacacagtggctctctgagggacgaactgtgcctagactttccatgtgattccccagagaagagcttaaccctcaacccccctcttgacacaatggcagatgggttatctctggaagagcaggtcacgggggaaggggctgacagggagctactggtaggagatagcatagccaacagcacagatttgttcgatgagatagtgacagccaccaccacagaatctggtgacctggagcttgtgcattccacccctggggctaacgtcctggagctgctgcccatagtcatgggtcaggaggagggcagtgtggtggtggagcgagccgttcagaccgacgtggtgccctacagcccagccatctcagagctcattcagagtgtgctgcagaagctccaggacccctgtccctcgagcttggcgtcccctgatgagtctgaaccagactcgatggagagcttcccagagtccctctctgccttagtggttgatttaactccaagaaatccaaactcagccatccttttgtctcccgtggagaccccctacgccaatgtggatgcagaagttcatgcaaaccgcctcatgagagagctggattttgcagcctgcgtggaagagaggttggatggtgtcatcccactggctcgcgggggcgtcgtgaggcagtactggagcagcagcttcctggtggatctcctggctgtggctgcccccgtggtccccacggttctgtgggcattcagtactcagagagggggaacggatcctgtgtataacatcggggccttgctcaggggctgttgcgtggttgccctgcattcgctccgccgcaccgccttccgtatcaaaacctaaatagaagttgttgttaccgtgtgccaatgtgtcccatgtgggttgtgccaggtagagaaacaggaagtcaatcatctgtgacagtctctattctgtcgttttgctccttggtatttgatttgcactatatttagttgaagcctgttcactgtttaaaaccggaggtatcttcaaaggcatggagacctggttccagtaaatgtcccaccagtggggtatagaaagcatgctcatgaccctgccgtgtcgtctgaggtacccgttcttatcctagtggttcaggaagagaaaacgcagtttgcactttcaagacagcttctctaaggctggcatgttatctccttgctttgctttttgccgttttaaaatgtgtaattgttccagcattccaatggtcttgtgcatagcaggggactgtaaccaaaaataaacatgtatttgtgtaattggtttgaagaagtcttgaatagctctttactgtcttacttggggttgataagatttgagtgtttgcaattttttactaaatgtagctccaaagtcttaaatggcttgtttgttcttaaactgttaattgatgaaactgtgcataagtttacaatgtactaacttattttgcttattatatatagtgttttattggaaattgtaaccacacacttcagcatgatgaaaataaagattagtgtttccatttaaataaatgttttatcctcccataaaa

SEQ ID NO: 30749 - DNA, 558 bp, Homo sapiens
  source 1..558: mol_type = unassigned DNA
atcaggaaataactgttccaggtatagggttcaactttgtgaggagacaagaaaacaagtcagactgtcacagctaatttagggaaagcaaaatggaagtctgaaggctatcaagtaagccagagtgtggtgttaataaagagcctttgggaggcagaagcttgaatgtgatagaagtcagggtgggaagatgacacaggctgtcctagcagccagtcagtgtctcctgtgaagacaccctcagatgctggaaacagccccattggcttttgccctggaagtgatgaaggcttcaccagaaagaaatgcacgattggaatggttggtgaaggaagcattcagtcctctcgatataagaaggaatcaaagtcaggccttgtgaaaccaggtagtgaagctgattttagctcctcgagcagcacaggcagcatttccgctcctgaggtccatatgtcgactgcgggaagcaagcggtcttcttcttcacgcaatcgaggtcctcatgggcggagtaatggagcttcgtcacacaagcctggcagcagcccatcatccccg

SEQ ID NO: 30750 - DNA, 2995 bp, Homo sapiens
  source 1..2995: mol_type = unassigned DNA
gcagtgtgctggagctacttcctggagccgggcagctgcagggcagcgctggggaaaagactgttctctggctacatagcagcctggcttctccaagccggagggagctgcgctgaccactgaaggcctttctgatgcaaccccttccaagtagaatccatcgcagcctttcagatcccggaacccagaggctgtgtcggtcctgacgcactggcttggctgggctccggtgcctcctcctggacggcggcagcggcggcgcgaggagccggcgggcagcggcgcgatggggcccctccgcgagagcaaggagcacagagtgcagcatcatgacaaggagatttctcgaagccgaattccccggttgattcttcggccccatatgccccaacaacagcacaaagtgtccccagcctctgagtctcctttctctgaggaagagagcagagagttcaaccccagcagctctgggcgctcagcgaggaccgttagcagcaacagcttctgctcagatgacacaggctgtcctagcagccagtcagtgtctcctgtgaagacaccctcagatgctggaaacagccccattggcttttgccctggaagtgatgaaggcttcaccagaaagaaatgcacgattggaatggttggtgaaggaagcattcagtcctctcgatataagaaggaatcaaagtcaggccttgtgaaaccaggtagtgaagctgattttagctcctcgagcagcacaggcagcatttccgctcctgaggtccatatgtcgactgcgggaagcaagcggtcttcttcttcacgcaatcgaggtcctcatgggcggagtaatggagcttcgtcacacaagcctggcagcagcccatcatccccgcgggaaaaggaccttctgtccatgctgtgcaggaatcagctgagccctgtcaatatccatcccagttatgcaccttcttccccaagcagtagcaactcaggctcctacaaaggaagcgactgtagccccatcatgaggcgttctggaaggtacatgtcttgcggtgaaaatcatggtgtcagacccccaaacccagagcagtatttgactccactgcagcagaaagaggtgacagtgagacacctcaaaaccaagctgaaggaatctgagcgccgactccatgaaagggaaagtgaaatcgtggagcttaagtcccagctggcccgcatgcgagaggactggattgaggaggagtgtcaccgggtagaggcccagttggcactcaaagaagccaggaaagagattaaacagctcaaacaggtcatcgaaaccatgcggagcagcttggctgataaagataaaggcattcagaaatattttgtggacataaacatccaaaacaagaagctggagtctctccttcagagcatggagatggcacacagtggctctctgagggacgaactgtgcctagactttccatgtgattccccagagaagagcttaaccctcaacccccctcttgacacaatggcagatgggttatctctggaagagcaggtcacgggggaaggggctgacagggagctactggtaggagatagcatagccaacagcacagatttgttcgatgagatagtgacagccaccaccacagaatctggtgacctggagcttgtgcattccacccctggggctaacgtcctggagctgctgcccatagtcatgggtcaggaggagggcagtgtggtggtggagcgagccgttcagaccgacgtggtgccctacagcccagccatctcagagctcattcagagtgtgctgcagaagctccaggacccctgtccctcgagcttggcgtcccctgatgagtctgaaccagactcgatggagagcttcccagagtccctctctgccttagtggttgatttaactccaagaaatccaaactcagccatccttttgtctcccgtggagaccccctacgccaatgtggatgcagaagttcatgcaaaccgcctcatgagagagctggattttgcagcctgcgtggaagagaggttggatggtgtcatcccactggctcgcgggggcgtcgtgaggcagtactggagcagcagcttcctggtggatctcctggctgtggctgcccccgtggtccccacggttctgtgggcattcagtactcagagagggggaacggatcctgtgtataacatcggggccttgctcaggggctgttgcgtggttgccctgcattcgctccgccgcaccgccttccgtatcaaaacctaaatagaagttgttgttaccgtgtgccaatgtgtcccatgtgggttgtgccaggtagagaaacaggaagtcaatcatctgtgacagtctctattctgtcgttttgctccttggtatttgatttgcactatatttagttgaagcctgttcactgtttaaaaccggaggtatcttcaaaggcatggagacctggttccagtaaatgtcccaccagtggggtatagaaagcatgctcatgaccctgccgtgtcgtctgaggtacccgttcttatcctagtggttcaggaagagaaaacgcagtttgcactttcaagacagcttctctaaggctggcatgttatctccttgctttgctttttgccgttttaaaatgtgtaattgttccagcattccaatggtcttgtgcatagcaggggactgtaaccaaaaataaacatgtatttgtgtaattggtttgaagaagtcttgaatagctctttactgtcttacttggggttgataagatttgagtgtttgcaattttttactaaatgtagctccaaagtcttaaatggcttgtttgttcttaaactgttaattgatgaaactgtgcataagtttacaatgtactaacttattttgcttattatatatagtgttttattggaaattgtaaccacacacttcagcatgatgaaaataaagattagtgtttccatttaaataaatgttttatcctcccat

SEQ ID NO: 30751 - DNA, 565 bp, Homo sapiens
  source 1..565: mol_type = unassigned DNA
tatttaaacaagtcaccagtccttgactccagaactgaagctttatatgttctttctatttggctgagccagtaatttttgattgcttcttcttcccaagaggcatcaacaaatattgactggatcatctggacctgacttagctgccctttggaaagttctgttcaatcagctggatagagctgtttgttttcctcacctaaccctcacagctatcctagaggtgcctcctcctggacggcggcagcggcggcgcgaggagccggcgggcagcggcgcgatggggcccctccgcgagagcaagaaggagcacagagtgcagcatcatgacaaggagatttctcgaagccgaattccccggttgattcttcggccccatatgccccaacaacagcacaaagtgtccccagcctctgagtctcctttctctgaggaagagagcagagagttcaaccccagcagctctgggcgctcagcgaggaccgttagcagcaacagcttctgctcagatgacacaggctgtcctagcagccagtcagtgtctcctgtgaagacaccctcagat

SEQ ID NO: 30752 - DNA, 1126 bp, Homo sapiens
  source 1..1126: mol_type = unassigned DNA
cggcttcttcaagaaacagatcctgcagcataatctgccagggccctggcaacaggaaccggtccttcaggcagcgagcccagggagcagaatcctggcgcccccggcgcgcggccctcagcgtgctcacgccgctgcgccccacccagcggtgcctgccctttggtcccccgcccttctctccattttgtcctcagccccagcagccgcccggctggctgcagaggccgaggggccgagggcaccggagcgcaagggattccgcggcaccacgtgtccaagccgggctaaggcgggcggagcgggccgggcccggctccccgggcctgagcgcaaaccagcagcgacgcggggtcccgtccgcaccggcacccggcccagccggggcccggtctcccgggcgcacgtaggtgcctcctcctggacagcgcgatggggcccttctgggcgagaaagggtgcctcctcctggacggcggcagcggcggcgcgaggagccggcgggcagcggcgcgatggggcccctccgcgagagcaaggagcacagagtgcagcatcatgacaaggagatttctcgaagccgaattccccggttgattcttcggccccatatgccccaacaacagcacaaagtgtccccagcctctgagtctcctttctctgaggaagagagcagagagttcaaccccagcagctctgggcgctcagcgaggaccgttagcagcaacagcttctgctcagatgacacaggctgtcctagcagccagtcagtgtctcctgtgaagacaccctcagatgctggaaacagccccattggcttttgccctggaagtgatgaaggcttcaccagaaagaaatgcacgattggaatggttggtgaaggaagcattcagtcctctcgatataagaaggaatcaaagtcaggccttgtgaaaccaggtagtgaagctgattttagctcctcgagcagcacaggcagcatttccgctcctgaggtccatatgtcgactgcgggaagcaagcggtcttcttcttcacgcaatcgaggtcctcatgggcggagtaatggagcttcgtcacacaagcctggcagcagcccatcatccccgcgggaaaaggaccttctg

SEQ ID NO: 30753 - DNA, 545 bp, Homo sapiens
  source 1..545: mol_type = unassigned DNA
agcagtgtgctggagctacttcctggagccgggcagctgcagggcagcgctggggaaaagactgttctctggctacatagcagcctggcttctccaagccggagggagctgcgctgaccactgaaggcctttctgatgcaaccccttccaagtagaatccatcgcagcctttcagatcccggaacccagaggctgtgtcggtcctgacgcactggcttggctgggctccggtgcctcctcctggacggcggcagcggcggcgcgaggagccggcgggcagcggcgcgatggggcccctccgcgagagcaagatgacacaggctgtcctagcagccagtcagtgtctcctgtgaagacaccctcagatgctggaaacagccccattggcttttgccctggaagtgatgaaggcttcaccagaaagaaatgcacgattggaatggttggtgaaggaagcattcagtcctctcgatataagaaggaatcaaagtcaggccttgtgaaaccaggtagtgaagctgattttagctcctcgagcagcacag

SEQ ID NO: 30754 - DNA, 516 bp, Homo sapiens
  source 1..516: mol_type = unassigned DNA
ttctacttagaacaaagggaggtgcccggaagcagtacacattagtgcagagttttctggtttccctttaaagagaaggcacagccatttgactcttgagcttatttaaacaagtcaccagtccttgactccagaactgaagctttatatgttctttctatttggctgagccagtaatttttgattgcttcttcttcccaagaggtgcctcctcctggacggcggcagcggcggcgcgaggagccggcgggcagcggcgcgatggggcccctccgcgagagcaagatgacacaggctgtcctagcagccagtcagtgtctcctgtgaagacaccctcagatgctggaaacagccccattggcttttgccctggaagtgatgaaggcttcaccagaaagaaatgcacgattggaatggttggtgaaggaagcattcagtcctctcgatataagaaggaatcaaagtcaggccttgtgaaaccaggtagtgaagctgattttagctcctcgagcagca

SEQ ID NO: 30755 - DNA, 573 bp, Homo sapiens
  source 1..573: mol_type = unassigned DNA
attctacttagaacaaagggaggtgcccggaagcagtacacattagtgcagagttttctggtttccctttaaagagaaggcacagccatttgactcttgagcttatttaaacaagtcaccagtccttgactccagaactgaagctttatatgttctttctatttggctgagccagtaatttttgattgcttcttcttcccaagagatgacacaggctgtcctagcagccagtcagtgtctcctgtgaagacaccctcagatgctggaaacagccccattggcttttgccctggaagtgatgaaggcttcaccagaaagaaatgcacgattggaatggttggtgaaggaagcattcagtcctctcgatataagaaggaatcaaagtcaggccttgtgaaaccaggtagtgaagctgattttagctcctcgagcagcacaggcagcatttccgctcctgaggtccatatgtcgactgcgggaagcaagcggtcttcttcttcacgcaatcgaggtcctcatgggcggagtaatggagcttcgtcacacaagcctggcagcagcccatcatccccg

SEQ ID NO: 30756 - DNA, 2765 bp, Homo sapiens
  source 1..2765: mol_type = unassigned DNA
ttttgtcctcagccccagcagccgcccggctggctgcagaggccgaggggccgagggcaccggagcgcaagggattccgcggcaccacgtgtccaagccgggctaaggcgggcggagcgggccgggcccggctccccgggcctgagcgcaaaccagcagcgacgcggggtcccgtccgcaccggcacccggcccagccggggcccggtctcccgggcgcacgtaggtgcctcctcctggacagcgcgatggggcccttctgggcgagaaaggatgacacaggctgtcctagcagccagtcagtgtctcctgtgaagacaccctcagatgctggaaacagccccattggcttttgccctggaagtgatgaaggcttcaccagaaagaaatgcacgattggaatggttggtgaaggaagcattcagtcctctcgatataagaaggaatcaaagtcaggccttgtgaaaccaggtagtgaagctgattttagctcctcgagcagcacaggcagcatttccgctcctgaggtccatatgtcgactgcgggaagcaagcggtcttcttcttcacgcaatcgaggtcctcatgggcggagtaatggagcttcgtcacacaagcctggcagcagcccatcatccccgcgggaaaaggaccttctgtccatgctgtgcaggaatcagctgagccctgtcaatatccatcccagttatgcaccttcttccccaagcagtagcaactcaggctcctacaaaggaagcgactgtagccccatcatgaggcgttctggaaggtacatgtcttgcggtgaaaatcatggtgtcagacccccaaacccagagcagtatttgactccactgcagcagaaagaggtgacagtgagacacctcaaaaccaagctgaaggaatctgagcgccgactccatgaaagggaaagtgaaatcgtggagcttaagtcccagctggcccgcatgcgagaggactggattgaggaggagtgtcaccgggtagaggcccagttggcactcaaagaagccaggaaagagattaaacagctcaaacaggtcatcgaaaccatgcggagcagcttggctgataaagataaaggcattcagaaatattttgtggacataaacatccaaaacaagaagctggagtctctccttcagagcatggagatggcacacagtggctctctgagggacgaactgtgcctagactttccatgtgattccccagagaagagcttaaccctcaacccccctcttgacacaatggcagatgggttatctctggaagagcaggtcacgggggaaggggctgacagggagctactggtaggagatagcatagccaacagcacagatttgttcgatgagatagtgacagccaccaccacagaatctggtgacctggagcttgtgcattccacccctggggctaacgtcctggagctgctgcccatagtcatgggtcaggaggagggcagtgtggtggtggagcgagccgttcagaccgacgtggtgccctacagcccagccatctcagagctcattcagagtgtgctgcagaagctccaggacccctgtccctcgagcttggcgtcccctgatgagtctgaaccagactcgatggagagcttcccagagtccctctctgccttagtggttgatttaactccaagaaatccaaactcagccatccttttgtctcccgtggagaccccctacgccaatgtggatgcagaagttcatgcaaaccgcctcatgagagagctggattttgcagcctgcgtggaagagaggttggatggtgtcatcccactggctcgcgggggcgtcgtgaggcagtactggagcagcagcttcctggtggatctcctggctgtggctgcccccgtggtccccacggttctgtgggcattcagtactcagagagggggaacggatcctgtgtataacatcggggccttgctcaggggctgttgcgtggttgccctgcattcgctccgccgcaccgccttccgtatcaaaacctaaatagaagttgttgttaccgtgtgccaatgtgtcccatgtgggttgtgccaggtagagaaacaggaagtcaatcatctgtgacagtctctattctgtcgttttgctccttggtatttgatttgcactatatttagttgaagcctgttcactgtttaaaaccggaggtatcttcaaaggcatggagacctggttccagtaaatgtcccaccagtggggtatagaaagcatgctcatgaccctgccgtgtcgtctgaggtacccgttcttatcctagtggttcaggaagagaaaacgcagtttgcactttcaagacagcttctctaaggctggcatgttatctccttgctttgctttttgccgttttaaaatgtgtaattgttccagcattccaatggtcttgtgcatagcaggggactgtaaccaaaaataaacatgtatttgtgtaattggtttgaagaagtcttgaatagctctttactgtcttacttggggttgataagatttgagtgtttgcaattttttactaaatgtagctccaaagtcttaaatggcttgtttgttcttaaactgttaattgatgaaactgtgcataagtttacaatgtactaacttattttgcttattatatatagtgttttattggaaattgtaaccacacacttcagcatgatgaaaataaagattagtgtttccatttaaataaatgttttatcctcccataaaataataa

SEQ ID NO: 30757 - DNA, 2645 bp, Homo sapiens
  source 1..2645: mol_type = unassigned DNA
aatcggcggcagtggcggcggcggcgcgttggagcctcaccaagagccgccgcccgcagcccgcgccggctcagcgcagtctcctcgctccgtgctcgcaggtgcctcctcctggacggcggcagcggcggcgcgaggagccggcgggcagcggcgcgatggggcccctccgcgagagcaagatgacacaggctgtcctagcagccagtcagtgtctcctgtgaagacaccctcagatgctggaaacagccccattggcttttgccctggaagtgatgaaggcttcaccagaaagaaatgcacgattggaatggttggtgaaggaagcattcagtcctctcgatataagaaggaatcaaagtcaggccttgtgaaaccaggtagtgaagctgattttagctcctcgagcagcacaggcagcatttccgctcctgaggtccatatgtcgactgcgggaagcaagcggtcttcttcttcacgcaatcgaggtcctcatgggcggagtaatggagcttcgtcacacaagcctggcagcagcccatcatccccgcgggaaaaggaccttctgtccatgctgtgcaggaatcagctgagccctgtcaatatccatcccagttatgcaccttcttccccaagcagtagcaactcaggctcctacaaaggaagcgactgtagccccatcatgaggcgttctggaaggtacatgtcttgcggtgaaaatcatggtgtcagacccccaaacccagagcagtatttgactccactgcagcagaaagaggtgacagtgagacacctcaaaaccaagctgaaggaatctgagcgccgactccatgaaagggaaagtgaaatcgtggagcttaagtcccagctggcccgcatgcgagaggactggattgaggaggagtgtcaccgggtagaggcccagttggcactcaaagaagccaggaaagagattaaacagctcaaacaggtcatcgaaaccatgcggagcagcttggctgataaagataaaggcattcagaaatattttgtggacataaacatccaaaacaagaagctggagtctctccttcagagcatggagatggcacacagtggctctctgagggacgaactgtgcctagactttccatgtgattccccagagaagagcttaaccctcaacccccctcttgacacaatggcagatgggttatctctggaagagcaggtcacgggggaaggggctgacagggagctactggtaggagatagcatagccaacagcacagatttgttcgatgagatagtgacagccaccaccacagaatctggtgacctggagcttgtgcattccacccctggggctaacgtcctggagctgctgcccatagtcatgggtcaggaggagggcagtgtggtggtggagcgagccgttcagaccgacgtggtgccctacagcccagccatctcagagctcattcagagtgtgctgcagaagctccaggacccctgtccctcgagcttggcgtcccctgatgagtctgaaccagactcgatggagagcttcccagagtccctctctgccttagtggttgatttaactccaagaaatccaaactcagccatccttttgtctcccgtggagaccccctacgccaatgtggatgcagaagttcatgcaaaccgcctcatgagagagctggattttgcagcctgcgtggaagagaggttggatggtgtcatcccactggctcgcgggggcgtcgtgaggcagtactggagcagcagcttcctggtggatctcctggctgtggctgcccccgtggtccccacggttctgtgggcattcagtactcagagagggggaacggatcctgtgtataacatcggggccttgctcaggggctgttgcgtggttgccctgcattcgctccgccgcaccgccttccgtatcaaaacctaaatagaagttgttgttaccgtgtgccaatgtgtcccatgtgggttgtgccaggtagagaaacaggaagtcaatcatctgtgacagtctctattctgtcgttttgctccttggtatttgatttgcactatatttagttgaagcctgttcactgtttaaaaccggaggtatcttcaaaggcatggagacctggttccagtaaatgtcccaccagtggggtatagaaagcatgctcatgaccctgccgtgtcgtctgaggtacccgttcttatcctagtggttcaggaagagaaaacgcagtttgcactttcaagacagcttctctaaggctggcatgttatctccttgctttgctttttgccgttttaaaatgtgtaattgttccagcattccaatggtcttgtgcatagcaggggactgtaaccaaaaataaacatgtatttgtgtaattggtttgaagaagtcttgaatagctctttactgtcttacttggggttgataagatttgagtgtttgcaattttttactaaatgtagctccaaagtcttaaatggcttgtttgttcttaaactgttaattgatgaaactgtgcataagtttacaatgtactaacttattttgcttattatatatagtgttttattggaaattgtaaccacacacttcagcatgatgaaaataaagattagtgtttccatttaaa

SEQ ID NO: 30758 - DNA, 2498 bp, Homo sapiens
  source 1..2498: mol_type = unassigned DNA
cccatcaggatatttaagctggaagctttgtcaggctgcgtcagtgttccctgagtaagcaggaatgcaaactgcaattttagcattagcattctacttagaacaaagggaggtgcccggaagcagtacacattagtgcagagttttctggtttccctttaaagagaaggcacagccatttgactcttgagcttatttaaacaagtcaccagtccttgactccagaactgaagctttatatgttctttctatttggctgagccagtaatttttgattgcttcttcttcccaagaggtgcctcctcctggacggcggcagcggcggcgcgaggagccggcgggcagcggcgcgatggggcccctccgcgagagcaagaaggagcacagagtgcagcatcatgacaaggagatttctcgaagccgaattccccggttgattcttcggccccatatgccccaacaacagcacaaagtgtccccagcctctgagtctcctttctctgaggaagagagcagagagttcaaccccagcagctctgggcgctcagcgaggaccgttagcagcaacagcttctgctcagatgacacaggctgtcctagcagccagtcagtgtctcctgtgaagacaccctcagatgctggaaacagccccattggcttttgccctggaagtgatgaaggcttcaccagaaagaaatgcacgattggaatggttggtgaaggaagcattcagtcctctcgatataagaaggaatcaaagtcaggccttgtgaaaccaggtagtgaagctgattttagctcctcgagcagcacaggcagcatttccgctcctgaggtccatatgtcgactgcgggaagcaagcggtcttcttcttcacgcaatcgaggtcctcatgggcggagtaatggagcttcgtcacacaagcctggcagcagcccatcatccccgcgggaaaaggaccttctgtccatgctgtgcaggaatcagctgagccctgtcaatatccatcccagttatgcaccttcttccccaagcagtagcaactcaggctcctacaaaggaagcgactgtagccccatcatgaggcgttctggaaggtacatgtcttgcggtgaaaatcatggtgtcagacccccaaacccagagcagtatttgactccactgcagcagaaagaggtgacagtgagacacctcaaaaccaagctgaaggaatctgagcgccgactccatgaaagggaaagtgaaatcgtggagcttaagtcccagctggcccgcatgcgagaggactggattgaggaggagtgtcaccgggtagaggcccagttggcactcaaagaagccaggaaagagattaaacagctcaaacaggtcatcgaaaccatgcggagcagcttggctgataaagataaaggcattcagaaatattttgtggacataaacatccaaaacaagaagctggagtctctccttcagagcatggagatggcacacagtggctctctgagggacgaactgtgcctagactttccatgtgattccccagagaagagcttaaccctcaacccccctcttgacacaatggcagatgggttatctctggaagagcaggtcacgggggaaggggctgacagggagctactggtaggagatagcatagccaacagcacagatttgttcgatgagatagtgacagccaccaccacagaatctggtgacctggagcttgtgcattccacccctggggctaacgtcctggagctgctgcccatagtcatgggtcaggaggagggcagtgtggtggtggagcgagccgttcagaccgacgtggtgccctacagcccagccatctcagagctcattcagagtgtgctgcagaagctccaggacccctgtccctcgagcttggcgtcccctgatgagtctgaaccagactcgatggagagcttcccagagtccctctctgccttagtggttgatttaactccaagaaatccaaactcagccatccttttgtctcccgtggagaccccctacgccaatgtggatgcagaagttcatgcaaaccgcctcatgagagagctggattttgcagcctgcgtggaagagaggttggatggtgtcatcccactggctcgcgggggcgtcgtgaggcagtactggagcagcagcttcctggtggatctcctggctgtggctgcccccgtggtccccacggttctgtgggcattcagtactcagagagggggaacggatcctgtgtataacatcggggccttgctcaggggctgttgcgtggttgccctgcattcgctccgccgcaccgccttccgtatcaaaacctaaatagaagttgttgttaccgtgtgccaatgtgtcccatgtgggttgtgccaggtagagaaacaggaagtcaatcatctgtgacagtctctattctgtcgttttgctccttggtatttgatttgcactatatttagttgaagcctgttcactgttt

SEQ ID NO: 30759 - DNA, 575 bp, Homo sapiens
  source 1..575: mol_type = unassigned DNA
aattttgtactgcaggctttgctctagaatgtgcctcctcctggacggcggcagcggcggcgcgaggagccggcgggcagcggcgcgatggggcccctccgcgagagcaaggagcacagagtgcagcatcatgacaaggagatttctcgaagccgaattccccggttgattcttcggccccatatgccccaacaacagcacaaagtgtccccagcctctgagtctcctttctctgaggaagagagcagagagttcaaccccagcagctctgggcgctcagcgaggaccgttagcagcaacagcttctgctcagatgacacaggctgtcctagcagccagtcagtgtctcctgtgaagacaccctcagatgctggaaacagccccattggcttttgccctggaagtgatgaaggcttcaccagaaagaaatgcacgattggaatggttggtgaaggaagcattcagtcctctcgatataagaaggaatcaaagtcaggccttgtgaaaccaggtagtgaagctgattttagctcctcgagcagcacaggcagcatttccgctcctgaggtccatat

SEQ ID NO: 30760 - DNA, 3244 bp, Homo sapiens
  source 1..3244: mol_type = unassigned DNA
agcacgtcagctgctccttgttgctgtgcagatcacccaacattaggtcaccgagagagacagcagctcttgctcacacagctgataggattaggagatggtgctttgtcagccctgattgagcccaagaaaaccccctgcatacacaggcatcaacaaatattgactggatcatctggacctgacttagctgccctttggaaagttctgttcaatcagctggatagagctgtttgttttcctcacctaaccctcacagctatcctagaggtgcctcctcctggacggcggcagcggcggcgcgaggagccggcgggcagcggcgcgatggggcccctccgcgagagcaaggagcacagagtgcagcatcatgacaaggagatttctcgaagccgaattccccggttgattcttcggccccatatgccccaacaacagcacaaagtgtccccagcctctgagtctcctttctctgaggaagagagcagagagttcaaccccagcagctctgggcgctcagcgaggaccgttagcagcaacagcttctgctcagatgacacaggctgtcctagcagccagtcagtgtctcctgtgaagacaccctcagatgctggaaacagccccattggcttttgccctggaagtgatgaaggcttcaccagaaagaaatgcacgattggaatggttggtgaaggaagcattcagtcctctcgatataagaaggaatcaaagtcaggccttgtgaaaccaggtagtgaagctgattttagctcctcgagcagcacaggcagcatttccgctcctgaggtccatatgtcgactgcgggaagcaagcggtcttcttcttcacgcaatcgaggtcctcatgggcggagtaatggagcttcgtcacacaagcctggcagcagcccatcatccccgcgggaaaaggaccttctgtccatgctgtgcaggaatcagctgagccctgtcaatatccatcccagttatgcaccttcttccccaagcagtagcaactcaggctcctacaaaggaagcgactgtagccccatcatgaggcgttctggaaggtacatgtcttgcggtgaaaatcatggtgtcagacccccaaacccagagcagtatttgactccactgcagcagaaagaggtgacagtgagacacctcaaaaccaagctgaaggaatctgagcgccgactccatgaaagggaaagtgaaatcgtggagcttaagtcccagctggcccgcatgcgagaggactggattgaggaggagtgtcaccgggtagaggcccagttggcactcaaagaagccaggaaagagattaaacagctcaaacaggtcatcgaaaccatgcggagcagcttggctgataaagataaaggcattcagaaatattttgtggacataaacatccaaaacaagaagctggagtctctccttcagagcatggagatggcacacagtggctctctgagggacgaactgtgcctagactttccatgtgattccccagagaagagcttaaccctcaacccccctcttgacacaatggcagatgggttatctctggaagagcaggtcacgggggaaggggctgacagggagctactggtaggagatagcatagccaacagcacagatttgttcgatgagatagtgacagccaccaccacagaatctggtgacctggagcttgtgcattccacccctggggctaacgtcctggagctgctgcccatagtcatgggtcaggaggagggcagtgtggtggtggagcgagccgttcagaccgacgtggtgccctacagcccagccatctcagagctcattcagagtgtgctgcagaagctccaggacccctgtccctcgagcttggcgtcccctgatgagtctgaaccagactcgatggagagcttcccagagtccctctctgccttagtggttgatttaactccaagaaatccaaactcagccatccttttgtctcccgtggagaccccctacgccaatgtggatgcagaagttcatgcaaaccgcctcatgagagagctggattttgcagcctgcgtggaagagaggttggatggtgtcatcccactggctcgcgggggcgtcgtgaggcagtactggagcagcagcttcctggtggatctcctggctgtggctgcccccgtggtccccacggttctgtgggcattcagtactcagagagggggaacggatcctgtgtataacatcggggccttgctcaggggctgttgcgtggttgccctgcattcgctccgccgcaccgccttccgtatcaaaacctaaatagaagttgttgttaccgtgtgccaatgtgtcccatgtgggttgtgccaggtagagaaacaggaagtcaatcatctgtgacagtctctattctgtcgttttgctccttggtatttgatttgcactatatttagttgaagcctgttcactgtttaaaaccggaggtatcttcaaaggcatggagacctggttccagtaaatgtcccaccagtggggtatagaaagcatgctcatgaccctgccgtgtcgtctgaggtacccgttcttatcctagtggttcaggaagagaaaacgcagtttgcactttcaagacagcttctctaaggctggcatgttatctccttgctttgctttttgccgttttaaaatgtgtaattgttccagcattccaatggtcttgtgcatagcaggggactgtaaccaaaaataaacatgtatttgtgtaattggtttgaagaagtcttgaatagctctttactgtcttacttggggttgataagatttgagtgtttgcaattttttactaaatgtagctccaaagtcttaaatggcttgtttgttcttaaactgttaattgatgaaactgtgcataagtttacaatgtactaacttattttgcttattatatatagtgttttattggaaattgtaaccacacacttcagcatgatgaaaataaagattagtgtttccatttaaataaatgttttatcctcccataaaataataattatttctgtgattttacttctatgtataagaaagacaatgaatagcagatcttacatctttatcaatagggggtctgtaaaaattgaattaaattaggaagagggaaaaagagttagttattaaagaaaatgaagatttcctacccttacttaaaaagcatcatttctgaataaaagtagatttgtttacttttaaa

SEQ ID NO: 30761 - DNA, 582 bp, Homo sapiens
  source 1..582: mol_type = unassigned DNA
agcattagcattctacttagaacaaagggaggtgcccggaagcagtacacattagtgcagagttttctggtttccctttaaagagaaggcacagccatttgactcttgagcttatttaaacaagtcaccagtccttgactccagaactgaagctttatatgttctttctatttggctgagccagtaatttttgattgcttcttcttcccaagaggtgcctcctcctggacggcggcagcggcggcgcgaggagccggcgggcagcggcgcgatggggcccctccgcgagagcaaggagcacagagtgcagcatcatgacaaggagatttctcgaagccgaattccccggttgattcttcggccccatatgccccaacaacagcacaaagtgtccccagcctctgagtctcctttctctgaggaagagagcagagagttcaaccccagcagctctgggcgctcagcgaggaccgttagcagcaacagcttctgctcagatgacacaggctgtcctagcagccagtcagtgtctcctgtgaagacaccctcagatgctggaaacagccccattggcttttgccc

SEQ ID NO: 30762 - DNA, 613 bp, Homo sapiens
  source 1..613: mol_type = unassigned DNA
tttctgatgcaaccccttccaagtagaatccatcgcagcctttcagatcccggaacccagaggctgtgtcggtcctgacgcactggcttggctgggctccggtgcctcctcctggacggcggcagcggcggcgcgaggagccggcgggcagcggcgcgatggggcccctccgcgagagcaagaaggagcacagagtgcagcatcatgacaaggagatttctcgaagccgaattccccggttgattcttcggccccatatgccccaacaacagcacaaagtgtccccagcctctgagtctcctttctctgaggaagagagcagagagttcaaccccagcagctctgggcgctcagcgaggaccgttagcagcaacagcttctgctcagatgacacaggctgtcctagcagccagtcagtgtctcctgtgaagacaccctcagatgctggaaacagccccattggcttttgccctggaagtgatgaaggcttcaccagaaagaaatgcacgattggaatggttggtgaaggaagcattcagtcctctcgatataagaaggaatcaaagtcaggccttgtgaaaccaggtagtgaagctgattttagctcctcgag

SEQ ID NO: 30763 - DNA, 559 bp, Homo sapiens
  source 1..559: mol_type = unassigned DNA
attttgtcctcagccccagcagccgcccggctggctgcagaggccgaggggccgagggcaccggagcgcaagggattccgcggcaccacgtgtccaagccgggctaaggcgggcggagcgggccgggcccggctccccgggcctgagcgcaaaccagcagcgacgcggggtcccgtccgcaccggcacccggcccagccggggcccggtctcccgggcgcacgtaggtgcctcctcctggacagcgcgatggggcccttctgggcgagaaagggtgcctcctcctggacggcggcagcggcggcgcgaggagccggcgggcagcggcgcgatggggcccctccgcgagagcaagaaggagcacagagtgcagcatcatgacaaggagatttctcgaagccgaattccccggttgattcttcggccccatatgccccaacaacagcacaaagtgtccccagcctctgagtctcctttctctgaggaagagagcagagagttcaaccccagcagctctgggcgctcagcgaggaccgttagcagcaacagcttctgctcag

SEQ ID NO: 30764 - DNA, 5533 bp, Homo sapiens
  source 1..5533: mol_type = unassigned DNA
ggcggcccctgcagggcagctgaagccatggaagcctccgcaggtcgctgatcagggccaggcggctgcagcagcgactgcagaggcgctgcgccaagccgggccggagtggtgcgagccggcggggctgcggagggccagtggactcagggttgttgagaggagtcaatggcataatacgggaagccccgaaccacgggccaactgggaagttgatggtcggcgagaccagcccatcctaatttggggttcctggtcctgctccaggagtcctacagcctgcagcccctaccagagagggaggactgaacagcaagggggtgtgtgggtctgagtatcagggtcctggggaagaagcaggcctggctcgtagagtagaagactcggtgccggcagtcaggaggccctgctcctgaagcctctgtgaccttgggcacggccttcactctgtctggggcacattcactcatctggagaacacagggttggactgattacttttagccactcctgacagttgtggttttaagttgggtggtgggaacctgtgcaccagccctattcaattcactggtggaggcagccgtggtctgccaggccctcgctcctggggtgtcctgccgaagggtgagaagagaagccatgccgggcagcggccccagcgagaggatgacgtggcctggcccggccctttctgcgggccccccaacccgccctctctcctcagcccccgggataccgcccatcccaccccttactcggacccacagcctcatggccatgtccctgccaggaagtagacggacctctgctggatcacgcaggcgcacctctccacctgtgagcgtgcgggatgcctacggcacctcttcgctcagcagcagcagcaattctggctcctacaagggcagtgacagcagtcccacgccaaggcgctccatgaaatacacgctgtgcagtgacaaccatggcatcaagcccccgaccccggagcagtacctgacccccctgcagcagaaggaggtgtgcatccggcacctgaaagcccggctgaaggacacacaggaccggctccaggaccgggacacagagattgatgacctgaagacgcagctgtcacgcatgcaggaggactggattgaggaggagtgccaccgcgtggaggcccagctggccctgaaggaggcccgaaaggagatcaagcagctcaagcaggtcatcgacactgtcaagaacaacctgattgacaaggacaaggggctgcagaagtacttcgtggacatcaacatccagaacaagaagctggagacgctgctgcacagcatggaggtggcccagaatggcatggccaaggaggatggcactggggagtcagccggtgggtcccctgcccgctccctcacccgcagctccacctacaccaagctgagtgacccggctgtctgtggtgaccgccagccgggtgatccctccagcggctctgctgaggatggggcagacagtggctttgcagcagccgatgacacactgagccggacggacgcgctggaagccagcagcctgctgtcgtcgggggtggactgtggcaccgaggagacctcgctgcacagctccttcggcctgggcccccgcttccctgccagcaacacctatgagaagctgctgtgtggcatggaggctggtgtgcaggccagctgcatgcaggagcgtgccatccagacagacttcgtgcagtaccagcctgaccttgacaccatcctggagaaagtgacccaggcccaggtctgtgggacagaccctgagtcaggggacaggtgcccagagctggatgcccacccttcagggcccagagaccccaactcagcagtggtggtgacagtgggtgatgagctagaggccccagagcccatcacccgtggacccaccccacagcggcctggtgccaaccccaaccctggccagtcggtgagcgtggtgtgccccatggaagaggaggaggaggctgccgtggctgagaaggagcccaagagctactggagccgccactacatcgtggatctgctggctgtggtggtgccggccgtgcccacggtggcctggctttgccgctcccagcggcgccagggccagcccatctacaacatcagctccctgctgcggggctgctgcactgtggccttgcactccatccgcaggatcagctgccgctcgctgagccagccgagtcccagcccagcgggcggcggctcccagctctgagggggcccattctggcagcggcgcctgcggcctgaccactgattgtagggatgccgttcccccctcccttctcccatgggcatcatcttatttatttagttttgggtgtggaactgtttctttttttcaagatgttaaaacagtcccgtggaaggagcaggggttggagaaaggcatcccaaagcttcgatggagagcagggaagggggacccaaggcaggaggtacaccagctggacaaattgcagggaggggagggagcgagggccaacccggcccctctgtccccttggctcttcagacagggccagccctgctcaggaagtctctggctgtcttcatgtggggaagccgggcttgagttgcccataggcccctgccctgcaccatcctgtccagtgccctgcgcactccatgccgtctcttccaagccaccttgcccgcagcccaggctcctgggccagtgctctctcctcaaatggaggcagccatggcctgaagtgcagatcactgacccagggctcagagcagaggccagaaccactgggccggccggcattccagcctccccagactgctgcccaccttgggactcaggagctcagtcaaggccacaggctggaggagagacggggctgggcgcaaggtggcggagggcagtgtgggttctgtgtctgtctgttcatcccaggctttcccgtcatccctttcctcttggcacttctgggtgtgtcagtcattattcctgtgaggtagctaagcccggcaagctcagtgctggggtaggagggcctgcctgagtcccagctcccagctggagaatccaccagcacaagaagaggaggcaggggcagaaacccaagggggctcccccagccttccaaggtgaggccatctcatctgcaggctgggaggcagggctggactcaggaacccacagcttactgaaaaagccagaggccatgactgcccccagaaacttgccccgagtttctctggggccctcgggcccaacttctgctttgcactatgttcactttggggttggttctcagccatccaagggtctccagtgaggtggctgcttgctgtctgagatgagggttcctaaaccttaaacctctctgcctctggaggagggtggggtattctggcaggatgaatcgcaggatggcgcgtactgaagccacgatgttcatccaggccaaagcagggtgtcctgggataggtttcctaggcaggggcgtggcagagcaggtaggcgccctgcagcctccctgctcccagcccaaggccagtcggcctgggaagttcactgccccaactcttttcccgggaccatactgagtcccccagccacgctgctgacattaccattattattttaccaagtaaactcactccttttcccccacaggggttacacccatctggttgtcccacccactcttcagaggctaggccccacctctgggggttggagggaccctgtgtcttactcgcccctctggcctaagggccactctggttatctgccaaggttgcttgccctcaccccaatgctccaacagccattgcctaactcatgggctctgcccttctgctcggtgccctccacgtgaggcggggcacctgcatgcactgggagggggcggctggcccagccctcggggcaggagccccctctgccacacgctttgtgcctccaaagctccccccgccttggtcagggcctcagaccagccaacctttgtggaataagccccagcccagccaaaccaaacccagatgcctgaggcctggctggggctgcccccgcaggacactgtggccatgccacggagggggcagtggacaaaaccaatccaaagccaagccgggactggctgcggacccagcctcctgtgccgcgcactcacggagctgcgtagtctcctcagacatagtcaaagctttgccgagaaaagaaatgtatgaactatatttgacaacataaaatctctctatttttcaccactggaatttagtcaagcttcaggcccctctgctcctgtctgtgtcttgcgtctgtggccttcctattgtgtcttgtgttttggtggatgtgacagggctggggccacagtctactctgtctctgctgctagagaagccacctgtggaggactgggctgtggttgggcctgaggcctgtggaggaggtgagtgtagccagcagcggccgtctactcctgttctggcctgagaccaccggtgtgggtcacgagggccctggcccacagtgttgagggtcctctctttcgggggctctcctggggccttcgatgggcttttcttcttgtcagtggagggagcagctccccactcagccctgggacaggccctgggactgtggtggccggtggccctggcccagctctggagtgcatgtgtgtgtgctcagatcccgcatctatgcaaaggtgcaggctgcctgtgaggctccaggcggtggaggtgcggcagctgctgctcaggtgccatgccctgaagaggcagggtacacatggggctgggagggcaaagatggggcggggcctccccctgagagagctcaccctccacagtgacccttttccttcctgcctaatacctcctcccgttgggctgtgacttttcctcctgccctcagcctctgaaacagaaatctttggggcctcccctttccccagcgtctggcaagagctgatgaggtcctgaggaacagtgtccccaggaaccaccttctggagcctagcggccagacgtggcttctcctgagttctagggctcgggccagagtggcactactgcccggccagtccaggctcaggcaggaatcggacgctggggcccgggctctgcacagagagctgggcttgagtggagtttattgtagatttctcccaaggggatcacttagcttctcactgacacacccttcccaattgccacaagcgcaggggtatcttacagcactttggggaggggtgggacaaactgcaaggttctggggccaaggcctacccaggggcctctgcccagagaactcacaaccccctctctgacctgggggacaatgcaaacaggtcacagtgcattcccatattaggccatccccttcacgaagaattcaggggatgtgggaagtggggaggcggggagggatcttgactcttgtctcctttgtccttttgttcagacagagttgtacctgcagcagacaactctgaattaaagcatgaaaacacagcaag

SEQ ID NO: 30765 - DNA, 4995 bp, Homo sapiens
  source 1..4995: mol_type = unassigned DNA
cagctagccgcctcctgcaggggctcgggagagcaattcggcggcccctgcagggcagctgaagccatggaagcctccgcaggtcgctgatcagggccaggcggctgcagcagcgactgcagaggcgctgcgccaagccgggccggagtggtgcgagccggcggggctgcggagggccagtggactcagcccccgggataccgcccatcccaccccttactcggacccacagcctcatggccatgtccctgccaggaagtagacggacctctgctggatcacgcaggcgcacctctccacctgtgagcgtgcgggatgcctacggcacctcttcgctcagcagcagcagcaattctggctcctacaagggcagtgacagcagtcccacgccaaggcgctccatgaaatacacgctgtgcagtgacaaccatggcatcaagcccccgaccccggagcagtacctgacccccctgcagcagaaggaggtgtgcatccggcacctgaaagcccggctgaaggacacacaggaccggctccaggaccgggacacagagattgatgacctgaagacgcagctgtcacgcatgcaggaggactggattgaggaggagtgccaccgcgtggaggcccagctggccctgaaggaggcccgaaaggagatcaagcagctcaagcaggtcatcgacactgtcaagaacaacctgattgacaaggacaaggggctgcagaagtacttcgtggacatcaacatccagaacaagaagctggagacgctgctgcacagcatggaggtggcccagaatggcatggccaaggaggatggcactggggagtcagccggtgggtcccctgcccgctccctcacccgcagctccacctacaccaagctgagtgacccggctgtctgtggtgaccgccagccgggtgatccctccagcggctctgctgaggatggggcagacagtggctttgcagcagccgatgacacactgagccggacggacgcgctggaagccagcagcctgctgtcgtcgggggtggactgtggcaccgaggagacctcgctgcacagctccttcggcctgggcccccgcttccctgccagcaacacctatgagaagctgctgtgtggcatggaggctggtgtgcaggccagctgcatgcaggagcgtgccatccagacagacttcgtgcagtaccagcctgaccttgacaccatcctggagaaagtgacccaggcccaggtctgtgggacagaccctgagtcaggggacaggtgcccagagctggatgcccacccttcagggcccagagaccccaactcagcagtggtggtgacagtgggtgatgagctagaggccccagagcccatcacccgtggacccaccccacagcggcctggtgccaaccccaaccctggccagtcggtgagcgtggtgtgccccatggaagaggaggaggaggctgccgtggctgagaaggagcccaagagctactggagccgccactacatcgtggatctgctggctgtggtggtgccggccgtgcccacggtggcctggctttgccgctcccagcggcgccagggccagcccatctacaacatcagctccctgctgcggggctgctgcactgtggccttgcactccatccgcaggatcagctgccgctcgctgagccagccgagtcccagcccagcgggcggcggctcccagctctgagggggcccattctggcagcggcgcctgcggcctgaccactgattgtagggatgccgttcccccctcccttctcccatgggcatcatcttatttatttagttttgggtgtggaactgtttctttttttcaagatgttaaaacagtcccgtggaaggagcaggggttggagaaaggcatcccaaagcttcgatggagagcagggaagggggacccaaggcaggaggtacaccagctggacaaattgcagggaggggagggagcgagggccaacccggcccctctgtccccttggctcttcagacagggccagccctgctcaggaagtctctggctgtcttcatgtggggaagccgggcttgagttgcccataggcccctgccctgcaccatcctgtccagtgccctgcgcactccatgccgtctcttccaagccaccttgcccgcagcccaggctcctgggccagtgctctctcctcaaatggaggcagccatggcctgaagtgcagatcactgacccagggctcagagcagaggccagaaccactgggccggccggcattccagcctccccagactgctgcccaccttgggactcaggagctcagtcaaggccacaggctggaggagagacggggctgggcgcaaggtggcggagggcagtgtgggttctgtgtctgtctgttcatcccaggctttcccgtcatccctttcctcttggcacttctgggtgtgtcagtcattattcctgtgaggtagctaagcccggcaagctcagtgctggggtaggagggcctgcctgagtcccagctcccagctggagaatccaccagcacaagaagaggaggcaggggcagaaacccaagggggctcccccagccttccaaggtgaggccatctcatctgcaggctgggaggcagggctggactcaggaacccacagcttactgaaaaagccagaggccatgactgcccccagaaacttgccccgagtttctctggggccctcgggcccaacttctgctttgcactatgttcactttggggttggttctcagccatccaagggtctccagtgaggtggctgcttgctgtctgagatgagggttcctaaaccttaaacctctctgcctctggaggagggtggggtattctggcaggatgaatcgcaggatggcgcgtactgaagccacgatgttcatccaggccaaagcagggtgtcctgggataggtttcctaggcaggggcgtggcagagcaggtaggcgccctgcagcctccctgctcccagcccaaggccagtcggcctgggaagttcactgccccaactcttttcccgggaccatactgagtcccccagccacgctgctgacattaccattattattttaccaagtaaactcactccttttcccccacaggggttacacccatctggttgtcccacccactcttcagaggctaggccccacctctgggggttggagggaccctgtgtcttactcgcccctctggcctaagggccactctggttatctgccaaggttgcttgccctcaccccaatgctccaacagccattgcctaactcatgggctctgcccttctgctcggtgccctccacgtgaggcggggcacctgcatgcactgggagggggcggctggcccagccctcggggcaggagccccctctgccacacgctttgtgcctccaaagctccccccgccttggtcagggcctcagaccagccaacctttgtggaataagccccagcccagccaaaccaaacccagatgcctgaggcctggctggggctgcccccgcaggacactgtggccatgccacggagggggcagtggacaaaaccaatccaaagccaagccgggactggctgcggacccagcctcctgtgccgcgcactcacggagctgcgtagtctcctcagacatagtcaaagctttgccgagaaaagaaatgtatgaactatatttgacaacataaaatctctctatttttcaccactggaatttagtcaagcttcaggcccctctgctcctgtctgtgtcttgcgtctgtggccttcctattgtgtcttgtgttttggtggatgtgacagggctggggccacagtctactctgtctctgctgctagagaagccacctgtggaggactgggctgtggttgggcctgaggcctgtggaggaggtgagtgtagccagcagcggccgtctactcctgttctggcctgagaccaccggtgtgggtcacgagggccctggcccacagtgttgagggtcctctctttcgggggctctcctggggccttcgatgggcttttcttcttgtcagtggagggagcagctccccactcagccctgggacaggccctgggactgtggtggccggtggccctggcccagctctggagtgcatgtgtgtgtgctcagatcccgcatctatgcaaaggtgcaggctgcctgtgaggctccaggcggtggaggtgcggcagctgctgctcaggtgccatgccctgaagaggcagggtacacatggggctgggagggcaaagatggggcggggcctccccctgagagagctcaccctccacagtgacccttttccttcctgcctaatacctcctcccgttgggctgtgacttttcctcctgccctcagcctctgaaacagaaatctttggggcctcccctttccccagcgtctggcaagagctgatgaggtcctgaggaacagtgtccccaggaaccaccttctggagcctagcggccagacgtggcttctcctgagttctagggctcgggccagagtggcactactgcccggccagtccaggctcaggcaggaatcggacgctggggcccgggctctgcacagagagctgggcttgagtggagtttattgtagatttctcccaaggggatcacttagcttctcactgacacacccttcccaattgccacaagcgcaggggtatcttacagcactttggggaggggtgggacaaactgcaaggttctggggccaaggcctacccaggggcctctgcccagagaactcacaaccccctctctgacctgggggacaatgcaaacaggtcacagtgcattcccatattaggccatccccttcacgaagaattcaggggatgtgggaagtggggaggcggggagggatcttgactcttgtctcctttgtccttttgttcagacagagttgtacctgcagcagacaactctgaattaaagcatgaaaacacagcaag

SEQ ID NO: 30766 - DNA, 1926 bp, Homo sapiens
  source 1..1926: mol_type = unassigned DNA
cgcggcggcgcggagctcgggcggccgtggaggaactcagcctcggccgcaggaggcgccgggagcggagccgccgggagtcgcgcaacaggtttccttctccatcgctgcgcccacaggggacgcgcgccctgccgggagaggggcttctcggttcgcactctcgctcccagtccaggcaaaatgaaagaccggctagcagaacttctggacttgtccaagcaatatgaccagcagttcccagacggggacgatgagtttgactcgccccacgaggacatcgtgttcgagacggaccacatcctggagtccctgtaccgagacatccgggacattcaggatgaaaaccagctgctggtggccgacgtgaagcggctgggaaagcagaacgcccgcttcctcacgtccatgcggcgcctcagcagcatcaagcgcgacaccaactccatcgccaaggccatcaaggcccggggcgaggtcatccactgcaagctgcgcgccatgaaggagctgagcgaggcggctgaggcccagcacggcccgcactcggcagtggcgcgcatttcgcgggcgcagtacaacgcgctcaccctcaccttccagcgcgccatgcacgactacaaccaggccgagatgaagcagcgcgacaactgcaagatccgcatccagcgccagctggagatcatgggcaaggaagtctcgggcgaccagatcgaggacatgttcgagcagggtaagtgggacgtgttttccgagaacttgctggccgacgtgaagggcgcgcgggccgccctcaacgagatcgagagccgccaccgcgaactgctgcgcctggagagccgcatccgcgacgtacacgagctcttcttgcagatggcggtgctggtggagaagcaggccgacaccctgaacgtcatcgagctcaacgtacaaaagacggtcgactacaccggccaggccaaggcgcaggtgcggaaggccgtgcagtacgaggagaagaacccctgccggaccctctgctgcttctgctgtccctgcctcaagtagcaggccggcccgggccgccaccgcccatcccagaccatggagcgcgctgggaaggacgcaccaaagccgggagctctgccctgcagggagttgccccaaccctttccggaactcagtctttagaaaagaaacgccaggttcaagaattgcaaaccagcctgtgcttggaaagatggttagttgataccgtccgatgattcttcagtaaagatagattcccacaaagttgtgcaatgtcattatatgacaccttgcactcttaccgtcttgacagaagccaagtaaggaactgaagttgtatctgactgtagggtgaatgtctgaggcctgcctcctaataaagactcaaggaggaagtcaattgggcatctgctaatagaatgaactcatgatggaaacttcagttcatttactttgtcctgaaaattccctggttctgttccattttgagcgaaattggccttgggaaaaaccacgttcttcctttccgattcttcatccggtctacgctatgcaattcctccccaaatatagatcttatttctgctcatttcccctacttattaaaatcacaccaaacacttactattttcttatctctttcactttttaaatatctttcaccaggttatattttggtattatttttccaaacatttttaagcactgaatatcgaacaagcactcaaattgaagtatcagtcatgttttgtgtatttttcgctgataaaaattatttaacatttatatttttacttgattacatatgcacatgtatgtaaatgtaaaatactaatattcactaatatatgtacataatgatcaattggtttaacttcttttatgtaagtatggtatataaatttcaagacgaacact

SEQ ID NO: 30767 - DNA, 785 bp, Homo sapiens
  source 1..785: mol_type = unassigned DNA
agctgcagtcagatccggggatggagggagccggagaagaggagtgagaaggccggggaggcaggccctgctgtcttcctgcaggccggcagcctgctggcagtggaggaccaggccgtccaggaaaggaaggggtcaggagctgttagccgagcaacttgctgatgaccgtatggcactggtgtcaggcatcagcttagatccagaagcagcgattggtgtgacaaaacggccacctcctaagtgggtggatggagtggatgaaattcagtatgatgttggccggattaagcagaagatgaaagaattggccagccttcatgacaagcatttaaacagacccaccctggatgacagcagcgaagaggaacatgccattgagataactacccaagagatcactcagctcttccacaggtgccagcgtgccgtgcaggccctgccgagccgggcccgggcctgctccgagcaggaggggcggctgcttgggaacgtggtggcctcgctggcgcaggccctgcaggaactctccaccagcttccggcacgcacagtcaggctacctcaaacgcatgaagaatcgagaggaaagatcccagcattttttcgacacatcagtaccactaatggatgatggagacgataacactctttaccatcggggttttacagaggaccagttagttctggtggagcagaacacactgatggtggaagagcgggaacgagagattcgccagattgtacagtccatttctgacctgaatgaaatattcagggacttag

SEQ ID NO: 30768 - DNA, 4897 bp, Homo sapiens
  source 1..4897: mol_type = unassigned DNA
gagctgcagtcagatccggggatggagggagccggagaagaggagtgagaaggccggggaggcaggccctgctgtcttcctgcaggccggcagcctgctggcagtggaggaccaggccgtccaggaaaggaaggggtcaggaggtcgggcagggcctcagcaggttcagacaagtccccagaagggagctgcaggcgccctcgagtccaggccccaagcctggctccggttgtccaaagagggcctaggccaggcctctggtgcggaaactgagtcacagccagacctcagggcacggcctagacgcttacgagccaaagttaggggtagagagcagagacctccggggggtctcagggagtagggggcttcagggcctcccagtctagagccggattggcgagttagacgcttgtagatccaaggttggattggggtggggtctctgggacgttggatcgctacgcaaggattggggggattcaagtgcttagagatcgaagtctgccctgggtagggggagtcagacaattggaaagcctaggtagttatttggggaggggtctctacgccttggcgaagcgcacagctgcatctttttggcttgaggcctgaggccttgtcgagaagcttccgtgaaagggtgggccagccgggccacgagaaagaaagtgaataaatcaggaatataagtgggcggggggcccctgagaggggggtcgcaaagggtgagacatggccaccaggcgtttaaccgacgctttcttgttgttgcggaataattccatccaaaaccggcagctgttagccgagcaagagctggacgagcttgctgatgaccgtatggcactggtgtcaggcatcagcttagatccagaagcagcgattggtgtgacaaaacggccacctcctaagtgggtggatggagtggatgaaattcagtatgatgttggccggattaagcagaagatgaaagaattggccagccttcatgacaagcatttaaacagacccaccctggatgacagcagcgaagaggaacatgccattgagataactacccaagagatcactcagctcttccacaggtgccagcgtgccgtgcaggccctgccgagccgggcccgggcctgctccgagcaggaggggcggctgcttgggaacgtggtggcctcgctggcgcaggccctgcaggaactctccaccagcttccggcacgcacagtcaggctacctcaaacgcatgaagaatcgagaggaaagatcccagcattttttcgacacatcagtaccactaatggatgatggagacgataacactctttaccatcggggttttacagaggaccagttagttctggtggagcagaacacactgatggtggaagagcgggaacgagagattcgccagattgtacagtccatttctgacctgaatgaaatattcagggacttaggggcgatgattgtagaacagggtacagtccttgacagaattgactataacgttgaacagtcctgtatcaaaactgaagatggtttgaaacagcttcacaaggcagaacagtatcaaaagaagaatcggaagatgcttgtgattttaatattatttgtcatcatcattgtgctcattgttgtcctcgttggcgtgaagtctcgataagtggcattgggttttcgtgtgtgccgcgcgtgtggatctcccgggtgtgaggggcttggcctgcgccccgccagctgcccgcagaggtgcagcctcgaggaatctgagggcgtcggggcagcgaacctttgcatccacggactcctccttccctagtcctgctcaagcggtccggggaatgggtttttgtttttccttcattgttgagaatttaaggacctttgatactgctgcacaatagagattgagttctgggatcagttataatatatattttttttagaaagagaaaatgagctgagagtttacaggcactgcagaagctgttcagtattatatgtgtatatgctatttttttagcagccatgtctgagcagaatgttaacataatttttggaaaaattttctttaaaccatctggtttttaagaaatttggtaccaaaaattgatgagtagaggcaaaaatgccccttcatctttctctatatattttccagttgaaaacaaactaagaagtcctttaagaatttataatccgttccccattaacttaatttagcttttccatcactgttaatgatcagagtaacaaagtgtgaaaaataagaaaccatcattgatgttaattaacacatttagatgggccagttaaaacagcttcataagttttaaattaattgtaaatggaatattcctcatttaaaatttttgcactgcattttctactgtaaaccaaaagaggttactaagcaaaaccacctaaatttaagttggtgatttaaatgaatctcacattaaaagaaagcttgacagtgttatgaaagccaccagactcagccagtgtgtccccatgggtatccccagccatccttgctcaatccattacttatatactaactacataatgacctgttcaaaccagactctatttaatgaactgtgaatttacacagaggccattttaaatgggtcaccccatttaggattagtggatctcaaattattaaccaaacatcactccatttcaaagtaaaatattccaccagcgatttgatttattggctcttccattgccactgagcaatgcccaggaagcaggcacattgccaaggactgggggcatcttgactaggaagctcctcgtttgtgtgagcgtgggtcagaccgccaaagtaggacttcatcgtttacctacctattatcaatatggtgcttgaatatattcctataactgtagaacagtgtggaaagtgatggtaactttgaagttgttcatgttttattggctttgttttaattgacactagtagagttttaatggtctttgtgtaaattttaatggcttttccattgtttttgcttctcttaaaaagtttaagaagaatatgacctcattaaatgtgctgttttatttggaccagtcacacaaaatgtctctctagagttgactttaaagttgtttacagaaatttaaactcaattccagagattgaagttgtccaaacagctcatgggcttagtgtccaaacccctgcccagccttccctttccaagttggtgccacctccaggtagccattggtggttttcctattactgatgtggctgtggaatgataaggtcctagaggggccctggcatttcaggaagcggacctggtattccctgacaaacattgcttaggaaagagggccggagaataagaagccagcacctcatcagtcagccctgcaatgtgagacttccgtagctgttgagagtcactgcaggtgttctttcatcccatctgattttaacccatggttgagacgttccaagttagatctgctgctcttaggtgtggggctgtccacattagggaacttgcctcaaaaacagtccacagtggcaataccggacttctgttcaagctttttaaagtgctgagccttacaaacccctgaaggaaagtgaccctttaagagaggatcatctttttttatatttattttcaccaaatagggtgatgagggttggtttttgttccctcaacccatttgggtaaaataacggatctgattagaaactgttttaaggaggggctgggctcggtggctcacgcctgtaatcccagactttgagaggccaaggcggtcacgaggtcaggagttcgagaccagcctagccaacatggtgaaaccccgtctctacaaaaaatacaaaaattagccgggtgggacacgcctgtaatcccagctactcaagaggctgaggcaggagaatagcttgaacccgggaggcagaggttgcagtgagccgagatcacaccactgcactccagcctgggtgacagagcgaggctccgtctcaaaaaaaaaaaaaaaaaattgttttagcgctgggtttcccaaggtgggagagacagacccagcctggagctggcccctggcctgtgtgctgacttcttggggtcctcaaaccactgtatttttctgttgagcctgtacttggggagagatcagtagcatttgaggaagtaagagaaaagaatcatggtacctcagggtttctttccctttactcgctggcagccattgtctgtgggcacctcatgtttttccacactctactgggccgtggaggtaacgatcacccaggccagtctcctctgcctgggatgcgccctctgagaggaggcctagcagggcaggctccctctgggcatccctggatgcagcctctggacacatgcctcctttaaagtgtccgggtgcagctcaggttgagtggaggtagaaggagaaacagacatgtttaccacgcgttttccaaagctcctgatctttcccaagattgtaactgaaaactgctgtctcttgttttgttcgttttgggggtggtggtgctggctgggccatgcttgtgaagtgatgtgtgtctctgatttaacggattcactgttttctctgctaattgagagagcgttatttacattatttatttgttttgacacaagtgctttcagtgttttatcctagctaatggcttcttaaaggtaataaaacccttccaacgtaattggtcagataaaactttttttcttgtatgcttaaataaagcaattagtgaagcacttctatccaaaatgacttttttgtccttttttaaaaccaatttactgttactggaaactttttgtacaataaagcaatcacgcagattaaagaacatcctgcaatcctagtattaattttaa

SEQ ID NO: 30769 - DNA, 4329 bp, Homo sapiens
  source 1..4329: mol_type = unassigned DNA
aggcctgaggccttgtcgagaagcttccgtgaaagggtgggccagccgggccacgagaaagaaagtgaataaatcaggaatataagtgggcggggggcccctgagaggggggtcgcaaagggtgagacatggccaccaggcgtttaaccgacgctttcttgttgttgcggaataattccatccaaaaccggcagctgttagccgagcaagtgagtagtcacatcacctccagccctctgcattcacgtagcattgctgcgcttgctgatgaccgtatggcactggtgtcaggcatcagcttagatccagaagcagcgattggtgtgacaaaacggccacctcctaagtgggtggatggagtggatgaaattcagtatgatgttggccggattaagcagaagatgaaagaattggccagccttcatgacaagcatttaaacagacccaccctggatgacagcagcgaagaggaacatgccattgagataactacccaagagatcactcagctcttccacaggtgccagcgtgccgtgcaggccctgccgagccgggcccgggcctgctccgagcaggaggggcggctgcttgggaacgtggtggcctcgctggcgcaggccctgcaggaactctccaccagcttccggcacgcacagtcaggctacctcaaacgcatgaagaatcgagaggaaagatcccagcattttttcgacacatcagtaccactaatggatgatggagacgataacactctttaccatcggggttttacagaggaccagttagttctggtggagcagaacacactgatggtggaagagcgggaacgagagattcgccagattgtacagtccatttctgacctgaatgaaatattcagggacttaggggcgatgattgtagaacagggtacagtccttgacagaattgactataacgttgaacagtcctgtatcaaaactgaagatggtttgaaacagcttcacaaggcagaacagtatcaaaagaagaatcggaagatgcttgtgattttaatattatttgtcatcatcattgtgctcattgttgtcctcgttggcgtgaagtctcgataagtggcattgggttttcgtgtgtgccgcgcgtgtggatctcccgggtgtgaggggcttggcctgcgccccgccagctgcccgcagaggtgcagcctcgaggaatctgagggcgtcggggcagcgaacctttgcatccacggactcctccttccctagtcctgctcaagcggtccggggaatgggtttttgtttttccttcattgttgagaatttaaggacctttgatactgctgcacaatagagattgagttctgggatcagttataatatatattttttttagaaagagaaaatgagctgagagtttacaggcactgcagaagctgttcagtattatatgtgtatatgctatttttttagcagccatgtctgagcagaatgttaacataatttttggaaaaattttctttaaaccatctggtttttaagaaatttggtaccaaaaattgatgagtagaggcaaaaatgccccttcatctttctctatatattttccagttgaaaacaaactaagaagtcctttaagaatttataatccgttccccattaacttaatttagcttttccatcactgttaatgatcagagtaacaaagtgtgaaaaataagaaaccatcattgatgttaattaacacatttagatgggccagttaaaacagcttcataagttttaaattaattgtaaatggaatattcctcatttaaaatttttgcactgcattttctactgtaaaccaaaagaggttactaagcaaaaccacctaaatttaagttggtgatttaaatgaatctcacattaaaagaaagcttgacagtgttatgaaagccaccagactcagccagtgtgtccccatgggtatccccagccatccttgctcaatccattacttatatactaactacataatgacctgttcaaaccagactctatttaatgaactgtgaatttacacagaggccattttaaatgggtcaccccatttaggattagtggatctcaaattattaaccaaacatcactccatttcaaagtaaaatattccaccagcgatttgatttattggctcttccattgccactgagcaatgcccaggaagcaggcacattgccaaggactgggggcatcttgactaggaagctcctcgtttgtgtgagcgtgggtcagaccgccaaagtaggacttcatcgtttacctacctattatcaatatggtgcttgaatatattcctataactgtagaacagtgtggaaagtgatggtaactttgaagttgttcatgttttattggctttgttttaattgacactagtagagttttaatggtctttgtgtaaattttaatggcttttccattgtttttgcttctcttaaaaagtttaagaagaatatgacctcattaaatgtgctgttttatttggaccagtcacacaaaatgtctctctagagttgactttaaagttgtttacagaaatttaaactcaattccagagattgaagttgtccaaacagctcatgggcttagtgtccaaacccctgcccagccttccctttccaagttggtgccacctccaggtagccattggtggttttcctattactgatgtggctgtggaatgataaggtcctagaggggccctggcatttcaggaagcggacctggtattccctgacaaacattgcttaggaaagagggccggagaataagaagccagcacctcatcagtcagccctgcaatgtgagacttccgtagctgttgagagtcactgcaggtgttctttcatcccatctgattttaacccatggttgagacgttccaagttagatctgctgctcttaggtgtggggctgtccacattagggaacttgcctcaaaaacagtccacagtggcaataccggacttctgttcaagctttttaaagtgctgagccttacaaacccctgaaggaaagtgaccctttaagagaggatcatctttttttatatttattttcaccaaatagggtgatgagggttggtttttgttccctcaacccatttgggtaaaataacggatctgattagaaactgttttaaggaggggctgggctcggtggctcacgcctgtaatcccagactttgagaggccaaggcggtcacgaggtcaggagttcgagaccagcctagccaacatggtgaaaccccgtctctacaaaaaatacaaaaattagccgggtgggacacgcctgtaatcccagctactcaagaggctgaggcaggagaatagcttgaacccgggaggcagaggttgcagtgagccgagatcacaccactgcactccagcctgggtgacagagcgaggctccgtctcaaaaaaaaaaaaaaaaaattgttttagcgctgggtttcccaaggtgggagagacagacccagcctggagctggcccctggcctgtgtgctgacttcttggggtcctcaaaccactgtatttttctgttgagcctgtacttggggagagatcagtagcatttgaggaagtaagagaaaagaatcatggtacctcagggtttctttccctttactcgctggcagccattgtctgtgggcacctcatgtttttccacactctactgggccgtggaggtaacgatcacccaggccagtctcctctgcctgggatgcgccctctgagaggaggcctagcagggcaggctccctctgggcatccctggatgcagcctctggacacatgcctcctttaaagtgtccgggtgcagctcaggttgagtggaggtagaaggagaaacagacatgtttaccacgcgttttccaaagctcctgatctttcccaagattgtaactgaaaactgctgtctcttgttttgttcgttttgggggtggtggtgctggctgggccatgcttgtgaagtgatgtgtgtctctgatttaacggattcactgttttctctgctaattgagagagcgttatttacattatttatttgttttgacacaagtgctttcagtgttttatcctagctaatggcttcttaaaggtaataaaacccttccaacgtaattggtcagataaaactttttttcttgtatgcttaaataaagcaattagtgaagcacttctatccaaaatgacttttttgtccttttttaaaaccaatttactgttactggaaactttttgtacaataaagcaatcacgcagattaaagaacatcctgcaatcctagtattaattttaa

SEQ ID NO: 30770 - DNA, 999 bp, Homo sapiens
  source 1..999: mol_type = unassigned DNA
agatccggggatggagggagccggagaagaggagtgagaaggccggggaggcaggccctgctgtcttcctgcaggccggcagcctgctggcagtggaggaccaggccgtccaggaaaggaaggggtcaggaggtcgggcagggcctcagcagctgttagccgagcaagtgagtagtcacatcacctccagccctctgcattcacgtagcattgctgcggagctggacgagcttgctgatgaccgtatggcactggtgtcaggcatcagcttagatccagaagcagcgattggtgtgacaaaacggccacctcctaagtgggtggatggagtggatgaaattcagtatgatgttggccggattaagcagaagatgaaagaattggccagccttcatgacaagcatttaaacagacccaccctggatgacagcagcgaagaggaacatgccattgagataactacccaagagatcactcagctcttccacaggtgccagcgtgccgtgcaggccctgccgagccgggcccgggcctgctccgagcaggaggggcggctgcttgggaacgtggtggcctcgctggcgcaggccctgcaggaactctccaccagcttccggcacgcacagtcaggctacctcaaacgcatgaagaatcgagaggaaagatcccagcattttttcgacacatcagtaccactaatggatgatggagacgataacactctttaccatcggggttttacagaggaccagttagttctggtggagcagaacacactgatggtggaagagcgggaacgagagattcgccagattgtacagtccatttctgacctgaatgaaatattcagggacttaggggcgatgattgtagaacagggtacagtccttgacagaattgactataacgttgaacagtcctgtatcaaaactgaagatggtttgaaacagcttcacaaggcagaacagtatcaaaagaagaatcggaagatgcttgtga

SEQ ID NO: 30771 - DNA, 4897 bp, Homo sapiens
  source 1..4897: mol_type = unassigned DNA
gagctgcagtcagatccggggatggagggagccggagaagaggagtgagaaggccggggaggcaggccctgctgtcttcctgcaggccggcagcctgctggcagtggaggaccaggccgtccaggaaaggaaggggtcaggaggtcgggcagggcctcagcaggttcagacaagtccccagaagggagctgcaggcgccctcgagtccaggccccaagcctggctccggttgtccaaagagggcctaggccaggcctctggtgcggaaactgagtcacagccagacctcagggcacggcctagacgcttacgagccaaagttaggggtagagagcagagacctccggggggtctcagggagtagggggcttcagggcctcccagtctagagccggattggcgagttagacgcttgtagatccaaggttggattggggtggggtctctgggacgttggatcgctacgcaaggattggggggattcaagtgcttagagatcgaagtctgccctgggtagggggagtcagacaattggaaagcctaggtagttatttggggaggggtctctacgccttggcgaagcgcacagctgcatctttttggcttgaggcctgaggccttgtcgagaagcttccgtgaaagggtgggccagccgggccacgagaaagaaagtgaataaatcaggaatataagtgggcggggggcccctgagaggggggtcgcaaagggtgagacatggccaccaggcgtttaaccgacgctttcttgttgttgcggaataattccatccaaaaccggcagctgttagccgagcaacagttatcaaaacttgctgatgaccgtatggcactggtgtcaggcatcagcttagatccagaagcagcgattggtgtgacaaaacggccacctcctaagtgggtggatggagtggatgaaattcagtatgatgttggccggattaagcagaagatgaaagaattggccagccttcatgacaagcatttaaacagacccaccctggatgacagcagcgaagaggaacatgccattgagataactacccaagagatcactcagctcttccacaggtgccagcgtgccgtgcaggccctgccgagccgggcccgggcctgctccgagcaggaggggcggctgcttgggaacgtggtggcctcgctggcgcaggccctgcaggaactctccaccagcttccggcacgcacagtcaggctacctcaaacgcatgaagaatcgagaggaaagatcccagcattttttcgacacatcagtaccactaatggatgatggagacgataacactctttaccatcggggttttacagaggaccagttagttctggtggagcagaacacactgatggtggaagagcgggaacgagagattcgccagattgtacagtccatttctgacctgaatgaaatattcagggacttaggggcgatgattgtagaacagggtacagtccttgacagaattgactataacgttgaacagtcctgtatcaaaactgaagatggtttgaaacagcttcacaaggcagaacagtatcaaaagaagaatcggaagatgcttgtgattttaatattatttgtcatcatcattgtgctcattgttgtcctcgttggcgtgaagtctcgataagtggcattgggttttcgtgtgtgccgcgcgtgtggatctcccgggtgtgaggggcttggcctgcgccccgccagctgcccgcagaggtgcagcctcgaggaatctgagggcgtcggggcagcgaacctttgcatccacggactcctccttccctagtcctgctcaagcggtccggggaatgggtttttgtttttccttcattgttgagaatttaaggacctttgatactgctgcacaatagagattgagttctgggatcagttataatatatattttttttagaaagagaaaatgagctgagagtttacaggcactgcagaagctgttcagtattatatgtgtatatgctatttttttagcagccatgtctgagcagaatgttaacataatttttggaaaaattttctttaaaccatctggtttttaagaaatttggtaccaaaaattgatgagtagaggcaaaaatgccccttcatctttctctatatattttccagttgaaaacaaactaagaagtcctttaagaatttataatccgttccccattaacttaatttagcttttccatcactgttaatgatcagagtaacaaagtgtgaaaaataagaaaccatcattgatgttaattaacacatttagatgggccagttaaaacagcttcataagttttaaattaattgtaaatggaatattcctcatttaaaatttttgcactgcattttctactgtaaaccaaaagaggttactaagcaaaaccacctaaatttaagttggtgatttaaatgaatctcacattaaaagaaagcttgacagtgttatgaaagccaccagactcagccagtgtgtccccatgggtatccccagccatccttgctcaatccattacttatatactaactacataatgacctgttcaaaccagactctatttaatgaactgtgaatttacacagaggccattttaaatgggtcaccccatttaggattagtggatctcaaattattaaccaaacatcactccatttcaaagtaaaatattccaccagcgatttgatttattggctcttccattgccactgagcaatgcccaggaagcaggcacattgccaaggactgggggcatcttgactaggaagctcctcgtttgtgtgagcgtgggtcagaccgccaaagtaggacttcatcgtttacctacctattatcaatatggtgcttgaatatattcctataactgtagaacagtgtggaaagtgatggtaactttgaagttgttcatgttttattggctttgttttaattgacactagtagagttttaatggtctttgtgtaaattttaatggcttttccattgtttttgcttctcttaaaaagtttaagaagaatatgacctcattaaatgtgctgttttatttggaccagtcacacaaaatgtctctctagagttgactttaaagttgtttacagaaatttaaactcaattccagagattgaagttgtccaaacagctcatgggcttagtgtccaaacccctgcccagccttccctttccaagttggtgccacctccaggtagccattggtggttttcctattactgatgtggctgtggaatgataaggtcctagaggggccctggcatttcaggaagcggacctggtattccctgacaaacattgcttaggaaagagggccggagaataagaagccagcacctcatcagtcagccctgcaatgtgagacttccgtagctgttgagagtcactgcaggtgttctttcatcccatctgattttaacccatggttgagacgttccaagttagatctgctgctcttaggtgtggggctgtccacattagggaacttgcctcaaaaacagtccacagtggcaataccggacttctgttcaagctttttaaagtgctgagccttacaaacccctgaaggaaagtgaccctttaagagaggatcatctttttttatatttattttcaccaaatagggtgatgagggttggtttttgttccctcaacccatttgggtaaaataacggatctgattagaaactgttttaaggaggggctgggctcggtggctcacgcctgtaatcccagactttgagaggccaaggcggtcacgaggtcaggagttcgagaccagcctagccaacatggtgaaaccccgtctctacaaaaaatacaaaaattagccgggtgggacacgcctgtaatcccagctactcaagaggctgaggcaggagaatagcttgaacccgggaggcagaggttgcagtgagccgagatcacaccactgcactccagcctgggtgacagagcgaggctccgtctcaaaaaaaaaaaaaaaaaattgttttagcgctgggtttcccaaggtgggagagacagacccagcctggagctggcccctggcctgtgtgctgacttcttggggtcctcaaaccactgtatttttctgttgagcctgtacttggggagagatcagtagcatttgaggaagtaagagaaaagaatcatggtacctcagggtttctttccctttactcgctggcagccattgtctgtgggcacctcatgtttttccacactctactgggccgtggaggtaacgatcacccaggccagtctcctctgcctgggatgcgccctctgagaggaggcctagcagggcaggctccctctgggcatccctggatgcagcctctggacacatgcctcctttaaagtgtccgggtgcagctcaggttgagtggaggtagaaggagaaacagacatgtttaccacgcgttttccaaagctcctgatctttcccaagattgtaactgaaaactgctgtctcttgttttgttcgttttgggggtggtggtgctggctgggccatgcttgtgaagtgatgtgtgtctctgatttaacggattcactgttttctctgctaattgagagagcgttatttacattatttatttgttttgacacaagtgctttcagtgttttatcctagctaatggcttcttaaaggtaataaaacccttccaacgtaattggtcagataaaactttttttcttgtatgcttaaataaagcaattagtgaagcacttctatccaaaatgacttttttgtccttttttaaaaccaatttactgttactggaaactttttgtacaataaagcaatcacgcagattaaagaacatcctgcaatcctagtattaattttaa

SEQ ID NO: 30772 - DNA, 4213 bp, Homo sapiens
  source 1..4213: mol_type = unassigned DNA
atggccaccaggcgtttaaccgacgctttcttgttgttgcggaataattccatccaaaaccggcagctgttagccgagcaagtgagtagtcacatcacctccagccctctgcattcacgtagcattgctgcggccctggatgagcttgctgatgaccgtatggcactggtgtcaggcatcagcttagatccagaagcagcgattggtgtgacaaaacggccacctcctaagtgggtggatggagtggatgaaattcagtatgatgttggccggattaagcagaagatgaaagaattggccagccttcatgacaagcatttaaacagacccaccctggatgacagcagcgaagaggaacatgccattgagataactacccaagagatcactcagctcttccacaggtgccagcgtgccgtgcaggccctgccgagccgggcccgggcctgctccgagcaggaggggcggctgcttgggaacgtggtggcctcgctggcgcaggccctgcaggaactctccaccagcttccggcacgcacagtcaggctacctcaaacgcatgaagaatcgagaggaaagatcccagcattttttcgacacatcagtaccactaatggatgatggagacgataacactctttaccatcggggttttacagaggaccagttagttctggtggagcagaacacactgatggtggaagagcgggaacgagagattcgccagattgtacagtccatttctgacctgaatgaaatattcagggacttaggggcgatgattgtagaacagggtacagtccttgacagaattgactataacgttgaacagtcctgtatcaaaactgaagatggtttgaaacagcttcacaaggcagaacagtatcaaaagaagaatcggaagatgcttgtgattttaatattatttgtcatcatcattgtgctcattgttgtcctcgttggcgtgaagtctcgataagtggcattgggttttcgtgtgtgccgcgcgtgtggatctcccgggtgtgaggggcttggcctgcgccccgccagctgcccgcagaggtgcagcctcgaggaatctgagggcgtcggggcagcgaacctttgcatccacggactcctccttccctagtcctgctcaagcggtccggggaatgggtttttgtttttccttcattgttgagaatttaaggacctttgatactgctgcacaatagagattgagttctgggatcagttataatatatattttttttagaaagagaaaatgagctgagagtttacaggcactgcagaagctgttcagtattatatgtgtatatgctatttttttagcagccatgtctgagcagaatgttaacataatttttggaaaaattttctttaaaccatctggtttttaagaaatttggtaccaaaaattgatgagtagaggcaaaaatgccccttcatctttctctatatattttccagttgaaaacaaactaagaagtcctttaagaatttataatccgttccccattaacttaatttagcttttccatcactgttaatgatcagagtaacaaagtgtgaaaaataagaaaccatcattgatgttaattaacacatttagatgggccagttaaaacagcttcataagttttaaattaattgtaaatggaatattcctcatttaaaatttttgcactgcattttctactgtaaaccaaaagaggttactaagcaaaaccacctaaatttaagttggtgatttaaatgaatctcacattaaaagaaagcttgacagtgttatgaaagccaccagactcagccagtgtgtccccatgggtatccccagccatccttgctcaatccattacttatatactaactacataatgacctgttcaaaccagactctatttaatgaactgtgaatttacacagaggccattttaaatgggtcaccccatttaggattagtggatctcaaattattaaccaaacatcactccatttcaaagtaaaatattccaccagcgatttgatttattggctcttccattgccactgagcaatgcccaggaagcaggcacattgccaaggactgggggcatcttgactaggaagctcctcgtttgtgtgagcgtgggtcagaccgccaaagtaggacttcatcgtttacctacctattatcaatatggtgcttgaatatattcctataactgtagaacagtgtggaaagtgatggtaactttgaagttgttcatgttttattggctttgttttaattgacactagtagagttttaatggtctttgtgtaaattttaatggcttttccattgtttttgcttctcttaaaaagtttaagaagaatatgacctcattaaatgtgctgttttatttggaccagtcacacaaaatgtctctctagagttgactttaaagttgtttacagaaatttaaactcaattccagagattgaagttgtccaaacagctcatgggcttagtgtccaaacccctgcccagccttccctttccaagttggtgccacctccaggtagccattggtggttttcctattactgatgtggctgtggaatgataaggtcctagaggggccctggcatttcaggaagcggacctggtattccctgacaaacattgcttaggaaagagggccggagaataagaagccagcacctcatcagtcagccctgcaatgtgagacttccgtagctgttgagagtcactgcaggtgttctttcatcccatctgattttaacccatggttgagacgttccaagttagatctgctgctcttaggtgtggggctgtccacattagggaacttgcctcaaaaacagtccacagtggcaataccggacttctgttcaagctttttaaagtgctgagccttacaaacccctgaaggaaagtgaccctttaagagaggatcatctttttttatatttattttcaccaaatagggtgatgagggttggtttttgttccctcaacccatttgggtaaaataacggatctgattagaaactgttttaaggaggggctgggctcggtggctcacgcctgtaatcccagactttgagaggccaaggcggtcacgaggtcaggagttcgagaccagcctagccaacatggtgaaaccccgtctctacaaaaaatacaaaaattagccgggtgggacacgcctgtaatcccagctactcaagaggctgaggcaggagaatagcttgaacccgggaggcagaggttgcagtgagccgagatcacaccactgcactccagcctgggtgacagagcgaggctccgtctcaaaaaaaaaaaaaaaaaattgttttagcgctgggtttcccaaggtgggagagacagacccagcctggagctggcccctggcctgtgtgctgacttcttggggtcctcaaaccactgtatttttctgttgagcctgtacttggggagagatcagtagcatttgaggaagtaagagaaaagaatcatggtacctcagggtttctttccctttactcgctggcagccattgtctgtgggcacctcatgtttttccacactctactgggccgtggaggtaacgatcacccaggccagtctcctctgcctgggatgcgccctctgagaggaggcctagcagggcaggctccctctgggcatccctggatgcagcctctggacacatgcctcctttaaagtgtccgggtgcagctcaggttgagtggaggtagaaggagaaacagacatgtttaccacgcgttttccaaagctcctgatctttcccaagattgtaactgaaaactgctgtctcttgttttgttcgttttgggggtggtggtgctggctgggccatgcttgtgaagtgatgtgtgtctctgatttaacggattcactgttttctctgctaattgagagagcgttatttacattatttatttgttttgacacaagtgctttcagtgttttatcctagctaatggcttcttaaaggtaataaaacccttccaacgtaattggtcagataaaactttttttcttgtatgcttaaataaagcaattagtgaagcacttctatccaaaatgacttttttgtccttttttaaaaccaatttactgttactggaaactttttgtacaataaagcaatcacgcagattaaagaacatcctgcaatcctagtattaattttaa

SEQ ID NO: 30773 - DNA, 4552 bp, Homo sapiens
  source 1..4552: mol_type = unassigned DNA
gcagagacctccggggggtctcagggagtagggggcttcagggcctcccagtctagagccggattggcgagttagacgcttgtagatccaaggttggattggggtggggtctctgggacgttggatcgctacgcaaggattggggggattcaagtgcttagagatcgaagtctgccctgggtagggggagtcagacaattggaaagcctaggtagttatttggggaggggtctctacgccttggcgaagcgcacagctgcatctttttggcttgaggcctgaggccttgtcgagaagcttccgtgaaagggtgggccagccgggccacgagaaagaaagtgaataaatcaggaatataagtgggcggggggcccctgagaggggggtcgcaaagggtgagacatggccaccaggcgtttaaccgacgctttcttgttgttgcggaataattccatccaaaaccggcagctgttagccgagcaacttgctgatgaccgtatggcactggtgtcaggcatcagcttagatccagaagcagcgattggtgtgacaaaacggccacctcctaagtgggtggatggagtggatgaaattcagtatgatgttggccggattaagcagaagatgaaagaattggccagccttcatgacaagcatttaaacagacccaccctggatgacagcagcgaagaggaacatgccattgagataactacccaagagatcactcagctcttccacaggtgccagcgtgccgtgcaggccctgccgagccgggcccgggcctgctccgagcaggaggggcggctgcttgggaacgtggtggcctcgctggcgcaggccctgcaggaactctccaccagcttccggcacgcacagtcaggctacctcaaacgcatgaagaatcgagaggaaagatcccagcattttttcgacacatcagtaccactaatggatgatggagacgataacactctttaccatcggggttttacagaggaccagttagttctggtggagcagaacacactgatggtggaagagcgggaacgagagattcgccagattgtacagtccatttctgacctgaatgaaatattcagggacttaggggcgatgattgtagaacagggtacagtccttgacagaattgactataacgttgaacagtcctgtatcaaaactgaagatggtttgaaacagcttcacaaggcagaacagtatcaaaagaagaatcggaagatgcttgtgattttaatattatttgtcatcatcattgtgctcattgttgtcctcgttggcgtgaagtctcgataagtggcattgggttttcgtgtgtgccgcgcgtgtggatctcccgggtgtgaggggcttggcctgcgccccgccagctgcccgcagaggtgcagcctcgaggaatctgagggcgtcggggcagcgaacctttgcatccacggactcctccttccctagtcctgctcaagcggtccggggaatgggtttttgtttttccttcattgttgagaatttaaggacctttgatactgctgcacaatagagattgagttctgggatcagttataatatatattttttttagaaagagaaaatgagctgagagtttacaggcactgcagaagctgttcagtattatatgtgtatatgctatttttttagcagccatgtctgagcagaatgttaacataatttttggaaaaattttctttaaaccatctggtttttaagaaatttggtaccaaaaattgatgagtagaggcaaaaatgccccttcatctttctctatatattttccagttgaaaacaaactaagaagtcctttaagaatttataatccgttccccattaacttaatttagcttttccatcactgttaatgatcagagtaacaaagtgtgaaaaataagaaaccatcattgatgttaattaacacatttagatgggccagttaaaacagcttcataagttttaaattaattgtaaatggaatattcctcatttaaaatttttgcactgcattttctactgtaaaccaaaagaggttactaagcaaaaccacctaaatttaagttggtgatttaaatgaatctcacattaaaagaaagcttgacagtgttatgaaagccaccagactcagccagtgtgtccccatgggtatccccagccatccttgctcaatccattacttatatactaactacataatgacctgttcaaaccagactctatttaatgaactgtgaatttacacagaggccattttaaatgggtcaccccatttaggattagtggatctcaaattattaaccaaacatcactccatttcaaagtaaaatattccaccagcgatttgatttattggctcttccattgccactgagcaatgcccaggaagcaggcacattgccaaggactgggggcatcttgactaggaagctcctcgtttgtgtgagcgtgggtcagaccgccaaagtaggacttcatcgtttacctacctattatcaatatggtgcttgaatatattcctataactgtagaacagtgtggaaagtgatggtaactttgaagttgttcatgttttattggctttgttttaattgacactagtagagttttaatggtctttgtgtaaattttaatggcttttccattgtttttgcttctcttaaaaagtttaagaagaatatgacctcattaaatgtgctgttttatttggaccagtcacacaaaatgtctctctagagttgactttaaagttgtttacagaaatttaaactcaattccagagattgaagttgtccaaacagctcatgggcttagtgtccaaacccctgcccagccttccctttccaagttggtgccacctccaggtagccattggtggttttcctattactgatgtggctgtggaatgataaggtcctagaggggccctggcatttcaggaagcggacctggtattccctgacaaacattgcttaggaaagagggccggagaataagaagccagcacctcatcagtcagccctgcaatgtgagacttccgtagctgttgagagtcactgcaggtgttctttcatcccatctgattttaacccatggttgagacgttccaagttagatctgctgctcttaggtgtggggctgtccacattagggaacttgcctcaaaaacagtccacagtggcaataccggacttctgttcaagctttttaaagtgctgagccttacaaacccctgaaggaaagtgaccctttaagagaggatcatctttttttatatttattttcaccaaatagggtgatgagggttggtttttgttccctcaacccatttgggtaaaataacggatctgattagaaactgttttaaggaggggctgggctcggtggctcacgcctgtaatcccagactttgagaggccaaggcggtcacgaggtcaggagttcgagaccagcctagccaacatggtgaaaccccgtctctacaaaaaatacaaaaattagccgggtgggacacgcctgtaatcccagctactcaagaggctgaggcaggagaatagcttgaacccgggaggcagaggttgcagtgagccgagatcacaccactgcactccagcctgggtgacagagcgaggctccgtctcaaaaaaaaaaaaaaaaaattgttttagcgctgggtttcccaaggtgggagagacagacccagcctggagctggcccctggcctgtgtgctgacttcttggggtcctcaaaccactgtatttttctgttgagcctgtacttggggagagatcagtagcatttgaggaagtaagagaaaagaatcatggtacctcagggtttctttccctttactcgctggcagccattgtctgtgggcacctcatgtttttccacactctactgggccgtggaggtaacgatcacccaggccagtctcctctgcctgggatgcgccctctgagaggaggcctagcagggcaggctccctctgggcatccctggatgcagcctctggacacatgcctcctttaaagtgtccgggtgcagctcaggttgagtggaggtagaaggagaaacagacatgtttaccacgcgttttccaaagctcctgatctttcccaagattgtaactgaaaactgctgtctcttgttttgttcgttttgggggtggtggtgctggctgggccatgcttgtgaagtgatgtgtgtctctgatttaacggattcactgttttctctgctaattgagagagcgttatttacattatttatttgttttgacacaagtgctttcagtgttttatcctagctaatggcttcttaaaggtaataaaacccttccaacgtaattggtcagataaaactttttttcttgtatgcttaaataaagcaattagtgaagcacttctatccaaaatgacttttttgtccttttttaaaaccaatttactgttactggaaactttttgtacaataaagcaatcacgcagattaaagaacatcctgcaatcctagtattaattttaa

SEQ ID NO: 30774 - DNA, 1577 bp, Homo sapiens
  source 1..1577: mol_type = unassigned DNA
agatccggggatggagggagccggagaagaggagtgagaaggccggggaggcaggccctgctgtcttcctgcaggccggcagcctgctggcagtggaggaccaggccgtccaggaaaggaaggggtcaggaggtcgggcagggcctcagcaggttcagacaagtccccagaagggagctgcaggcgccctcgagtccaggccccaagcctggctccggttgtccaaagagggcctaggccaggcctctggtgcggaaactgagtcacagccagacctcagggcacggcctagacgcttacgagccaaagttaggggtagagagcagagacctccggggggtctcagggagtagggggcttcagggcctcccagtctagagccggattggcgagttagacgctttcttgttgttgcggaataattccatccaaaaccggcagctgttagccgagcaagtgagtagtcacatcacctccagccctctgcattcacgtagcattgctgcgcttgctgatgaccgtatggcactggtgtcaggcatcagcttagatccagaagcagcgattggtgtgacaaaacggccacctcctaagtgggtggatggagtggatgaaattcagtatgatgttggccggattaagcagaagatgaaagaattggccagccttcatgacaagcatttaaacagacccaccctggatgacagcagcgaagaggaacatgccattgagataactacccaagagatcactcagctcttccacaggtgccagcgtgccgtgcaggccctgccgagccgggcccgggcctgctccgagcaggaggggcggctgcttgggaacgtggtggcctcgctggcgcaggccctgcaggaactctccaccagcttccggcacgcacagtcaggctacctcaaacgcatgaagaatcgagaggaaagatcccagcattttttcgacacatcagtaccactaatggatgatggagacgataacactctttaccatcggggttttacagaggaccagttagttctggtggagcagaacacactgatggtggaagagcgggaacgagagattcgccagattgtacagtccatttctgacctgaatgaaatattcagggacttaggggcgatgattgtagaacagggtacagtccttgacagaattgactataacgttgaacagtcctgtatcaaaactgaagatggtttgaaacagcttcacaaggcagaacagtatcaaaagaagaatcggaagatgcttgtgattttaatattatttgtcatcatcattgtgctcattgttgtcctcgttggcgtgaagtctcgataagtggcattgggttttcgtgtgtgccgcgcgtgtggatctcccgggtgtgaggggcttggcctgcgccccgccagctgcccgcagaggtgcagcctcgaggaatctgagggcgtcggggcagcgaacctttgcatccacggactcctccttccctagtcctgctcaagcggtccggggaatgggtttttgtttttccttcattgttgagaatttaaggacctttgatactgctgcac

SEQ ID NO: 30775 - DNA, 4937 bp, Homo sapiens
  source 1..4937: mol_type = unassigned DNA
agatccggggatggagggagccggagaagaggagtgagaaggccggggaggcaggccctgctgtcttcctgcaggccggcagcctgctggcagtggaggaccaggccgtccaggaaaggaaggggtcaggaggtcgggcagggcctcagcaggttcagacaagtccccagaagggagctgcaggcgccctcgagtccaggccccaagcctggctccggttgtccaaagagggcctaggccaggcctctggtgcggaaactgagtcacagccagacctcagggcacggcctagacgcttacgagccaaagttaggggtagagagcagagacctccggggggtctcagggagtagggggcttcagggcctcccagtctagagccggattggcgagttagacgcttgtagatccaaggttggattggggtggggtctctgggacgttggatcgctacgcaaggattggggggattcaagtgcttagagatcgaagtctgccctgggtagggggagtcagacaattggaaagcctaggtagttatttggggaggggtctctacgccttggcgaagcgcacagctgcatctttttggcttgaggcctgaggccttgtcgagaagcttccgtgaaagggtgggccagccgggccacgagaaagaaagtgaataaatcaggaatataagtgggcggggggcccctgagaggggggtcgcaaagggtgagacatggccaccaggcgtttaaccgacgctttcttgttgttgcggaataattccatccaaaaccggcagctgttagccgagcaagtgagtagtcacatcacctccagccctctgcattcacgtagcattgctgcggagctggacgagcttgctgatgaccgtatggcactggtgtcaggcatcagcttagatccagaagcagcgattggtgtgacaaaacggccacctcctaagtgggtggatggagtggatgaaattcagtatgatgttggccggattaagcagaagatgaaagaattggccagccttcatgacaagcatttaaacagacccaccctggatgacagcagcgaagaggaacatgccattgagataactacccaagagatcactcagctcttccacaggtgccagcgtgccgtgcaggccctgccgagccgggcccgggcctgctccgagcaggaggggcggctgcttgggaacgtggtggcctcgctggcgcaggccctgcaggaactctccaccagcttccggcacgcacagtcaggctacctcaaacgcatgaagaatcgagaggaaagatcccagcattttttcgacacatcagtaccactaatggatgatggagacgataacactctttaccatcggggttttacagaggaccagttagttctggtggagcagaacacactgatggtggaagagcgggaacgagagattcgccagattgtacagtccatttctgacctgaatgaaatattcagggacttaggggcgatgattgtagaacagggtacagtccttgacagaattgactataacgttgaacagtcctgtatcaaaactgaagatggtttgaaacagcttcacaaggcagaacagtatcaaaagaagaatcggaagatgcttgtgattttaatattatttgtcatcatcattgtgctcattgttgtcctcgttggcgtgaagtctcgataagtggcattgggttttcgtgtgtgccgcgcgtgtggatctcccgggtgtgaggggcttggcctgcgccccgccagctgcccgcagaggtgcagcctcgaggaatctgagggcgtcggggcagcgaacctttgcatccacggactcctccttccctagtcctgctcaagcggtccggggaatgggtttttgtttttccttcattgttgagaatttaaggacctttgatactgctgcacaatagagattgagttctgggatcagttataatatatattttttttagaaagagaaaatgagctgagagtttacaggcactgcagaagctgttcagtattatatgtgtatatgctatttttttagcagccatgtctgagcagaatgttaacataatttttggaaaaattttctttaaaccatctggtttttaagaaatttggtaccaaaaattgatgagtagaggcaaaaatgccccttcatctttctctatatattttccagttgaaaacaaactaagaagtcctttaagaatttataatccgttccccattaacttaatttagcttttccatcactgttaatgatcagagtaacaaagtgtgaaaaataagaaaccatcattgatgttaattaacacatttagatgggccagttaaaacagcttcataagttttaaattaattgtaaatggaatattcctcatttaaaatttttgcactgcattttctactgtaaaccaaaagaggttactaagcaaaaccacctaaatttaagttggtgatttaaatgaatctcacattaaaagaaagcttgacagtgttatgaaagccaccagactcagccagtgtgtccccatgggtatccccagccatccttgctcaatccattacttatatactaactacataatgacctgttcaaaccagactctatttaatgaactgtgaatttacacagaggccattttaaatgggtcaccccatttaggattagtggatctcaaattattaaccaaacatcactccatttcaaagtaaaatattccaccagcgatttgatttattggctcttccattgccactgagcaatgcccaggaagcaggcacattgccaaggactgggggcatcttgactaggaagctcctcgtttgtgtgagcgtgggtcagaccgccaaagtaggacttcatcgtttacctacctattatcaatatggtgcttgaatatattcctataactgtagaacagtgtggaaagtgatggtaactttgaagttgttcatgttttattggctttgttttaattgacactagtagagttttaatggtctttgtgtaaattttaatggcttttccattgtttttgcttctcttaaaaagtttaagaagaatatgacctcattaaatgtgctgttttatttggaccagtcacacaaaatgtctctctagagttgactttaaagttgtttacagaaatttaaactcaattccagagattgaagttgtccaaacagctcatgggcttagtgtccaaacccctgcccagccttccctttccaagttggtgccacctccaggtagccattggtggttttcctattactgatgtggctgtggaatgataaggtcctagaggggccctggcatttcaggaagcggacctggtattccctgacaaacattgcttaggaaagagggccggagaataagaagccagcacctcatcagtcagccctgcaatgtgagacttccgtagctgttgagagtcactgcaggtgttctttcatcccatctgattttaacccatggttgagacgttccaagttagatctgctgctcttaggtgtggggctgtccacattagggaacttgcctcaaaaacagtccacagtggcaataccggacttctgttcaagctttttaaagtgctgagccttacaaacccctgaaggaaagtgaccctttaagagaggatcatctttttttatatttattttcaccaaatagggtgatgagggttggtttttgttccctcaacccatttgggtaaaataacggatctgattagaaactgttttaaggaggggctgggctcggtggctcacgcctgtaatcccagactttgagaggccaaggcggtcacgaggtcaggagttcgagaccagcctagccaacatggtgaaaccccgtctctacaaaaaatacaaaaattagccgggtgggacacgcctgtaatcccagctactcaagaggctgaggcaggagaatagcttgaacccgggaggcagaggttgcagtgagccgagatcacaccactgcactccagcctgggtgacagagcgaggctccgtctcaaaaaaaaaaaaaaaaaattgttttagcgctgggtttcccaaggtgggagagacagacccagcctggagctggcccctggcctgtgtgctgacttcttggggtcctcaaaccactgtatttttctgttgagcctgtacttggggagagatcagtagcatttgaggaagtaagagaaaagaatcatggtacctcagggtttctttccctttactcgctggcagccattgtctgtgggcacctcatgtttttccacactctactgggccgtggaggtaacgatcacccaggccagtctcctctgcctgggatgcgccctctgagaggaggcctagcagggcaggctccctctgggcatccctggatgcagcctctggacacatgcctcctttaaagtgtccgggtgcagctcaggttgagtggaggtagaaggagaaacagacatgtttaccacgcgttttccaaagctcctgatctttcccaagattgtaactgaaaactgctgtctcttgttttgttcgttttgggggtggtggtgctggctgggccatgcttgtgaagtgatgtgtgtctctgatttaacggattcactgttttctctgctaattgagagagcgttatttacattatttatttgttttgacacaagtgctttcagtgttttatcctagctaatggcttcttaaaggtaataaaacccttccaacgtaattggtcagataaaactttttttcttgtatgcttaaataaagcaattagtgaagcacttctatccaaaatgacttttttgtccttttttaaaaccaatttactgttactggaaactttttgtacaataaagcaatcacgcagattaaagaacatcctgcaatcctagtattaattttaa

SEQ ID NO: 30776 - DNA, 560 bp, Homo sapiens
  source 1..560: mol_type = unassigned DNA
agtcagatccggggatggagggagccggagaagaggagtgagaaggccggggaggcaggccctgctgtcttcctgcaggccggcagcctgctggcagtggaggaccaggccgtccaggaaaggaaggggtcaggaggtcgggcagggcctcagcagctgttagccgagcaagagctggacgagcttgctgatgaccgtatggcactggtgtcaggcatcagcttagatccagaagcagcgattggtgtgacaaaacggccacctcctaagtgggtggatggagtggatgaaattcagtatgatgttggccggattaagcagaagatgaaagaattggccagccttcatgacaagcatttaaacagacccaccctggatgacagcagcgaagaggaacatgccattgagataactacccaagagatcactcagctcttccacaggtgccagcgtgccgtgcaggccctgccgagccgggcccgggcctgctccgagcaggaggggcggctgcttgggaacgtggtggcctcgctggcgcaggccctgcaggaactctccac

SEQ ID NO: 30777 - DNA, 843 bp, Homo sapiens
  source 1..843: mol_type = unassigned DNA
tagatccagaagcagcgattggtgtgacaaaacggccacctcctaagtgggtggatggagtggatgaaattcagtatgatgttggccggattaagcagaagatgaaagaattggccagccttcatgacaagcatttaaacagacccaccctggatgacagcagcgaagaggaacatgccattgagataactacccaagagatcactcaggcatgaagaatcgagaggaaagatcccagcattttttcgacacatcagtaccactaatggatgatggagacgataacactctttaccatcggggttttacagaggaccagttagttctggtggagcagaacacactgatggtggaagagcgggaacgagagattcgccagattgtacagtccatttctgacctgaatgaaatattcagggacttaggggcgatgattgtagaacagggtacagtccttgacagaattgactataacgttgaacagtcctgtatcaaaactgaagatggtttgaaacagcttcacaaggcagaacagtatcaaaagaagaatcggaagatgcttgtgattttaatattatttgtcatcatcattgtgctcattgttgtcctcgttggcgtgaagtctcgataagtggcattgggttttcgtgtgtgccgcgcgtgtggatctcccgggtgtgaggggcttggcctgcgccccgccagctgcccgcagaggtgcagcctcgaggaatctgagggcgtcggggcagcgaacctttgcatccacggactcctccttccctagtcctgctcaagcggtccggggaatgggtttttgtttttccttcattgttgagaatt

SEQ ID NO: 30778 - DNA, 855 bp, Homo sapiens
  source 1..855: mol_type = unassigned DNA
ggcatcagcttagatccagaagcagcgattggtgtgacaaaacggccacctcctaagtgggtggatggagtggatgaaattcagtatgatgttggccggattaagcagaagatgaaagaattggccagccttcatgacaagcatttaaacagacccaccctggatgacagcagcgaagaggaacatgccattgagataactacccaagagatcactcagctcttccacaggtgccagcgtgccgtgcaggccctgccgagccgggcccgggcctgctccgagcaggaggggcggctgcttgggaacgtggtggcctcgctggcgcaggccctgcaggaactctccaccagcttccggcacgcacagtcaggctacctcaaacgcatgaagaatcgagaggaaagatcccagcattttttcgacacatcagtaccactaatggatgatggagacgataacactctttaccatcggggtacagtccttgacagaattgactataacgttgaacagtcctgtatcaaaactgaagatggtttgaaacagcttcacaaggcagaacagtatcaaaagaagaatcggaagatgcttgtgattttaatattatttgtcatcatcattgtgctcattgttgtcctcgttggcgtgaagtctcgataagtggcattgggttttcgtgtgtgccgcgcgtgtggatctcccgggtgtgaggggcttggcctgcgccccgccagctgcccgcagaggtgcagcctcgaggaatctgagggcgtcggggcagcgaacctttgcatccacggactcctccttccctagtcctgctcaagcggtccggggaatgggtttttgtttttc

SEQ ID NO: 30779 - DNA, 553 bp, Homo sapiens
  source 1..553: mol_type = unassigned DNA
gagctgcagtcagatccggggatggagggagccggagaagaggagtgagaaggccggggaggcaggccctgctgtcttcctgcaggccggcagcctgctggcagtggaggaccaggccgtccaggaaaggaaggggtcaggagctgttagccgagcaagagctggacgagcttgctgatgaccgtatggcactggtgtcaggcatcagcttagatccagaagcagcgattggtgtgacaaaacggccacctcctaagtgggtggatggagtggatgaaattcagtatgatgttggccggattaagcagaagatgaaagaattggccagccttcatgacaagcatttaaacagacccaccctggatgacagcagcgaagaggaacatgccattgagataactacccaagagatcactcagctcttccacaggtgccagcgtgccgtgcaggccctgccgagccgggcccgggcctgctccgagcaggaggggcggctgcttgggaacgtggtggcctcgctggcgcaggccctgcaggaactctccaccagctt

SEQ ID NO: 30780 - DNA, 812 bp, Homo sapiens
  source 1..812: mol_type = unassigned DNA
atggccaccaggcgtttaaccgacgctttcttgttgttgcggaataattccatccaaaaccggcagctgttagccgagcaagagctggacgagcttgctgatgaccgtatggcactggtgtcaggcatcagcttagatccagaagcagcgattggtgtgacaaaacggccacctcctaagtgggtggatggagtggatgaaattcagtatgatgttggccggattaagcagaagatgaaagaattggccagccttcatgacaagcatttaaacagacccaccctggatgacagcagcgaagaggaacatgccattgagataactacccaagagatcactcagctcttccacaggtgccagcgtgccgtgcaggccctgccgagccgggcccgggcctgctccgagcaggaggggcggctgcttgggaacgtggtggcctcgctggcgcaggccctgcaggaactctccaccagcttccggcacgcacagtcaggctacctcaaacgcatgaagaatcgagaggaaagatcccagcattttttcgacacatcagtaccactaatggatgatggagacgataacactctttaccatcggaggaccagttagttctggtggagcagaacacactgatggtggaagagcgggaacgagagattcgccagattgtacagtccatttctgacctgaatgaaatattcagggacttaggggcgatgattgtagaacagggtacagtccttgacagaattgactataacgttgaacagtcctgtatcaaaactgaagatggtttgaaacagcttcacaag

SEQ ID NO: 30781 - DNA, 2708 bp, Homo sapiens
  source 1..2708: mol_type = unassigned DNA
ctcgtgatgccccgccccgtcgctcctgcgcctgcgccgtgcccaccgaccggcctcgagcgccccggcgggaggtttttctatatgagtggagaagacagctgttaccagggaggtcatacaacatttttttaggatgtctgaagatgaagaaaaagtgaaattacgccgtcttgaaccagctatccagaaattcattaagatagtaatcccaacagacctggaaaggttaagaaagcaccagataaatattgagaagtatcaaaggtgcagaatctgggacaagttgcatgaagagcatatcaatgcaggacgtacagttcagcaactccgatccaatatccgagaaattgagaaactttgtttgaaagtccgaaaggatgacctagtacttctgaagagaatgatagatcctgttaaagaagaagcatcagcagcaacagcagaatttctccaactccatttggaatctgtagaagaacttaagaagcaatttaatgatgaagaaactttgctacagcctcctttgaccagatccatgactgttggtggagcatttcatactactgaagctgaagctagttctcagagtttgactcagatatatgccttacctgaaattcctcaagatcaaaatgctgcagaatcgtgggaaaccttagaagcggacttaattgaacttagccaactggtcactgacttctctctcctagtgaattctcagcaggagaagattgacagcattgcagaccatgtcaacagtgctgctgtgaatgttgaagagggaaccaaaaacttagggaaggctgcaaaatacaagctggcagctctgcctgtggcaggtgcactcatcgggggaatggtagggggtcctattggcctccttgcaggcttcaaagtggcaggaattgcagctgcacttggtggtggggtgttgggcttcacaggtggaaaattgatacaaagaaagaaacagaaaatgatggagaagctcacttccagctgtccagatcttcccagccaaactgacaagaaatgcagttaaaaaccaaatttcagtattattggtgccaacatgtctatcctgaggacctttgctgctgttggacactccgtcaccttttggaacacaagtatatcaagatagtggctactgatgttcaagtgggattgaagtgtgataaatggatatattttgttgtttgctggggtgttcatggagatgttaagagattgaggccctgggctgagggtatataatgtatgtcaggtaaagtttgaagactgccaaggagcagattttctccctggaaatgtgaaaactgaacctataactctgataaggacttgagatgtgtagaaacgttgggttatggaagactagtttcttccataaccctgaattggagaccttaatgctaagtgtagattattgaggtttgttagtgaggaaaagaataagagttcagaagcctttgttatcagatagcgaaatcagggcctagtgaggagcacaggtcgactacataatggagtccattggcgaaccctattgcaatttggtccaactatatcttctggtgaaggaaattaatgatgtaagaaaatgcaagaggctcaacttctcttccaaaaatcttctggcttctgaactcttcctctgcctctctttaaataaataacacagaatttcaagtggtaggagacttattaagccagtcaccaagcttggtctgtcagcctgtcttctaacacctcaaagatcttgtgccctgtgctgtccctcccttgtaattatgaaaagttctttggtttctggggtgaattctacccatgtataatgaggaattctctcataaccttttttgtcttgtctgtcatctctgttcatcccttcctataacctctaggtaaaaagaaaagaaaaaaagaaatttcgagatattttcaacattgttagagtttgggctaaaatgagcaaggagaaaaaaaccaccaagaacatttcctggggcatgttccagttttgaggggtgatatatctgccagatagggggtatctgacccagtcttcttttcagctggtctctggggggagctgagaactcgcttgctacctcacatccttttccccagactttttatctcctatgcatccctttgctttctatagctggtgtttcttccccaaaatggcgttcccatgcttacctttctcacattctagacaatgatggacaaagacgcatgcaagactcagacccggggaatggtgtggtgctaatctcaacacctgacattcacagcaagcatggcccagcccaactgcatgtctatctcaaaccgcagaaaggctttaatactggaaaaaaagaattcaagactacaggcagctcccctctgtaccccaactcatttaaaataggaggaatcactttttgccttacttaacgcttttttctgagcacagggatgggcacctgcaccccagaaggtgtgagctgtctctctgccaggagctaaggttcattaggggattggatggtttatcacttctttctttctgagtttacttttagtaacttttattgatggctacctttcatgtccctgtctaaagagactttctctttcatacgtcttaaatctcatcaatgaaatccagtgaaacagcaccatttcttagtatcattaaataactagaaagt

SEQ ID NO: 30782 - DNA, 2523 bp, Homo sapiens
  source 1..2523: mol_type = unassigned DNA
aaggggctctctggaggccgcctttgggggcgtcgggccctcacaggcttggtgggcctggcgcccgtgtggcgcgcgcaagaggcgctgggcggcaagtagggcattggatccgaagtgcgagcgccatggtggctcctcctgtttttcagaagtggcggagcctcgcttggtttcgtttttggaagctttattggaagctggtatagggaggccgcagacgatgcgagcaggacggcctcccggggtcgcggggtggaaaagtttccggcgcgcgtcctgtctctggcgcgctgtaggccccgggtcgccagggtcgctggcgtctgggtcccgggacagacccgcgcatccgttcgctggtgggggcgtttggtgtgtgtggcccaggtgtgctgtgggtgacactgcgaggaatgacgcgacgctcgatggtagtgaggctcggaggactgggagcgagaggccggaagcccctgctcgccaaacccagaggtggttggcagaaggtcccacaccttggctccctccttttagctaaccgaggttcagagaggagactttactttgacttttctctccaaattcggtatctcttccataagtcagaaacattaagcggcgggccggaagaaatcgggcgccactagtatcctgaaaagtgggagctctgggccgatggaaggtttttctatatgagtggagaagacagctgttaccagggaggtcatacaacatttttttaggatgtctgaagatgaagaaaaagtgaaattacgccgtcttgaaccagctatccagaaattcattaagatagtaatcccaacagacctggaaaggttaagaaagcaccagataaatattgagaagtatcaaaggtgcagaatctgggacaagttgcatgaagagcatatcaatgcaggacgtacagttcagcaactccgatccaatatccgagaaattgagaaactttgtttgaaagtccgaaaggatgacctagtacttctgaagagaatgatagatcctgttaaagaagaagcatcagcagcaacagcagaatttctccaactccatttggaatctgtagaagaacttaagaagcaatttaatgatgaagaaactttgctacagcctcctttgaccagatccatgactgttggtggagcatttcatactactgaagctgaagctagttctcagagtttgactcagatatatgccttacctgaaattcctcaagatcaaaatgctgcagaatcgtgggaaaccttagaagcggacttaattgaacttagccaactggtcactgacttctctctcctagtgaattctcagcaggagaagattgacagcattgcagaccatgtcaacagtgctgctgtgaatgttgaagagggaaccaaaaacttagggaaggctgcaaaatacaagctggcagctctgcctgtggcaggtgcactcatcgggggaatggtagggggtcctattggcctccttgcaggcttcaaagtggcaggaattgcagctgcacttggtggtggggtgttgggcttcacaggtggaaaattgatacaaagaaagaaacagaaaatgatggagaagctcacttccagctgtccagatcttcccagccaaactgacaagaaatgcagttaaaaaccaaatttcagtattattggtgccaacatgtctatcctgaggacctttgctgctgttggacactccgtcaccttttggaacacaagtatatcaagatagtggctactgatgttcaagtgggattgaagtgtgataaatggatatattttgttgtttgctggggtgttcatggagatgttaagagattgaggccctgggctgagggtatataatgtatgtcaggtaaagtttgaagactgccaaggagcagattttctccctggaaatgtgaaaactgaacctataactctgataaggacttgagatgtgtagaaacgttgggttatggaagactagtttcttccataaccctgaattggagaccttaatgctaagtgtagattattgaggtttgttagtgaggaaaagaataagagttcagaagcctttgttatcagatagcgaaatcagggcctagtgaggagcacaggtcgactacataatggagtccattggcgaaccctattgcaatttggtccaactatatcttctggtgaaggaaattaatgatgtaagaaaatgcaagaggctcaacttctcttccaaaaatcttctggcttctgaactcttcctctgcctctctttaaataaataacacagaatttcaagtggtaggagacttattaagccagtcaccaagcttggtctgtcagcctgtcttctaacacctcaaagatcttgtgccctgtgctgtccctcccttgtaattatgaaaagttctttggtttctggggtgaattctacccatgtataatgaggaattctctcataaccttttttgtcttgtctgtcatctctgttcatcccttcctataacctctaggt

SEQ ID NO: 30783 - DNA, 542 bp, Homo sapiens
  source 1..542: mol_type = unassigned DNA
cgggccctcacaggcttggtgggcctggcgcccgtgtggcgcgcgcaagaggcgctgggcggcaagtagggcattggatccgaagtgcgagcgccatggtggctcctcctgtttttcagaagtggcggagcctcgcttggtttcgtttttggaagctttattggaagctggtatagggaggccgcagacgatgcgagcaggacggcctcccggggtcgcggggtggaaaagtttccggcgcgcgtcctgtctctggcgcgctgtaggccccgggtcgccagggtcgctggcgtctgggtcccgggacagacccgcgcatccgttcgctggtgggggcgtttggtgtgtgtggcccaggtttttctatatgagtggagaagacagctgttaccagggaggtcatacaacatttttttaggatgtctgaagatgaagaaaaagtgaaattacgccgtcttgaaccagctatccagaaattcattaagatagtaatcccaacagacctggaaaggttaagaaagcaccagataaatattgagaag

SEQ ID NO: 30784 - DNA, 568 bp, Homo sapiens
  source 1..568: mol_type = unassigned DNA
accgaccggcctcgagcgccccggcgggagagatgggattttggcatgttgcccaggctggccatgaactcctgggctcaagtggtcctcccgccttggcctcccaaagtgctggtattacagacatgagccaccgtacccggccccttcattcacaatttttcataaagattcagtggctccacaaagtctgtttttctatatgagtggagaagacagctgttaccagggaggtcatacaacatttttttaggatgtctgaagatgaagaaaaagtgaaattacgccgtcttgaaccagctatccagaaattcattaagatagtaatcccaacagacctggaaaggttaagaaagcaccagataaatattgagaagtatcaaaggtgcagaatctgggacaagttgcatgaagagcatatcaatgcaggacgtacagttcagcaactccgatccaatatccgagaaattgagaaactttgtttgaaagtccgaaaggatgacctagtacttctgaagagaatgatagatcctgttaaagaagaagcatcagcagcaacagcagaatt

SEQ ID NO: 30785 - DNA, 2424 bp, Homo sapiens
  source 1..2424: mol_type = unassigned DNA
gggctctctggaggccgcctttgggggcgtcgggccctcacaggcttggtgggcctggcgcccgtgtggcgcgcgcaagaggcgctgggcggcaagtagggcattggatccgaagtgcgagcgccatggtggctcctcctgtttttcagaagtggcggagcctcgcttggtttcgtttttggaagctttattggaagctggtatagggaggccgcagacgatgcgagcaggacggcctcccggggtcgcggggtggaaaagtttccggcgcgcgtcctgtctctggcgcgctgtaggccccgggtcgccagggtcgctggcgtctgggtcccgggacagacccgcgcatccgttcgctggtgggggcgtttggtgtgtgtggcccaggtgtgctgtgggtgacactgcgaggaatgacgcgacgctcgatggtagtgaggctcggaggactgggagcgagaggccggaagcccctgctcgccaaacccagaggtggttggcagaaggtcccacaccttggctccctccttttagctaaccgaggttcagagaggagactttactttgacttttctctccaaattcggtttttctatatgagtggagaagacagctgttaccagggaggtcatacaacatttttttaggatgtctgaagatgaagaaaaagtgaaattacgccgtcttgaaccagctatccagaaattcattaagatagtaatcccaacagacctggaaaggttaagaaagcaccagataaatattgagaagtatcaaaggtgcagaatctgggacaagttgcatgaagagcatatcaatgcaggacgtacagttcagcaactccgatccaatatccgagaaattgagaaactttgtttgaaagtccgaaaggatgacctagtacttctgaagagaatgatagatcctgttaaagaagaagcatcagcagcaacagcagaatttctccaactccatttggaatctgtagaagaacttaagaagcaatttaatgatgaagaaactttgctacagcctcctttgaccagatccatgactgttggtggagcatttcatactactgaagctgaagctagttctcagagtttgactcagatatatgccttacctgaaattcctcaagatcaaaatgctgcagaatcgtgggaaaccttagaagcggacttaattgaacttagccaactggtcactgacttctctctcctagtgaattctcagcaggagaagattgacagcattgcagaccatgtcaacagtgctgctgtgaatgttgaagagggaaccaaaaacttagggaaggctgcaaaatacaagctggcagctctgcctgtggcaggtgcactcatcgggggaatggtagggggtcctattggcctccttgcaggcttcaaagtggcaggaattgcagctgcacttggtggtggggtgttgggcttcacaggtggaaaattgatacaaagaaagaaacagaaaatgatggagaagctcacttccagctgtccagatcttcccagccaaactgacaagaaatgcagttaaaaaccaaatttcagtattattggtgccaacatgtctatcctgaggacctttgctgctgttggacactccgtcaccttttggaacacaagtatatcaagatagtggctactgatgttcaagtgggattgaagtgtgataaatggatatattttgttgtttgctggggtgttcatggagatgttaagagattgaggccctgggctgagggtatataatgtatgtcaggtaaagtttgaagactgccaaggagcagattttctccctggaaatgtgaaaactgaacctataactctgataaggacttgagatgtgtagaaacgttgggttatggaagactagtttcttccataaccctgaattggagaccttaatgctaagtgtagattattgaggtttgttagtgaggaaaagaataagagttcagaagcctttgttatcagatagcgaaatcagggcctagtgaggagcacaggtcgactacataatggagtccattggcgaaccctattgcaatttggtccaactatatcttctggtgaaggaaattaatgatgtaagaaaatgcaagaggctcaacttctcttccaaaaatcttctggcttctgaactcttcctctgcctctctttaaataaataacacagaatttcaagtggtaggagacttattaagccagtcaccaagcttggtctgtcagcctgtcttctaacacctcaaagatcttgtgccctgtgctgtccctcccttgtaattatgaaaagttctttggtttctggggtgaattctacccatgtataatgaggaattctctcataaccttttttgtcttgtctgtcatctctgttcatcccttcctataacctctaggt

SEQ ID NO: 30786 - DNA, 2095 bp, Homo sapiens
  source 1..2095: mol_type = unassigned DNA
gccggcgccgctgccactcccgggagcatgaaggaccgaacccaggagctccgcacggccaaggacagcgatgatgatgatgatgtcgctgtcaccgtggaccgagaccgcttcatggatgagttctttgagcaggtggaggagattcgaggcttcattgacaagatcgcagagaacgtggaggaggtgaagcggaagcacagtgccatcctggcatcccccaaccccgatgagaagacgaaggaggagctggaagaactcatgtccgacataaagaagacagcaaacaaagttcgttccaagttaaagagcatcgagcagtccatcgagcaagaggaaggcctgaaccgctcctccgctgacctgaggatccggaagacacagcactccacgctgtccagaaagtttgtggaggtcatgtcggagtacaacgccacgcagtccgactaccgcgagcgctgcaaaggccgcatccagaggcagctggagatcaccggcaggaccacgaccagtgaggagctggaggacatgctggagagtgggaaccccgccatctttgcctctgggatcatcatggactccagcatctcgaagcaggctctgagcgagattgagacgcggcacagtgagatcatcaagctggagaacagcatccgtgagctacacgacatgttcatggacatggccatgctcgtggagagccagggagagatgattgacaggatcgagtacaatgtggaacacgcggtagactatgtggagagggccgtgtctgacaccaagaaggccgtcaagtaccagagcaaggcgcgccggaagaaaatcatgatcatcatctgctgtgtgatcctgggcatcgtcatcgcctccactgttgggggcatcttcgcctagaagccacccaaactgccactccactccaggtgggccactccaaggaggccctggctgctgccacctggctgggctgccctcccaacccccgcctctggctcagagcaccctccctcccggcccccatgctcccttctctgccatgggccctccgtccccgccccgtgtcgtgtgcatgatctctgtgagtgtgcgtctgtacgggaagaggcagagggaggcagccagcggggcgtgatgcagtgtgcacagcgaggagcagacccaggcagggccgccagggtgacacaggccacccttccttgccttcagtaactcggtgggcccaggttctgctcttccctggggaccctaacctcgcctccagctgacctgccctgtcctctccagctgtccccacaagcagagccctgaggggtggggaccagctggccacatggtgctgcttttcaggttaggggagaggtggccctgagggacagcccagctctgagtctcagtcgctgatcactgccagggaggctcaggctgccatggctccaggctccctcccctgcctaggggcaaagtccatcgggtcctgggcctcagcttcccttcccacattcctccggccccaggagcaaccccttgggctaggtctgaccccaggtgtccctctggaaggggctggctggtgccctatttccagccaccccagcagctagggaggcaaagcaggctgcagtcagtccctcaagccagcgttgcatgtttgggatggtggctcctgttgtcttgcgctctgggaagtcagatgtcatttcaggcctgcagtctcatcctgcccttgccatcctcccatcgatgtgccacgtgggtgtcacgtgtcccagatgcagtattcggcagccagccggggagggctacctcctcctcctcaccaccttggggcttctcatgggaaatgtgcccccgccccaggaccctctcccttgtggacaggcagggagatgcatgcgagtgcatgcagcaggggatggggccgtgtccgtgtgccccaccctccctcggctttactcctgcccagtgactgtgaccactgtccgtgttgccttcttgaacagcgattccccccaaccccttcaccaaaggtcttggtacaaccagctgcccattttgtgaaatttttatgtagaataaacatttgtatctgtaccag

SEQ ID NO: 30787 - DNA, 783 bp, Homo sapiens
  source 1..783: mol_type = unassigned DNA
atgaaggaccgaacccaggagctccgcacggccaaggacagcgatgatgatgatgatgtcgctgtcaccgtggaccgagaccgcttcatggatgagttctttgagcaggtggaggagattcgaggcttcattgacaagatcgcagagaacgtggaggaggtgaagcggaagcacagtgccatcctggcatcccccaaccccgatgagaagacgaaggaggagctggaagaactcatgtccgacataaagaagacagcaaacaaagttcgttccaagttaaagagcatcgagcagtccatcgagcaagaggaaggcctgaaccgctcctccgctgacctgaggatccggaagacacagcactccacgctgtccagaaagtttgtggaggtcatgtcggagtacaacgccacgcagtccgactaccgcgagcgctgcaaaggccgcatccagaggcagctggagatcaccggcaggaccacgaccagtgaggagctggaggacatgctggagagtgggaaccccgccatctttgcctctgggatcatcatggactccagcatctcgaagcaggctctgagcgagattgagacgcggcacagtgagatcatcaagctggagaacagcatccgtgagctacacgacatgttcatggacatggccatgctcgtggagagccagcctcagggtgctttcctgaagtcctgccccgagccccaacccaaccctgaggagggggccctctggagctcgggtgcccccggccccgcagggagagatgattga

SEQ ID NO: 30788 - DNA, 1774 bp, Homo sapiens
  source 1..1774: mol_type = unassigned DNA
gtcgcgcatgcggggctcacacggctgcagccggcgccgctgccactcccgggagcatgaaggaccgaacccaggagctccgcacggccaaggacagcgatgatgatgatgatgtcgctgtcaccgtggaccgagaccgcttcatggatgagttctttgagcaggtggaggtcatgtcggagtacaacgccacgcagtccgactaccgcgagcgctgcaaaggccgcatccagaggcagctggagatcaccggcaggaccacgaccagtgaggagctggaggacatgctggagagtgggaaccccgccatctttgcctctgggatcatcatggactccagcatctcgaagcaggctctgagcgagattgagacgcggcacagtgagatcatcaagctggagatcgagtacaatgtggaacacgcggtagactatgtggagagggccgtgtctgacaccaagaaggccgtcaagtaccagagcaaggcgcgccggaagaaaatcatgatcatcatctgctgtgtgatcctgggcatcgtcatcgcctccactgttgggggcatcttcgcctagaagccacccaaactgccactccactccaggtgggccactccaaggaggccctggctgctgccacctggctgggctgccctcccaacccccgcctctggctcagagcaccctccctcccggcccccatgctcccttctctgccatgggccctccgtccccgccccgtgtcgtgtgcatgatctctgtgagtgtgcgtctgtacgggaagaggcagagggaggcagccagcggggcgtgatgcagtgtgcacagcgaggagcagacccaggcagggccgccagggtgacacaggccacccttccttgccttcagtaactcggtgggcccaggttctgctcttccctggggaccctaacctcgcctccagctgacctgccctgtcctctccagctgtccccacaagcagagccctgaggggtggggaccagctggccacatggtgctgcttttcaggttaggggagaggtggccctgagggacagcccagctctgagtctcagtcgctgatcactgccagggaggctcaggctgccatggctccaggctccctcccctgcctaggggcaaagtccatcgggtcctgggcctcagcttcccttcccacattcctccggccccaggagcaaccccttgggctaggtctgaccccaggtgtccctctggaaggggctggctggtgccctatttccagccaccccagcagctagggaggcaaagcaggctgcagtcagtccctcaagccagcgttgcatgtttgggatggtggctcctgttgtcttgcgctctgggaagtcagatgtcatttcaggcctgcagtctcatcctgcccttgccatcctcccatcgatgtgccacgtgggtgtcacgtgtcccagatgcagtattcggcagccagccggggagggctacctcctcctcctcaccaccttggggcttctcatgggaaatgtgcccccgccccaggaccctctcccttgtggacaggcagggagatgcatgcgagtgcatgcagcaggggatggggccgtgtccgtgtgccccaccctccctcggctttactcctgcccagtgactgtgaccactgtccgtgttgccttcttgaacagcgattccccccaaccccttcaccaaaggtcttggtacaaccagctgcccattttgtgaaatttttatgtagaataaacatttgtatctgtaccagg

SEQ ID NO: 30789 - DNA, 2050 bp, Homo sapiens
  source 1..2050: mol_type = unassigned DNA
agccggcgccgctgccactcccgggagcatgaaggaccgaacccaggagctccgcacggccaaggacagcgatgatgatgatgatgtcgctgtcaccgtggaccgagaccgcttcatggatgagttctttgagcaggtggaggagattcgaggcttcattgacaagatcgcagagaacgtggaggaggtgaagcggaagcacagtgccatcctggcatcccccaaccccgatgagaagacgaaggaggagctggaagaactcatgtccgacataaagaagacagcaaacaaagttcgttccaagttaaagagcatcgagcagtccatcgagcaagaggaaggcctgaaccgctcctccgctgacctgaggatccggaagacacagcactccacgctgtccagaaagtttgtggaggtcatgtcggagtacaacgccacgcagtccgactaccgcgagcgctgcaaaggccgcatccagaggcagctggagatcaccggcaggaccacgaccagtgaggagctggaggacatgctggagagtgggaaccccgccatctttgcctctgggatcatcatggactccagcatctcgaagcaggctctgagcgagattgagacgcggcacagtgagatcatcaagctggagaacagcatccgtgagctacacgacatgttcatggacatggccatgctcgtggagagccagactatgtggagagggccgtgtctgacaccaagaaggccgtcaagtaccagagcaaggcgcgccggaagaaaatcatgatcatcatctgctgtgtgatcctgggcatcgtcatcgcctccactgttgggggcatcttcgcctagaagccacccaaactgccactccactccaggtgggccactccaaggaggccctggctgctgccacctggctgggctgccctcccaacccccgcctctggctcagagcaccctccctcccggcccccatgctcccttctctgccatgggccctccgtccccgccccgtgtcgtgtgcatgatctctgtgagtgtgcgtctgtacgggaagaggcagagggaggcagccagcggggcgtgatgcagtgtgcacagcgaggagcagacccaggcagggccgccagggtgacacaggccacccttccttgccttcagtaactcggtgggcccaggttctgctcttccctggggaccctaacctcgcctccagctgacctgccctgtcctctccagctgtccccacaagcagagccctgaggggtggggaccagctggccacatggtgctgcttttcaggttaggggagaggtggccctgagggacagcccagctctgagtctcagtcgctgatcactgccagggaggctcaggctgccatggctccaggctccctcccctgcctaggggcaaagtccatcgggtcctgggcctcagcttcccttcccacattcctccggccccaggagcaaccccttgggctaggtctgaccccaggtgtccctctggaaggggctggctggtgccctatttccagccaccccagcagctagggaggcaaagcaggctgcagtcagtccctcaagccagcgttgcatgtttgggatggtggctcctgttgtcttgcgctctgggaagtcagatgtcatttcaggcctgcagtctcatcctgcccttgccatcctcccatcgatgtgccacgtgggtgtcacgtgtcccagatgcagtattcggcagccagccggggagggctacctcctcctcctcaccaccttggggcttctcatgggaaatgtgcccccgccccaggaccctctcccttgtggacaggcagggagatgcatgcgagtgcatgcagcaggggatggggccgtgtccgtgtgccccaccctccctcggctttactcctgcccagtgactgtgaccactgtccgtgttgccttcttgaacagcgattccccccaaccccttcaccaaaggtcttggtacaaccagctgcccattttgtgaaatttttatgtagaataaacatttgtatctgtaccag

SEQ ID NO: 30790 - DNA, 4539 bp, Homo sapiens
  source 1..4539: mol_type = unassigned DNA
cggcgccccccggcgcccccagaccccggcctccggcacagaggcgggagacccggagcagcagcagaggcaggaggactaggaggaggaggaggagccgtcgcaggatgaaggatcggactcaagagctgcggagtgcgaaagacagtgatgatgaagaggaggtggtccacgtggatcgggaccacttcatggatgagttctttgaacaggtggaagagatccggggctgcattgagaaactgtcggaggatgtggagcaggtgaaaaaacagcatagcgccatcctggccgcacccaacccagatgagaagaccaaacaggagctggaggatctcactgcagacatcaagaagacggccaacaaggttcggtccaaattgaaagcgatcgagcaaagcattgaacaggaggaggggctgaaccgttcctccgcggacctgcgcatccgcaagacccagcactccacactgtcccggaagttcgtggaggtaatgaccgaatataacgcgacccagtccaagtaccgggaccgctgcaaggaccggatccagcggcaactggagatcactggaaggaccaccaccaacgaagaactggaagacatgctggagagcgggaagctggccatcttcacagatgacatcaaaatggactcacagatgacgaagcaggcgctgaatgagattgagacgaggcacaatgagatcatcaagctggagaccagcatccgcgagctgcacgatatgtttgtggacatggccatgctcgtagagagccagggagagatgattgaccgcatcgagtacaacgtggaacattctgtggactacgtggagcgagctgtgtctgacaccaagaaagcagtgaaatatcagagcaaggcccggaggaagaaaatcatgatcatcatttgctgtgtggtgctgggggtggtcttggcgtcatccattggggggacgctgggcttgtaggccccccccacccttctctctcccagacccttcccccaccacatcgggagcaatacccccaccacccctttcactccatcccctgctccaggctcactcccaaaacagacccaggcagccccacccccacggcagaccctggtgtccctggacctcaccgggccatggaccccccccccgtccccgcacgtagatcgcagcaggcgtgattacacatgcacaccaacatgcatgccgccggcacatgctcgagacgtgtggacaccccagcgtgcgtgtgcgtgtgatgtgtgtgatgcaccagagcaccccctccacccccaccttgggtgtgtgtgcgtggtctgagcttcccccttcaccggggctgttgtgtagactgcagccaagtgtaacacagcagtccatcacgccctctctgtcctctgtgaacagtgtgtgtgcgtgcgtgagaccacagatctgtggacacaccatttgtgtacgtggaattttgtgtttcagtgtttgaacctaatgcaacagcaacaaagccactgatacctgagccctttgtgtctgctacaaaccaggcaggtggtgtgtgtggactcacactcacattctcagaggatccagggaggcccaggtacacacaggccatggcagacaccccatgtctttgttaccccaggggctgtggcatgtcccaggagggtgtgcatgtgtgtgtgtgtgtgtgtgtgtgtgtccaggatgtgcctgaagtattgataggtcttctcagatagagccctccacactgtggactggacacctgttttgggagggcacagaaatgtgtatttcttgctacctagaatgcagctgtgtgtgtgtggcgtgcgtgtgtatgcacgtgtgtgtgtgtgttaggggctctctacatggtgtgctttttaatttttttttgttttttgttttttgtttttttcgagacggagtcttgctctgtcacccaggctggagtgcagtggcgcaatctcagctcactgcaacctgtgcctccctgacgcaagcgattctcatgcctcagcctcccaagtagctgggactacaggcgcctgccaccacgcctggctaattttagaattttagtagagatgaggttttgacatgttggccaggctggtctcgaactcctgacctcaggtgatccgcccactttggcctccctaagtgctggcattacaggcctgagccaccacgcctggcctacatgatgtgtttctgtcctgcctgacctacatggtgtgtttctgccctgcgtattacacacacacacacacacgtgcgtgcacacacacttctaaggacgtggccccatctggctttgtctctccagttgtccttgccctgcccccctccccagaggtgctgcccagtgctggtgtggccacacacggctacatcattgtgcaggcagagctccctgcctgcccagcctcagggctctgcatgctcacacctagatcctcatcttcctccatgtctctgcccagcatagccccgagcccctggaagctggtacccctcagtgtgctcacacgtggcaaggccgaggtggccccaggcaggggccataccaggcacaaaccatgcacgctggcatgggtgcggggatcacacgaatgcctcctggaaggaaagggctacttgtaggaatgttactgatgaggcaagatgccaaggacttccctgcagggatcaaagatcaggacacgaccccttcctcacacacccacctcagacctgggagaggactgtgtgtcccccactgccccatcggatgctctgggctctgcctcagggaactcgggtttggggaaatgtctatttcagaagtactggagtggccagtgtggcagtggccactcagggtgggctgggtcctgagacccatccccgacacctctcctgctgaaccctcaggctgctccccacaccagggtgtgactgaggggtacacaggcctggatttctggtgtgaggaaggggctagcacctcccctgttgtgtagccagcacaggcacaatttgtgggtttggtggcaggtaggtggtgcgtgggagaaaggacagtgttagaggtccccactccgtggtctaggatcatgaaaggtgaacacacaagtacacaaatgtgccatgccctggcatggggcttatgtgtgcacaggcaaggcactcggtgtgtgtgtgcggaccccagggtcccaggtcatgtgaagcgtacgtgtgtgtgcattgtatgtgtgtgtacattgtgtgtgcattgtgtgtgcatgtggccaaacagatgtgacctcccagaacacagtacccctccacctctacccgagctcagacagccgagctctcccttgtcctgtgtgtgtgtcagtgtggccacgtgcgtaaccccaggtgggctgtcctgagctgggggcctgcctgtcccttcccagaacgcccctctgcaggacaggaagtctgccccaagtctggccacggccctcctgctcccatctcgggctgcttgggagacatcagagcaggccccagcccccagtcccctcttccggccgcctggacaggacccccattcagcccaggtgtttccggaagtcccacggccttggggccacaggagaagggttgaagcgtggctggggcaccactccccccacctggagtggcattgggcccacagctgcccatctctgggcctcaggtggaccaggggatctctaagggtctgctgtgccctttctatgcgtcctccacatcctatgatgtgcctgcttgttggctgctgtctgtgtgcgtcctggcatgttgtctggaggctggtgtcttttgcatgttcttggacaaatgtgtgctacctgcccaggcgcctgcaaccattgagcccacatgtgccccacgtgtgccctgcgggtggtcccgggcctggccagggctcagtgctcctcttccccctcctccctgttcccacccctcatgaagcacactgcgtgtccatcccatgtacccgtgggtcgacacacgctcttgccacgccctgagcgtgtacacatgatgtgttctatgcattcaccctgccccccagcccgccctgcagaggacaagatgggtggccccggctccctttcccctaaccgcccctgcccgctgtgcagccgtgtgcgttggcgtgtgtttctgtgtcactggcgtgtcacgtgatgtagccgtgtttgctgacatgagcccctgcccccttctctgtttctccgttggtttctagagctctctccctccccttctcagaggggacaggactcctggggcctggctggggcccagagccaggccgccctctcctgttagccctcagagtcccatttctgttagccctcagagtcccatttctattggtgaccaacttgcaaatggataaaacacaggaaaatcctgccccccccttcctccctgcatgtcctgtccccagagccccccaccccaccctgggccaggtcaggccctgtgggacgggagaaatagcaaccaatccaacagcggg

SEQ ID NO: 30791 - DNA, 3331 bp, Homo sapiens
  source 1..3331: mol_type = unassigned DNA
gcagagcgcgcggggcgcggttgccgtggcagcgccggctccagggagggctgctggcgccgggccgggaccgcggggcctgaggcggagaccggagagcccgaggcccggccggaggcagctcgggacaggcttgagcggcggggcgcgctgcccggccggcggggatgcgggaccggctgccagacctgacggcgtgtaggaagaatgatgatggagacacagttgttgtggttgagaaagatcatttcatggatgatttcttccatcaggtggaggagattagaaacagtattgataaaataactcaatatgttgaagaagtaaagaaaaaccacagcatcattctttctgcaccaaacccggaaggaaaaataaaagaagagcttgaagatctgaacaaagaaatcaagaaaactgcgaataaaattcgagccaagttaaaggctattgaacaaagttttgatcaggatgagagtgggaaccggacttcagtggatcttcggatacgaagaacccagcattcggtgctgtctcggaagtttgtggaagccatggcggagtacaatgaggcacagactctgtttcgggagcggagcaaaggccgcatccagcgccagctggagataactgggagaaccaccacagacgacgagctagaagagatgctggagagcgggaagccatccatcttcacttccgacattatatcagattcacaaattactagacaagctctcaatgaaatcgagtcacgtcacaaggacatcatgaagctggagaccagcatccgagagttgcatgagatgttcatggacatggctatgtttgtggagactcagggtgaaatgatcaacaacatagaaagaaatgttatgaatgccacagactatgtagaacacgctaaagaagaaacaaaaaaagctatcaaatatcagagcaaggcaagaaggaaattgatgttcattattatttgtgtaattgttttgcttgtgatccttggaattatcctagcaacaacattgtcctagcaaccatatcccaagagccatttatccttgagactcagaccacatctgcaaccaaatcagcatcctgtcatttcgtgaatgaatctcagacgctgtaacccggcatcgagtgctgaccttgtaatgtatgagttcacggaagaagcacaaccgaacgtcttgttcagtgacagcgccgtaagcacagtgggtgtgatgcgtgaccctgaatgacacactacagaatgtgagcagtgtgagacttctctcactggccttgaaataagaaaatattgaacattttaatattaaaaatatttcagtgttaacaaatgtgcatgaagtttaattaggaaggaatgctttatgttatgaaggcttttttttttttttttgagacggagtctcgctttgtcatccaggctggagtgcagtggtgcgatctcagctcactgcaacctcggcctcccgggttcaagcaattctcctgcctcagcctcccgagtagctgggattacaggcatgggccaccacacccagctaattttttgtgttttctttttagtagagacggggttttaccatgctggccaggctggcctcaaactcctgaccttgtgatccacccacctcagcctcccaaagtgctgggattacaggcgtgagtcaccgggcaggctgttctgaagcttttagatctcaggtctaaggcttcctttccctccctctcccagctagtttgtgctaattaagagaccttttatactgttttattgcctgtttgaagaaataatttttatcacgtttttgtaagatatctataattttaaatgtttataaattgtttaatttattagcatcttaatgtaccccatttttatatactgaatgtggccttttgagtgaaataggaagcttcatggtgttggagccacctttgtacagttgtttaaagtttcccattgtcacggaaaacattggctgcaaagcccctcaaagccctcaagtgccttctgtgagtttaaatgtgctggtgccctccagaaaagcctcggcctcagctccgtttccgcctgttccctcccccaggataatgaatggttactgcactgtaaagaccgtggtctcttttcactaaataggagattcgagtttcccagtttacatgaatgaagtctgaatttaagacggtgatgaaactgaggttcagtactctcgggactcgaggaaattattcctgagacatggagtaattcttacaaatttaaactattgtacagatccacatacatgttgttaagtacctaatgttttgctgaacttttaaaagttaatttccaaaatgtatagggattcatgataattaaacctttttattgctcatttttttagtagaagaatatcacttatttttagacttgtaaaatgtatgaactggtgagcggacatctgttaagagagtcactagtcagaatgttaaaggagtgcatgcaggatgccccaaatgtcgtgaactcttgttactcctgtatgtagtagtgtaagcatgtgacttttaacaccatttggtttgaaactaatgtagagatgcctgattccaaacaggtgtggagaatattgaatggctcagaagccgcgtcccttacttaacacaattccgaatctccctcatccatgatgcgtccattggatcactcgctggtggtcactgtgtggcagttactaggggaattctgcctctgactgttctttttcttttggtctttaaacaccctgtcgtgggatgtgctcactgatttgtggctatgttgaaggtatcacttgtcttgagggttttcaatatttcaggatcatgctggtggcaaaaggactccacgcctctgtggaatcatgtccacagggggacctgcctcccgtgatgtcccacctttccttcaaggtctgtcatatgagtcctccccttttacaacacttattatggtatttttcaagttattcttcttagatttgcagtacctactgaaatttgtgtttttatagttgaagttaggaaaatgctatttgatttgtatttagatatttaagtcacttgtccaatgatgtgtatgtctaagcctcatgtaccgatttgaagtcagacttaaaaatgtatttacagattcacttgagactttttaatcggttcttcaaatatttcatgtttacattaaaaatttccagagaagcataaaagtattcactttcctgccttgtcatttctggaaagattttggggagatattttattgcatattaattaataaattgttctactaggaaaa

SEQ ID NO: 30792 - DNA, 2151 bp, Homo sapiens
  source 1..2151: mol_type = unassigned DNA
gcggggcctgaggcggagaccggagagcccgaggcccggccggaggcagctcgggacaggcttgagcggcggggcgcgctgcccggccggcggggatgcgggaccggctgccagacctgacggcgtgtaggaagaatgatgatggagacacagttgttgtggttgagaaagatcatttcatggatgatttcttccatcaggtggaggagattagaaacagtattgataaaataactcaatatgttgaagaagtaaagaaaaaccacagcatcattctttctgcaccaaacccggaaggaaaaataaaagaagagcttgaagatctgaacaaagaaatcaagaaaactgcgaataaaattcgagccaagttaaaggctattgaacaaagttttgatcaggatgagagtgggaaccggacttcagtggatcttcggatacgaagaacccagcattcggtgctgtctcggaagtttgtggaagccatggcggagtacaatgaggcacagactctgtttcgggagcggagcaaaggccgcatccagcgccagctggagataactgggagaaccaccacagacgacgagctagaagagatgctggagagcgggaagccatccatcttcacttccgacattatatcagattcacaaattactagacaagctctcaatgaaatcgagtcacgtcacaaggacatcatgaagctggagaccagcatccgagagttgcatgagatgttcatggacatggctatgtttgtggagactcagggtgaaatgatcaacaacatagaaagaaatgttatgaatgccacagactatgtagaacacgctaaagaagaaacaaaaaaagctatcaaatatcagagcaaggcaagaaggaaaaagtggataattattgctgtgtcagtggttctggttgccataatcgctctaattattggcttgtcagttggcaaatgatggtgtggataacgtcagtgtgcatgcctctctgccagggtgggaaaattgatgttcattattatttgtgtaattgttttgcttgtgatccttggaattatcctagcaacaacattgtcctagcaaccatatcccaagagccatttatccttgagactcagaccacatctgcaaccaaatcagcatcctgtcatttcgtgaatgaatctcagacgctgtaacccggcatcgagtgctgaccttgtaatgtatgagttcacggaagaagcacaaccgaacgtcttgttcagtgacagcgccgtaagcacagtgggtgtgatgcgtgaccctgaatgacacactacagaatgtgagcagtgtgagacttctctcactggccttgaaataagaaaatattgaacattttaatattaaaaatatttcagtgttaacaaatgtgcatgaagtttaattaggaaggaatgctttatgttatgaaggcttttttttttttttttgagacggagtctcgctttgtcatccaggctggagtgcagtggtgcgatctcagctcactgcaacctcggcctcccgggttcaagcaattctcctgcctcagcctcccgagtagctgggattacaggcatgggccaccacacccagctaattttttgtgttttctttttagtagagacggggttttaccatgctggccaggctggcctcaaactcctgaccttgtgatccacccacctcagcctcccaaagtgctgggattacaggcgtgagtcaccgggcaggctgttctgaagcttttagatctcaggtctaaggcttcctttccctccctctcccagctagtttgtgctaattaagagaccttttatactgttttattgcctgtttgaagaaataatttttatcacgtttttgtaagatatctataattttaaatgtttataaattgtttaatttattagcatcttaatgtaccccatttttatatactgaatgtggccttttgagtgaaataggaagcttcatggtgttggagccacctttgtacagttgtttaaagtttcccattgtcacggaaaacattggctgcaaagcccctcaaagccctcaagtgccttctgtgagtttaaatgtgctggtgccctccagaaaagcctcggcctcagctccgtttccgcctgttccctccccc

SEQ ID NO: 30793 - DNA, 3231 bp, Homo sapiens
  source 1..3231: mol_type = unassigned DNA
agggtgacagatcgctataaactggtcataagccatgactaccagcaggacacaatcagccccacccaagaagacaaagaaaaacatctgggtgccacatcccgtgatggaaacaggagttttgcccattgaaaggaggtttgccaaggccaatggggtgatggaagatgtatagaagatttctagaactgccagattagccaggaaaaagtacatgggggtgtggagggaatgattgatctgaacaatgactgcaattgtagcatttccaccgaggctggtcagatacatcatcaggaagaccacaaaaatcagcatctggacctcagggtcaggtctaatggaagaggaaaaccagaggggagtggtacacttccacttccacttcttttcaacagacctggtggtggcttcctttataattgtggccttgatgttgcaccaagaagccttgttggacacttcacctttgggcccacagtctggcaagatcccttcctccatattccaataagcagctgacacaggatgatgatactgatgcggttgagattgctatcgacaacacggcttttatggacgagttcttttctgagattgaggaaactcggcttaacattgacaagatctcagaacatgtagaggaggctaagaaactctacagtatcattctctctgcaccgattccagagccaaaaaccaaggatgacctagagcagctcacgactgagattaagaaaagggccaacaacgtccggaacaaactgaagagcatggagaagcatattgaagaagatgaggtcaggtcatcggcagaccttcggattcggaaatcccagcactctgtcctttctcggaagtttgtggaggtgatgaccaaatacaatgaagctcaagtggacttccgagaacgcagcaaagggcgaatccagcggcagctcgaaattactggcaaaaagacaaccgatgaggagctggaggagatgttggagagtggcaacccggccatcttcacttctgggatcattgactcacagatttccaagcaagccctcagtgagattgagggacgacacaaggacattgtgaggctggagagcagcatcaaggagcttcacgacatgtttatggacatcgccatgctggtggagaatcagggtgagatgttagataacatagagttgaatgtcatgcacacagtggaccacgtggagaaggcacgagatgaaacgaaaaaagctgtgaaataccagagtcaggcccggaagaaattgataattatcattgtgctagtagttgtgttgctgggcattttagcattgattattggactttccgttgggctgaattaagagtggcctaagaggctgctgcactgaaataaactgatttcactccagactggtgtggccacccttgtcttcagatgagaatggagtctgaatggccttcctgagagcgagtgcgacccgttcctttgtttccttgcaaccacccttggacctgactcagctaacaatctagccctgggggaatgtgatctacctgatgcgaccctgagttctccccagagcctcctcctgccccaccagctctcaagtaccttttctcctggactgtgtggacccacccagctttcttcctccctgttgtgtgtcagattatgccttgcacttgggaaagctcttgtgagactctcccaaggtgctgtatttttctacctcatggagtattctcccagaaactgcaatgtatttttttaggggagtatctttaacaaagcagaatgattcttctaagtttggcaacaagaaggcttggatctgagtcttctacctggcaggatgccaatcctgtttgttgtccgtatgtcctgaaaacatgagggactggcagatgtcattttggtctaaagagctgacttgtttgaaattcagccttaaattaagctcttagttgttcagcttggggggcaactttgatttttctctgtgttgtagtctctcatatttactcaaggagggaccaggatgatacagtcatctgaggttatgctttgcaaaaggctgacggtatggaatatgtttccatgtctgagtcttagaaactggctgctcattgttagaaagtgatgctttgtgagactattgtcttggggccaaaaataatcagggattttaaattgggcaagggacaaggtgctagaatcctaagctctggaaatatttcatgacactggtgtattcactcatgtgttccagatgtattctaattgtgtatgaaatgtatgtacacataagtgtgtgtgtctcaggaagtaggaaataaaaatggaagctattatgacctcaaaaaaaaaaagccaactttgagctaggataaaaattgggtaaaggacatttgcttacctgcaaatgaatcactgtggaaatgtgatcttcccatatcatcaagaaacttgttttctggatgaatactgggagaataaaatgagaactctggagtgagctaaattgatcccaattaagtttttctgcttagcagacagaaggtataattttttgacaccctttcccacctggtgcctatgctaggcttgtcctgagaacatccctcagtaacttgatattcacatgacctacaggatgtcccatctgcagggctgagtcagttggggaacaccagaggctacacagtagctcttcctgctactcggttaatgagcttggcaggttctttgtctcactgaattcttatcatggaaacagcagcagcagccgctaggaaatcttcaagtgtagtgtctgtgctaacccagtggtaaatcccttagatcccctgctggtctctggcagtctccttgattttgggtaccatgtatattttccgctttgactttaacgctttctaggatagggtaagcacccttaattcaggcactgtccattagcttcctttgcaaaggctacttatggccggtcacaatccagcactcagacagagccaaggcaatatcctcttgcccatggctatgatgtcagacagtggatgggctccagcaacaagagacaaaataactaaaggcctttgctctcctctgacattgaggcctggggcttacagtttggaatacaacatgtgaaggtttttgttgttgtttgtattttttagatgtaaacttgattattttattgctaatttaaaaataaaaatgactttgtattgattgtg

SEQ ID NO: 30794 - DNA, 3299 bp, Homo sapiens
  source 1..3299: mol_type = unassigned DNA
agcttgtccccgcctagcaaggagtcggctaagaactggatcctagcgaggagcccggcacagacagcgaatgaccgcagccagacagtcgctcttgctcttcctcggccctgcggcaggatccgccggtgcaggggcctctccccggactccacgcgtgtctggagggctctcgggttagggaagggggctttggagacgccccgggcggccgggcggtggcgggacgcgggccctttaagaaggagcgaggggcgcggccaggtaggggcgggtccagggcggatcagcgctgcgccggcgccggcccgggagccggatttggagcgcgaggcgccggtgggggcggagggggctgcgcggcggaggctcccgtggcctcggacgctcctcctagctagcggccgccgcccgccgccgcctgcgcctccagctccttcgccccggcgggcccggccgccgcttccggcagctcacctgggaagcgctcacctgggacgcgctcacctgggacgcgctacctgcctccgggcgcctgggcttcaggatgaaggaccgtctggagcagctgaaggccaagcagctgacacaggatgatgatactgatgcggttgagattgctatcgacaacacggcttttatggacgagttcttttctgagattgaggaaactcggcttaacattgacaagatctcagaacatgtagaggaggctaagaaactctacagtatcattctctctgcaccgattccagagccaaaaaccaaggatgacctagagcagctcacgactgagattaagaaaagggccaacaacgtccggaacaaactgaagagcatggagaagcatattgaagaagatgaggtcaggtcatcggcagaccttcggattcggaaatcccagcactctgtcctttctcggaagtttgtggaggtgatgaccaaatacaatgaagctcaagtggacttccgagaacgcagcaaagggcgaatccagcggcagctcgaaattactggcaaaaagacaaccgatgaggagctggaggagatgttggagagtggcaacccggccatcttcacttctgggatcattgactcacagatttccaagcaagccctcagtgagattgagggacgacacaaggacattgtgaggctggagagcagcatcaaggagcttcacgacatgtttatggacatcgccatgctggtggagaatcagggtgagatgttagataacatagagttgaatgtcatgcacacagtggaccacgtggagaaggcacgagatgaaacgaaaaaagctgtgaaataccagagtcaggcccggaagaaattgataattatcattgtgctagtagttgtgttgctgggcattttagcattgattattggactttccgttgggctgaattaagagtggcctaagaggctgctgcactgaaataaactgatttcactccagactggtgtggccacccttgtcttcagatgagaatggagtctgaatggccttcctgagagcgagtgcgacccgttcctttgtttccttgcaaccacccttggacctgactcagctaacaatctagccctgggggaatgtgatctacctgatgcgaccctgagttctccccagagcctcctcctgccccaccagctctcaagtaccttttctcctggactgtgtggacccacccagctttcttcctccctgttgtgtgtcagattatgccttgcacttgggaaagctcttgtgagactctcccaaggtgctgtatttttctacctcatggagtattctcccagaaactgcaatgtatttttttaggggagtatctttaacaaagcagaatgattcttctaagtttggcaacaagaaggcttggatctgagtcttctacctggcaggatgccaatcctgtttgttgtccgtatgtcctgaaaacatgagggactggcagatgtcattttggtctaaagagctgacttgtttgaaattcagccttaaattaagctcttagttgttcagcttggggggcaactttgatttttctctgtgttgtagtctctcatatttactcaaggagggaccaggatgatacagtcatctgaggttatgctttgcaaaaggctgacggtatggaatatgtttccatgtctgagtcttagaaactggctgctcattgttagaaagtgatgctttgtgagactattgtcttggggccaaaaataatcagggattttaaattgggcaagggacaaggtgctagaatcctaagctctggaaatatttcatgacactggtgtattcactcatgtgttccagatgtattctaattgtgtatgaaatgtatgtacacataagtgtgtgtgtctcaggaagtaggaaataaaaatggaagctattatgacctcaaaaaaaaaaagccaactttgagctaggataaaaattgggtaaaggacatttgcttacctgcaaatgaatcactgtggaaatgtgatcttcccatatcatcaagaaacttgttttctggatgaatactgggagaataaaatgagaactctggagtgagctaaattgatcccaattaagtttttctgcttagcagacagaaggtataattttttgacaccctttcccacctggtgcctatgctaggcttgtcctgagaacatccctcagtaacttgatattcacatgacctacaggatgtcccatctgcagggctgagtcagttggggaacaccagaggctacacagtagctcttcctgctactcggttaatgagcttggcaggttctttgtctcactgaattcttatcatggaaacagcagcagcagccgctaggaaatcttcaagtgtagtgtctgtgctaacccagtggtaaatcccttagatcccctgctggtctctggcagtctccttgattttgggtaccatgtatattttccgctttgactttaacgctttctaggatagggtaagcacccttaattcaggcactgtccattagcttcctttgcaaaggctacttatggccggtcacaatccagcactcagacagagccaaggcaatatcctcttgcccatggctatgatgtcagacagtggatgggctccagcaacaagagacaaaataactaaaggcctttgctctcctctgacattgaggcctggggcttacagtttggaatacaacatgtgaaggtttttgttgttgtttgtattttttagatgtaaacttgattattttattgctaatttaaaaataaaaatgactttgtattgattgtgaaa

SEQ ID NO: 30795 - DNA, 1024 bp, Homo sapiens
  source 1..1024: mol_type = unassigned DNA
ggatttggagcgcgaggcgccggtgggggcggagggggctgcgcggcggaggctcccgtggcctcggacgctcctcctagctagcggccgccgcccgccgccgcctgcgcctccagctccttcgccccggcgggcccggccgccgcttccggcagctcacctgggaagcgctcacctgggacgcgctcacctgggacgcgctacctgcctccgggcgcctgggcttcaggatgaaggaccgtctggagcagctgaaggccaagcagctgacacaggatgatgatactgatgcggttgagattgctatcgacaacacggcttttatggacgagttcttttctgagaaaccaaggatgacctagagcagctcacgactgagattaagaaaagggccaacaacgtccggaacaaactgaagagcatggagaagcatattgaagaagatgaggtcaggtcatcggcagaccttcggattcggaaatcccagcactctgtcctttctcggaagtttgtggaggtgatgaccaaatacaatgaagctcaagtggacttccgagaacgcagcaaagggcgaatccagcggcagctcgaaattactggcaaaaagacaaccgatgaggagctggaggagatgttggagagtggcaacccggccatcttcacttctgggatcattgactcacagatttccaagcaagccctcagtgagattgagggacgacacaaggacattgtgaggctggagagcagcatcaaggagcttcacgacatgtttatggacatcgccatgctggtggagaatcagggatccatgattgaccgtattgagaacaacatggaccagtcagtgggctttgtggagcgggccgtggcagataccaaaaaggctgtcaagtatcagagtgaagcccggaggaaactgatttcactccagactggtgtggccacccttgtcttcagatgagaatggagtctgaatggccttcctgagagcgagtgcgacccgttcctttgtttccttgca

SEQ ID NO: 30796 - DNA, 1571 bp, Homo sapiens
  source 1..1571: mol_type = unassigned DNA
ctagctagcggccgccgcccgccgccgcctgcgcctccagctccttcgccccggcgggcccggccgccgcttccggcagctcacctgggaagcgctcacctgggacgcgctcacctgggacgcgctacctgcctccgggcgcctgggcttcaggatgaaggaccgtctggagcagctgaaggccaagcagctgacacaggatgatgatactgatgcggttgagattgctatcgacaacacggcttttatggacgagttcttttctgagattgaggaaactcggcttaacattgacaagatctcagaacatgtagaggaggctaagaaactctacagtatcattctctctgcaccgattccagagccaaaaaccaaggatgacctagagcagctcacgactgagattaagaaaagggccaacaacgtccggaacaaactgaagagcatggagaagcatattgaagaagatgaggtcaggtcatcggcagaccttcggattcggaaatcccagcactctgtcctttctcggaagtttgtggaggtgatgaccaaatacaatgaagctcaagtggacttccgagaacgcagcaaagggcgaatccagcggcagctcgaaattactggcaaaaagacaaccgatgaggagctggaggagatgttggagagtggcaacccggccatcttcacttctgggatcattgactcacagatttccaagcaagccctcagtgagattgagggacgacacaaggacattgtgaggctggagagcagcatcaaggagcttcacgacatgtttatggacatcgccatgctggtggagaatcagggtgagatgttagataacatagagttgaatgtcatgcacacagtggaccacgtggagaaggcacgagatgaaacgaaaaaagctgtgaaataccagagtcaggcccggaagaaactgatttcactccagactggtgtggccacccttgtcttcagatgagaatggagtctgaatggccttcctgagagcgagtgcgacccgttcctttgtttccttgcaaccacccttggacctgactcagctaacaatctagccctgggggaatgtgatctacctgatgcgaccctgagttctccccagagcctcctcctgccccaccagctctcaagtaccttttctcctggactgtgtggacccacccagctttcttcctccctgttgtgtgtcagattatgccttgcacttgggaaagctcttgtgagactctcccaaggtgctgtatttttctacctcatggagtattctcccagaaactgcaatgtatttttttaggggagtatctttaacaaagcagaatgattcttctaagtttggcaacaagaaggcttggatctgagtcttctacctggcaggatgccaatcctgtttgttgtccgtatgtcctgaaaacatgagggactggcagatgtcattttggtctaaagagctgacttgtttgaaattcagccttaaattaagctcttagttgttcagcttggggggcaactttgatttttctctgtgttgtagtctctcatattta

SEQ ID NO: 30797 - DNA, 534 bp, Homo sapiens
  source 1..534: mol_type = unassigned DNA
atgtttatggacatcgccatgctggtggagaatcagggtgagatgttagataacatagagttgaatgtcatgcacacagtggaccacgtggagaaggcacgagatgaaacgaaaaaagctgtgaaataccagagtcaggcccggaagaaattgataattatcattgtgctagtagttgtgttgctgggcattttagcattgattattggactttccgttgggctgaattaagagtggcctaagaggctgctgcactgaaattgtgtctcttcttattcctcctccttccatgtgaccaggggatctaaaagtcagcttattacagcattgagcattcaacttcatcttgaaagataagcaacagtgagatgaacaacctctcatagacaggtggttggttgattttttttttcccctcttttttctggcacttggagtctagcccttgacttttttgtatgtgaactttaaattttggtttggctctgaacaatctgattgaaatagatgttgaaattttaaaaagatataaga

SEQ ID NO: 30798 - DNA, 6363 bp, Homo sapiens
  source 1..6363: mol_type = unassigned DNA
agcttgtccccgcctagcaaggagtcggctaagaactggatcctagcgaggagcccggcacagacagcgaatgaccgcagccagacagtcgctcttgctcttcctcggccctgcggcaggatccgccggtgcaggggcctctccccggactccacgcgtgtctggagggctctcgggttagggaagggggctttggagacgccccgggcggccgggcggtggcgggacgcgggccctttaagaaggagcgaggggcgcggccaggtaggggcgggtccagggcggatcagcgctgcgccggcgccggcccgggagccggatttggagcgcgaggcgccggtgggggcggagggggctgcgcggcggaggctcccgtggcctcggacgctcctcctagctagcggccgccgcccgccgccgcctgcgcctccagctccttcgccccggcgggcccggccgccgcttccggcagctcacctgggaagcgctcacctgggacgcgctcacctgggacgcgctacctgcctccgggcgcctgggcttcaggatgaaggaccgtctggagcagctgaaggccaagcagctgacacaggatgatgatactgatgcggttgagattgctatcgacaacacggcttttatggacgagttcttttctgagattgaggaaactcggcttaacattgacaagatctcagaacatgtagaggaggctaagaaactctacagtatcattctctctgcaccgattccagagccaaaaaccaaggatgacctagagcagctcacgactgagattaagaaaagggccaacaacgtccggaacaaactgaagagcatggagaagcatattgaagaagatgaggtcaggtcatcggcagaccttcggattcggaaatcccagcactctgtcctttctcggaagtttgtggaggtgatgaccaaatacaatgaagctcaagtggacttccgagaacgcagcaaagggcgaatccagcggcagctcgaaattactggcaaaaagacaaccgatgaggagctggaggagatgttggagagtggcaacccggccatcttcacttctgggatcattgactcacagatttccaagcaagccctcagtgagattgagggacgacacaaggacattgtgaggctggagagcagcatcaaggagcttcacgacatgtttatggacatcgccatgctggtggagaatcagaaattgataattatcattgtgctagtagttgtgttgctgggcattttagcattgattattggactttccgttgggctgaattaagagtggcctaagaggctgctgcactgaaataaactgatttcactccagactggtgtggccacccttgtcttcagatgagaatggagtctgaatggccttcctgagagcgagtgcgacccgttcctttgtttccttgcaaccacccttggacctgactcagctaacaatctagccctgggggaatgtgatctacctgatgcgaccctgagttctccccagagcctcctcctgccccaccagctctcaagtaccttttctcctggactgtgtggacccacccagctttcttcctccctgttgtgtgtcagattatgccttgcacttgggaaagctcttgtgagactctcccaaggtgctgtatttttctacctcatggagtattctcccagaaactgcaatgtatttttttaggggagtatctttaacaaagcagaatgattcttctaagtttggcaacaagaaggcttggatctgagtcttctacctggcaggatgccaatcctgtttgttgtccgtatgtcctgaaaacatgagggactggcagatgtcattttggtctaaagagctgacttgtttgaaattcagccttaaattaagctcttagttgttcagcttggggggcaactttgatttttctctgtgttgtagtctctcatatttactcaaggagggaccaggatgatacagtcatctgaggttatgctttgcaaaaggctgacggtatggaatatgtttccatgtctgagtcttagaaactggctgctcattgttagaaagtgatgctttgtgagactattgtcttggggccaaaaataatcagggattttaaattgggcaagggacaaggtgctagaatcctaagctctggaaatatttcatgacactggtgtattcactcatgtgttccagatgtattctaattgtgtatgaaatgtatgtacacataagtgtgtgtgtctcaggaagtaggaaataaaaatggaagctattatgacctcaaaaaaaaaaagccaactttgagctaggataaaaattgggtaaaggacatttgcttacctgcaaatgaatcactgtggaaatgtgatcttcccatatcatcaagaaacttgttttctggatgaatactgggagaataaaatgagaactctggagtgagctaaattgatcccaattaagtttttctgcttagcagacagaaggtataattttttgacaccctttcccacctggtgcctatgctaggcttgtcctgagaacatccctcagtaacttgatattcacatgacctacaggatgtcccatctgcagggctgagtcagttggggaacaccagaggctacacagtagctcttcctgctactcggttaatgagcttggcaggttctttgtctcactgaattcttatcatggaaacagcagcagcagccgctaggaaatcttcaagtgtagtgtctgtgctaacccagtggtaaatcccttagatcccctgctggtctctggcagtctccttgattttgggtaccatgtatattttccgctttgactttaacgctttctaggatagggtaagcacccttaattcaggcactgtccattagcttcctttgcaaaggctacttatggccggtcacaatccagcactcagacagagccaaggcaatatcctcttgcccatggctatgatgtcagacagtggatgggctccagcaacaagagacaaaataactaaaggcctttgctctcctctgacattgaggcctggggcttacagtttggaatacaacatgtgaaggtttttgttgttgtttgtattttttagatgtaaacttgattattttattgctaatttaaaaataaaaatgactttgtattgattgtgaaacggttctggctctgtctcgatgcagaaacacaatgatctggtgccaccatgtggtgatttttattcaggttttagaatgcagttcacacctttttaagccatgtgctggatcagatggttcaaaagtgcaatttttgaacatggtttaactcccacagaatgcagtgtaactatgtttgtgtttcagatttgaggtgttccccccaaaagaatttggttcagtccttgggagtatctggctttaggaggaaatgggggagatctgtcacgatgttatctagaaggtggaatgaccataccaaacatccttttaatctaacttgaatgtctcaccaaaaataacatttctgttggcattctgggtcctagaagccagatccatctcctttttccttctgttgctctcttccttcacaccctcttccatgtccacatgcacttatctccctgcagaatactttttgcgatgatgtttctcatgtattctttctttccttgtctggatgagcagaagaagatcatgatcatgatctgctgtattatccttgcgatcatcttagcttccaccattgggagcatatttgcctgaaaaaggtgagccatctgtggggagggtcagaccttctttcactgacttgaaacctttgtgtcttgggggcactctaggtgccttaatctgggtgggattaggtgctaataatggttagagaaaactaaagaaagggatgtttcagagacagaaaagtgagtgaagaatgaactgttagtaggtagtctgtgggaggaggggggagacagaaggtggcaatctgtcctataacctggtgtggcagaatgctttgtacaggtgaaggatagtgattcctgctaaacagtttgagccttggtatctggaagtgacaaaaagaacaagaattagttcttgcattaggtgcatcttgaactttttggaagagggccggccacacagtaaattcaaattaaatttcttccctttcaaggttaatgaaagttaacacagccttgtatgtagtcctttaccccgggtaagagggatttggtgatcccagccacgaacaccatgctatataatctatgatttttttcctccatttttctgttatctcccacagccctcacagattgatcgactggcatttctaatcctccttccacttctgtggtaccatcacttctccacgcagactcctcatcagcttctcctctttccattatgaaacttcttaagaaacagggcaccaatcaactacttattaagaattatgcaaagaataaacgtatacagaattgggcggaggacagggacagggagtacagatacatagctgattaggcagatggtttaaaggaggactgcagggtagagaagcaagcagagtgggcgcctctttaggaagtgacacagcctgcatgtgcagtatggctgtgaaggggcagatatcatagcacacctaactcaacaggatcttacttgaactgctgtgagttggtcaagtcagggcacttctgctcttcaggctcctctaggtcacacctttgaccaccctacatctgtttcctctttcaggctccagtagtagtcttaaaagtgaagtttatctaaggataagcacatgcctatcttgctcactgctgtgtccccactttttagcacagcgcctgctgcttacaggtactcaaatatctgctgacttaattacttataattaagctcttatttcagtcatggacaaatccttgggtttgactcctaaactctttaaggtaccaatgagaacgtggtttgttactgtcagaggctgtgtaaagccgcttgggaatgggctgatctgcttatgcaaaaatgctaccaacctttcaaaccccattaccacaacatgaaaatttaaagtgctttttctatgggtggtgatggtggagttctagcaacagcctcttaatctgtggagaagatggctggctccaggactgtggttcaataacgaaatacaggcccacaaaataaaataggtttatagcatgactgaactcacacatcagtagaacactctgtgaaccataacaaagaacagataaaggtgtcaagtgagaaaggtgaaatgaggttatcactcacttcacctctcacctgatttgtgttgctagctgaaactgctggccagtaacgtatgtataagaaactgttataggccgggcacggtggctcatgcctgtaatcacagcactttgggaggccaaggcaggtggatcaccagactgaccaacatagtgaaaccccctctctacaaaaaatacaaaaattagccaggcatggtggcttgcacctgtattcccagctacttgggaggctgaggcaggagaattgcttgaatgcaagaggcggaagttgcagtgagccgagatcgcgccactgcactccagcctgggcaacaagagctaaattccatctaaaaaaaaaaaaaaaacaaaaaaaaaaaactgttcttaatacttaatactgtccccaattccattcaaggttcagttgtgttcagctttaaaaccagctatgtgaatgtgagttctagtgcagattatttagtgattatgtaactaaaattgatgaaaaaatcacactatacaactgtgaggagcacacaactgctaagtttgtacttttgaaagtaaattattctttgtttgataccttattttttaagaaagtgggattaaaaatattttggtcagtgctgttttctacccaccttcaaaagccaatggtttgatatttctattaatttgtgcttcctttagttttaataggggatagaagactgcagctggttgggtctggaaaacattaatctgggcaaacggagctggagctatgaggatctgagtcctagggggccctcattcactagcagtaagaatttaagtggtgcatggcacatagcactgtactagattctgcaggggcacaaacatagagccaaacactctccctcttggagaatttcagacccagaaaaggccacgcagttctaacttttgtcatcggttccttttgctaaaaggcaaagggtatgttccttgcctattgtccaacataccccttccaagattgtgagaagatgggtagctgggcatcaataaatattgaatcaattgacct

SEQ ID NO: 30799 - DNA, 1481 bp, Homo sapiens
  source 1..1481: mol_type = unassigned DNA
cccagcctcgggcaaggaagagacgcgaccatgtgcgcatgccccgaatttatcacggaggggcggggctgaggctgcgggagctggagcggggaagaaaagggaattccaacctgtggaaccttggggggtccccggggtcggcgccttcccattgactgtgggcggtgcaagggacggagcctctggcggctcgtgggggtgttggggtccgcagggggagggaggggagtgtcagagtgtgagcggggtacgggaattccaaatttgagggcctcccggctctggcgccggggagggagagctcaggccgccatgcgggacaggacccacgagctgagacagggggatgacagctcggacgaagaggacaaggagcgggtcgcgctggtggtgcacccgggcacggcacggctggggagcccggacgaggagttcttccacaaggtccggacaattcggcagactattgtcaaactggggaataaagtccaggagttggagaaacagcaggtcaccatcctggccacgccccttcccgaggagagcatgaagcaggagctgcagaacctgcgcgatgagatcaaacagctggggagggagatccgcctgcagctgaaggccatagagccccagaaggaggaagctgatgagaactataactccgtcaacacaagaatgagaaaaacccagcatggggtcctgtcccagcaattcgtggagctcatcaacaagtgcaattcaatgcagtccgaataccgggagaagaacgtggagcggattcggaggcagctgaagatcaccaatgctgggatggtgtctgatgaggagttggagcagatgctggacagtgggcaaagcgaggtgtttgtgtccaatatcctgaaggacacgcaggtgactcgacaggccttaaatgagatctcggcccggcacagtgagatccagcagcttgaacgcagtattcgtgagctgcacgacatattcacttttctggctaccgaagtggagatgcagggggagatgatcaatcggattgagaagaacatcctgagctcagcggactacgtggaacgtgggcaggagcacgtcaagacggccctggagaaccagaagaaggcgaggaagaagaaagtcttgattgccatctgtgtgtccatcaccgtcgtcctcctagcagtcatcattggcgtcacagtggttggataatgtcgcacattgttggcactaggagcaccaggaacccagggcctggccttctctcccagcagcctggggggcagggcagagcctccagtcggaccccttcctcacactggcccctatgcagaagggcagacagttcttctggggttggcagctgctcattcatgatggcctcctccttcaggcctcaatgcctgggggaggcctgcactgtcctgattggccgggacacacggttttgtaaaaaattaaaaaacaaaaaaagagcatagaaa

SEQ ID NO: 30800 - DNA, 1498 bp, Homo sapiens
  source 1..1498: mol_type = unassigned DNA
acccactgcctcgaaaggcctctgggggtggtcggcgcgcccctccccacctcgcgggggccgtgtgggcgtcgctcggtcgttggggtgccggggacgtcgtgatgagaacggcgtcccagagacggcggtgacagagccgggacacgtgacagtcacagggtcacattctgcggtccacgagtttgggaccgggctggtcacgtgacgcgatttccgttggaagatgcaacggttccggtgacggtagcaagttctcgcgtccaggcatctccgcttccgctcggggcgcaacaacttccgactccaccttcccagcctcgggcaaggaagagacgcgaccatggggatgacagctcggacgaagaggacaaggagcgggtcgcgctggtggtgcacccgggcacggcacggctggggagcccggacgaggagttcttccacaagccctctcggtcaccctccccaggtccggacaattcggcagactattgtcaaactggggaataaagtccaggagttggagaaacagcaggtcaccatcctggccacgccccttcccgaggagagcatgaagcaggagctgcagaacctgcgcgatgagatcaaacagctggggagggagatccgcctgcagctgaaggccatagagccccagaaggaggaagctgatgagaactataactccgtcaacacaagaatgagaaaaacccagcatggggtcctgtcccagcaattcgtggagctcatcaacaagtgcaattcaatgcagtccgaataccgggagaagaacgtggagcggattcggaggcagctgaagatcaccaatgctgggatggtgtctgatgaggagttggagcagatgctggacagtgggcaaagcgaggtgtttgtgtccaatatcctgaaggacacgcaggtgactcgacaggccttaaatgagatctcggcccggcacagtgagatccagcagcttgaacgcagtattcgtgagctgcacgacatattcacttttctggctaccgaagtggagatgcagggggagatgatcaatcggattgagaagaacatcctgagctcagcggactacgtggaacgtgggcaggagcacgtcaagacggccctggagaaccagaagaaggcgaggaagaagaaagtcttgattgccatctgtgtgtccatcaccgtcgtcctcctagcagtcatcattggcgtcacagtggttggataatgtcgcacattgttggcactaggagcaccaggaacccagggcctggccttctctcccagcagcctggggggcagggcagagcctccagtcggaccccttcctcacactggcccctatgcagaagggcagacagttcttctggggttggcagctgctcattcatgatggcctcctccttcaggcctcaatgcctgggggaggcctgcactgtcctgattggccgggacacacggttttgtaaaaaattaaaaaacaaaaaaagagcat

SEQ ID NO: 30801 - DNA, 1794 bp, Homo sapiens
  source 1..1794: mol_type = unassigned DNA
gggggtggggttacgtgtaggtgacgtggccgcttccagtctttggtcgggtttcggcggcttcagtgctcggggaggaggcagtgacggccggtgagattggaagtggcggcggcggcaggcggcagaggggagtccgaggttatgcgtctcaatgatcccgcggaaacgctacgggtctaagaacacggatcagggtgtctacctgggtctctcaaagacacaggtcctgtcccctgcaactgctggcagtagcagcagcgacatcgcccctctgccccccccagtgaccctcgtccctccccctcccgacaccatgtcctgccgggatcggacccaggagtttctgtctgcctgcaagtcgctgcagacccgtcagaatggaatccagacaaataagccagctttgcgtgctgtccgacaacgcagtgaattcaccctcatggccaagcgcattgggaaagaccttagcaacacatttgccaagctggagaagctgacaatcttggcaaagcgcaagtccctctttgatgataaagcagtggaaattgaagagctaacatatatcatcaaacaggacatcaatagcctcaacaaacaaattgctcagctccaggatttcgtgagagccaagggcagccagagtggccggcacctgcagacccactccaacaccattgtggtctccttgcagtcgaaactggcttctatgtccaatgacttcaaatcggttttagaagtgaggacagagaacctgaagcagcagaggagccggagagagcagttctcccgggcacctgtgtcagccctgccccttgcccctaaccacctgggcggtggtgctgtggttctgggggcagagtcccatgcctccaaggatgtcgccatcgacatgatggactctcggaccagccagcagctgcagctcattgacgagcaggattcctacatccagagtcgggcagacaccatgcagaacattgagtcgacaattgttgagttgggctccatctttcagcagttggcacacatggttaaggaacaggaggaaaccattcagaggatcgacgagaacgtgctaggagcccagctggacgttgaggccgcccattcagagatcctcaagtacttccagtctgtcacctccaaccggtggctcatggtcaaaatcttcctcatcctcattgtcttcttcatcatctttgtggtcttccttgcttgaaccctctctactctgaggcactctgttggggtttgggaccctcctgggaaggcaagtggccagtgctgccactgagcctgtgcagggtacttgggagaaaggccctgtttccctggaactgctaagaatgaccactgcccctgatcccccaccccttgcctctggccaccctgtcctccccccaccaccctcaggcctatgaaacacacagggttctagatttgaactctgctgtgaagtgactggaagggagcagaggccagctgggggccagtgggggaggttgtttccactaggagatttttataaaccctctccagcctctcccaaaggaagcgttggcagcaaagggagatgatgcccttacccaccttcctgtgagtgaagagaggaagcagccccagggaccaattttcccaattgacctctttcttcctctttcaccatgtgaggcagggagccctgagcccttcagctgcctgcacaacccctgacattggctgctggtgactcaatctgccaaatgtgctgcagctcgttttctcccaattacagcaagactgtcagcctca

SEQ ID NO: 30802 - DNA, 1785 bp, Homo sapiens
  source 1..1785: mol_type = unassigned DNA
cgggtttcggcggcttcagtgctcggggaggaggcagtgacggccggtgagattggaagtggcggcggcggcaggcggcagaggggagtccgaggttatgcgtctcaatgatcccgcggaaacgctacgggtctaagaacacggatcagggtgtctacctgggtctctcaaagacacaggtcctgtcccctgcaactgctggcagtagcagcagcgacatcgcccctctgccccccccagtgaccctcgtccctccccctcccgacaccatgtcctgccgggatcggacccaggagtttctgtctgcctgcaagtcgctgcagacccgtcagaatggaatccagacaaataagccagctttgcgtgctgtccgacaacgcagtgaattcaccctcatggccaagcgcattgggaaagaccttagcaacacatttgccaagctggagaagctgacaatcttggcaaagcgcaagtccctctttgatgataaagcagtggaaattgaagagctaacatatatcatcaaacaggacatcaatagcctcaacaaacaaattgctcagctccaggatttcgtgagagccaagggcagccagagtggccggcacctgcagacccactccaacaccattgtggtctccttgcagtcgaaactggcttctatgtccaatgacttcaaatcggttttagaagtgaggacagagaacctgaagcagcagaggagccggagagagcagttctcccgggcacctgtgtcagccctgccccttgcccctaaccacctgggcggtggtgctgtggttctgggggcagagtcccatgcctccaaggatgtcgccatcgacatgatggactctcggaccagccagcagctgcagctcattgacgagcaggattcctacatccagagtcgggcagacaccatgcagaacattgagtcgacaattgttgagttgggctccatctttcagcagttggcacacatggttaaggaacaggaggaaaccattcagagtgtccttttgtttcctcttctcccggccttgtccccaggatcgacgagaacgtgctaggagcccagctggacgttgaggccgcccattcagagatcctcaagtacttccagtctgtcacctccaaccggtggctcatggtcaaaatcttcctcatcctcattgtcttcttcatcatctttgtggtcttccttgcttgaaccctctctactctgaggcactctgttggggtttgggaccctcctgggaaggcaagtggccagtgctgccactgagcctgtgcagggtacttgggagaaaggccctgtttccctggaactgctaagaatgaccactgcccctgatcccccaccccttgcctctggccaccctgtcctccccccaccaccctcaggcctatgaaacacacagggttctagatttgaactctgctgtgaagtgactggaagggagcagaggccagctgggggccagtgggggaggttgtttccactaggagatttttataaaccctctccagcctctcccaaaggaagcgttggcagcaaagggagatgatgcccttacccaccttcctgtgagtgaagagaggaagcagccccagggaccaattttcccaattgacctctttcttcctctttcaccatgtgaggcagggagccctgagcccttcagctgcctgcacaacccctgacattggctgctggtgactcaatctgccaaatgtgctgcagctcgttttctcccaattacagcaagactgtcagcctca

SEQ ID NO: 30803 - DNA, 1568 bp, Homo sapiens
  source 1..1568: mol_type = unassigned DNA
tcgggtttcggcggcttcagtgctcggggaggaggcagtgacggccggtgagattggaagtggcggcggcggcaggcggcagaggggagtgaccctcgtccctccccctcccgacaccatgtcctgccgggatcggacccaggagtttctgtctgcctgcaagtcgctgcagacccgtcagaatggaatccagacaaataagccagctttgcgtgctgtccgacaacgcagtgaattcaccctcatggccaagcgcattgggaaagaccttagcaacacatttgccaagctggagaagctgacaatcttggcaaagcgcaagtccctctttgatgataaagcagtggaaattgaagagctaacatatatcatcaaacaggacatcaatagcctcaacaaacaaattgctcagctccaggatttcgtgagagccaagggcagccagagtggccggcacctgcagacccactccaacaccattgtggtctccttgcagtcgaaactggcttctatgtccaatgacttcaaatcggttttagaagtgaggacagagaacctgaagcagcagaggagccggagagagcagttctcccgggcacctgtgtcagccctgccccttgcccctaaccacctgggcggtggtgctgtggttctgggggcagagtcccatgcctccaaggatgtcgccatcgacatgatggactctcggaccagccagcagctgcagctcattgacgagcaggattcctacatccagagtcgggcagacaccatgcagaacattgagtcgacaattgttgagttgggctccatctttcagcagttggcacacatggttaaggaacaggaggaaaccattcagaggatcgacgagaacgtgctaggagcccagctggacgttgaggccgcccattcagagatcctcaagtacttccagtctgtcacctccaaccggtggctcatggtcaaaatcttcctcatcctcattgtcttcttcatcatctttgtggtcttccttgcttgaaccctctctactctgaggcactctgttggggtttgggaccctcctgggaaggcaagtggccagtgctgccactgagcctgtgcagggtacttgggagaaaggccctgtttccctggaactgctaagaatgaccactgcccctgatcccccaccccttgcctctggccaccctgtcctccccccaccaccctcaggcctatgaaacacacagggttctagatttgaactctgctgtgaagtgactggaagggagcagaggccagctgggggccagtgggggaggttgtttccactaggagatttttataaaccctctccagcctctcccaaaggaagcgttggcagcaaagggagatgatgcccttacccaccttcctgtgagtgaagagaggaagcagccccagggaccaattttcccaattgacctctttcttcctctttcaccatgtgaggcagggagccctgagcccttcagctgcctgcacaacccctgacattggctgctggtgactcaatctgccaaatgtgctgcagctcgttttct

SEQ ID NO: 30804 - DNA, 991 bp, Homo sapiens
  source 1..991: mol_type = unassigned DNA
agtctttggtcgggtttcggcggcttcagtgctcggggaggaggcagtgacggccggtgagattggaagtggcggcggcggcaggcggcagaggggagaatggaatccagacaaataagccagctttgcgtgctgtccgacaacgcagtgaattcaccctcatggccaagcgcattgggaaagaccttagcaacacatttgccaagctggagaagctgacaatcttggcaaagcgcaagtccctctttgatgataaagcagtggaaattgaagagctaacatatatcatcaaacaggacatcaatagcctcaacaaacaaattgctcagctccaggatttcgtgagagccaagggcagccagagtggccggcacctgcagacccactccaacaccattgtggtctccttgcagtcgaaactggcttctatgtccaatgacttcaaatcggttttagaagtgaggacagagaacctgaagcagcagaggagccggagagagcagttctcccgggcacctgtgtcagccctgccccttgcccctaaccacctgggcggtggtgctgtggttctgggggcagagtcccatgcctccaaggatgtcgccatcgacatgatggactctcggaccagccagcagctgcagctcattgacgagcaggattcctacatccagagtcgggcagacaccatgcagaacattgagtcgacaattgttgagttgggctccatctttcagcagttggcacacatggttaaggaacaggaggaaaccattcagaggatcgacgagaacgtgctaggagcccagctggacgttgaggccgcccattcagagatcctcaagtacttccagtctgtcacctccaaccggtggctcatggtcaaaatcttcctcatcctcattgtcttcttcatcatctttgtggtcttccttgcttgaaccctctctactctgaggcactctgttggggtttgggaccctcctgggaa

SEQ ID NO: 30805 - DNA, 1090 bp, Homo sapiens
  source 1..1090: mol_type = unassigned DNA
gagggccgctgtcactcagccccgcgggccaatagaaaaggggtgaaccccgccttcttcctgagttgtgctgcgggcatgcgcactgggcgtccccacgccaccgcccatcagctgagaattgcagctgagggctccggggtaggtgggtgacggcggtcggaggtgtaggagggagccgtggaggtccaggtgactgcttagaaaactgcacagcatctgatgaaattagcgaataagaacatcaaccatgtcttacactccaggagttggtggtgaccccgcccagttggcccagaggatctcttctaacatccagaagatcacacagtgttctgtggaaatacaaagaactctgaatcaacttggaacacctcaagattcacctgaattgaggcaacagttgcaacagaagcagcagtatactaaccagcttgccaaagaaacagataagtacattaaagagtttggatctctgcccaccacccccagtgaacagcgtcaaaggaaaatacagaaggatcgcttagtggcagagttcacaacatcactgacaaacttccagaaggtccagaggcaggctgctgagcgagagaaagagtttgttgctcgagtaagagccagttccagagtgtctggcagttttcctgaggacagctcaaaagaaaggaatcttgtatcctgggaaagccaaactcaacctcaagtgcaggtgcaggatgaagaaattacagaggatgacctccgtcttattcatgagagagaatcttctatcaggcaacttgaagctgatattatggatattaatgaaatatttaaagatttgggaatgatgattcatgaacaaggagatgtaatagatagcatagaagccaatgtggaaaatgcagaggtgcacgttcagcaagcaaatcagcagctgtcaagggcagcagattatcagaaaaaggattcctgcatgttgatgtgaggtacaaacgccattaaagaaatctacaactgaaccaggaatgaagaacggaacaaaattcttaaccattcggttttcaatgacagcattatgattttgtttgctctgtggttttgtttg

SEQ ID NO: 30806 - DNA, 3689 bp, Homo sapiens
  source 1..3689: mol_type = unassigned DNA
aggtgactgcttagaaaactgcacagcatctgatgaaattagcgaataagaacatcaaccatgtcttacactccaggagttggtggtgaccccgcccagttggcccagaggatctcttctaacatccagaagatcacacagtgttctgtggaaatacaaagaactctgaatcaacttggaacacctcaagattcacctgaattgaggcaacagttgcaacagaagcagcagtatactaaccagcttgccaaagaaacagataagtacattaaagagtttggatctctgcccaccacccccagtgaacagcgtcaaaggaaaatacagaaggatcgcttagtggcagagttcacaacatcactgacaaacttccagaaggtccagaggcaggctgctgagcgagagaaagagtttgttgctcgagtaagagccagttccagagtgtctggcagttttcctgaggacagctcaaaagaaaggaatcttgtatcctgggaaagccaaactcaacctcaagtgcaggtgcaggatgaagaaattacagaggatgacctccgtcttattcatgagagagaatcttctatcaggcaacttgaagctgatattatggatattaatgaaatatttaaagatttgggaatgatgattcatgaacaaggagatgtaatagatagcatagaagccaatgtggaaaatgcagaggtgcacgttcagcaagcaaatcagcagctgtcaagggcagcagattatcagcgcaaatccagaaaaaccctgtgcatcatcattcttatccttgtcattggagttgcgattatcagtctcatcatatggggattgaaccactgaagttataaaggagcacactgtcgcactacattgtctaaattatgtaggaagattcctgtaatcatgtttttttaattattattttaaagctattgtataaaggatggttcccatactttgttatttttattgggggggttggggtggttcctttggattaaatctgatattttctaatactgaaagattttctaaatgtcactgctgacataactcccttggtcttcaatttaatagttgttaagtttttgcccacattgcatatgcctttcatttataatttatttaccctgcttgacttagttttgggaattcgtaaatttaaaggtgtgtgtattctgtttgcatctccctgtcactgtgacacacctagatgtgtgttacttcaattaaaattctcaaatttaattttgatttgcttcagcagggaaaatattctcaataatgtaaaataattaaggtctatacatgggttgtatttttctggttcacaacagcacaaagtgtctttcatttttttgttggttttcttttaagatcttttttaccctgaagtcggtgaatacttttctagtttatttgatactctttctgtgtatatattaagcttttgctgtagattgcctagtaaaattactaaggataggttgtttttacatatggtctatttaagtctgatgtttacgggggaaagtgtagttactaaaaatgtttaacataatttggaagaagagtatgaacaaccaataccaatacctattgcgtttggattcttaagaccccagtttgttattccactaaactagttatcttaaccatatcatctggttttgtgggccattatttaccttcccttatgtcttatagaataatggttaatatttttaggtcaaaattacttttggaaagtaactttcccacaattaactgtttttgagcacctgacaaaatttagtgtttaccttgcgtgccattttgtgtcatccttcattaaaaaagcaattggaggtttgccagttatctcacttccctttttaaatcaatgttgttttaatgcactaatctgaattctgtaaagaggattatcttagtttatactttgtattttataatgttcttgtatagcagctcggtactgaaggcggtgtttaacttggcaagctctgagacttcaaatgggaacaaatagtaagtagctaagtaaaccacatctttgcaaccaaaataaagatgagttaaaaggtatctggttaggcctatttcatgaggactatgctctggtgggaccacaggtcacctgatacttagtgctgtgctgcctgaaacctcagcatggagacatcaccacatgcactgtggccattcagcatctttctggagcaccagttcactccaggtttttattttagggtgtcatcgattttacctactttgtcagactggtagaagttgctttgcatatcagaaaaactccatttttttccacaaaagggattacagaaaactcttttgtgagtgagtgattggaacttagagactcctgttgccagaatcagactgccctagaacagaatggacaatgcagggaggagaattcacacaaacagcacctgttctgaggcctgtgccagcccaccaggcctgctcaaatgtggtctttacttcaagtgcacagaggcacatgaggtttctggtgataaaccagcgtcttaccgctgttttaaagtcccatccccatggctttcacaatcagttccgttttttttgctgtacttgataaaatgtttattctcatacaggtcaagtacatttacttctattcacagtgagtacccaataacaacaaaagcgcttacaaatttggggggcgtgattttagtacctttatttgaagtgtaatcattttaaattattattattttaactggggcagttatcagtggtttaaacaggaactttagtggcttcaatttgtttaagaaacatattaagtttgagggaaaaatttcccatgaaatatttggaacgtaagagtagtattgattagagaaaattaaataagaaacatagtatggtagccaaattttttaaaaaatcttgaacttttctgtaggtcagttttagaactgctgtgaaaagtgaaggttgccctgtggagattaaaattagagttgttttcataactgacagcatggtgaatccatttgagtcaaagtgaagaatttcctcatcaagtgactatacatttgtttttgtgtgctcaaaagaaatactcaaacacagactgatattaaccagccaggtaaattgaacgacaatgtggcattaggtatttggctgtttattggtcgttaaatactatggttttgcaatatgattgatggtaaaagagtgatgtcatattgatactagagtagcttgtttttttagtaggtgtgggaccatctcttttacaagtgcaactcagtctaggacagccatggatgcagtgtctggagttggaccctctgagcccgctggctgccccagtagcatctgcattggtgaccaaggacactgcactttgaagaggtcgccactgggttatttagtgtcttcactgcttttgttaaaaattgtaaaattttgtacacaaaaagttgtgtttttgaatatcaattgtttagacacacctacaatgataaataagtgcctttaaaggcccctctttccatgaaatacatctgtggtttagcaaggaaagtacaaaatagtttatgtagttggtataatttttatttgtgtcttcatgtagaaaaaatgaatgtcataataaaatataaaacttacgtaaagaaaataaa

SEQ ID NO: 30807 - DNA, 1085 bp, Homo sapiens
  source 1..1085: mol_type = unassigned DNA
ccggggtaggtgggtgacggcggtcggaggtgtaggagggagccgtggaggtccaggtgactgcttagaaaactgcacagcatctgatgaaattagcgaataagaacatcaaccatgtcttacactccaggagttggtggtgaccccgcccagttggcccagaggatctcttctaacatccagaagatcacacagtgttctgtggaaatacaaagaactctgaatcaacttggaacacctcaagattcacctgaattgaggcaacagttgcaacagaagcagcagtatactaaccagcttgccaaagaaacagataagtacattaaagagtttggatctctgcccaccacccccagtgaacagcgtcaaaggaaaatacagaaggatcgcttagtggcagagttcacaacatcactgacaaacttccagaaggtccagaggcaggctgctgagcgagagaaagagtttgttgctcgagtaagagccagttccagagtgtctggcagttttcctgaggacagctcaaaagaaaggaatcttgtatcctgggaaagccaaactcaacctcaagtgcaggtgcaggatgaagaaattacagaggatgacctccgtcttattcatgagagagaatcttctatcaggcaacttgaagctgatattatggatattaatgaaatatttaaagatttgggaatgatgattcatgaacaaggagatgtaatagatagcatagaagccaatgtggaaaatgcagaggtgcacgttcagcaagcaaatcagcagctgtcaagggcagcagattatcagcgcaaatccagaaaaaccctgtgcatcatcattcttatccttgtcattggagttgcgattatcagtctcatcatatggggattgaaccactgaagttataaaggagcacactgtcgcactacattgtctaaattatgtaggaagattcctgtaatcatgtttttttaattattattttaaagctattgtataaaggatggttcccatactttgttatttttattgggggggttggggtggttcctttggattaaatctgatattttctaatactgaaa

SEQ ID NO: 30808 - DNA, 967 bp, Homo sapiens
  source 1..967: mol_type = unassigned DNA
ctgattatagttctgaggccctagctactcactttgcaaactccaggctccggtcgcgcacgggacgaactgcggggagtgagccgcgcgggccgccgtagtcagctgctaagagcaggaagagtccgagcggcgggcggagtctgcaggatggcaccggacccctggttctccacatacgattctacttgtcaaattgcccaagaaattgctgagaaaattcaacaacgaaatcaatatgaaagaaaaggtgaaaaggcaccaaagcttaccgtgacaatcagagctttgttgcagaacctgaaggaaaagatcgcccttttgaaggacttattgctaagagctgtgtcaacacatcagataacacagcttgaaggggaccgaagacagaacctcttggatgatcttgtaactcgagagagactacttctggcatcctttaagaatgagggtgccgaaccagatctaatcaggtccagcctgatgagtgaagaggctaagcgaggagcacccaacccttggctctttgaggagccagaggagaccagaggcttgggttttgatgaaatccggcaacagcagcagaaaattatccaagaacaggacgcaggccttgatgccctttcctctatcataagtcgccaaaaacaaatggggcaggaaattgggaatgaattggatgaacaaaatgagataattgacgaccttgccaacctagtggagaacacagatgaaaaacttcgcaatgaaaccaggcgggtaaacatggtggacagaaagtcagcctcttgtgggatgatcatggtgattttactgctgcttgtggctatcgtggttgttgcagtctggccgaccaactgatggcagtaaagagaccaccagcagtgacacctgccaatgacagatgcaagcccaacacccttttggtacgcaaaacctgctctcaataaattcccccaaagctctg

SEQ ID NO: 30809 - DNA, 3759 bp, Homo sapiens
  source 1..3759: mol_type = unassigned DNA
gcgcggctgcggggcggagagctgcggctggcccagcgcgcccacctgaggaggcggcggggtccgcaggcgtcgcgggacgaggagatcggagccgggagactcgcgcagcgccatggcccccattggcctcaaagctgttgtcggagagaagattatgcatgatgtgataaagaaggtcaagaagaagggggaatggaaggtgctggtggtggatcagttaagcatgaggatgctgtcctcctgctgcaagatgacagacatcatgaccgagggcataacgattgtggaagatatcaataagcgcagagagccgctccccagcctggaggctgtgtatctcatcactccatccgagaagtccgtccactctctcatcagtgactttaaggacccgccgactgctaaataccgggctgcacacgtcttcttcactgactcttgtccagatgccctgtttaatgaactggtaaaatcccgagcagccaaagtcatcaaaactctgacggaaatcaatattgcatttctcccgtatgaatcccaggtctattccttggactctgctgactctttccaaagcttctacagtccccacaaggctcagatgaagaatcctatactggagcgcctggcagagcagatcgcgaccctttgtgccaccctgaaggagtacccggctgtgcggtatcggggggaatacaaggacaatgccctgctggctcagctaatccaggacaagctcgatgcctataaagctgatgatccaacaatgggggagggcccagacaaggcacgctcccagctcctgatcctggatcgaggctttgaccccagctcccctgtgctccatgaattgacttttcaggctatgagttatgatctgctgcctatcgaaaatgatgtatacaagtatgagaccagcggcatcggggaggcacgggtgaaggaggtgctcctggacgaggacgacgacctgtggatagcactgcgccacaagcacatcgcagaggtgtcccaggaagtcacccggtctctgaaagatttttcttctagcaagagaatgaatactggagagaagaccaccatgcgggacctgtcccagatgctgaagaagatgcctcagtaccagaaagagctcagcaagtactccacccacctgcaccttgctgaggactgtatgaagcattaccaaggcaccgtagacaaactctgccgagtggagcaggacctggccatgggcacagatgctgagggagagaagatcaaggaccctatgcgagccatcgtccccattctgctggatgccaatgtcagcacttatgacaaaatccgcatcatccttctctacatctttttgaagaatggcatcacggaggaaaacctgaacaaactgatccagcacgcccagatacccccggaggatagtgagatcatcaccaacatggctcacctcggcgtgcccatcgtcaccgattccacgctgcgtcgccggagcaagccggagcggaaggaacgcatcagcgagcagacctaccagctctcacggtggactccgattatcaaggacatcatggaggacactattgaggacaaacttgacaccaaacactacccttatatctctacccgttcctctgcctccttcagcaccaccgccgtcagcgcccgctatgggcactggcataagaacaaggccccaggcgagtaccgcagtggcccccgcctcatcattttcatccttgggggtgtgagcctgaatgagatgcgctgcgcctacgaggtgacccaggccaacggaaagtgggaggtgctgataggatccacacacatcctcaccccacagaaactgctggacacactgaagaaactgaataaaacagatgaagaaataagcagttaaaaaaataagtcgcccctccaaaacacgcccccatcccacagcgctccgcagcttcccaccaccgcccgcctcagttcctttgcgtctgttgcctccccagccctgcacgccctggctggcactgttgccgctgcattctcgtgttcagtgatgccctcttcttgtttgaaacaaaagaaaataatgcattgtgttttttaaaaagagtatcttatacatgtatcctaaaaagagaagctcatgtgcaattggtgcacagcaggagaaatttctggactgttaggatgaatggacgccttctccccgttatttaagatttgtgaccttgtacataaccctgggtgacgtgcacattgcttgggtatggaacggtagaaatttgggtgtttttaaaaccttgtttggggttgttcctgtccttgttgagaatcatagagatgtctgtgttcttggagtatttcacactgaggactaatctgctatcttcattccagtccctacccctcagtgcctgctctcatccaaataacctgggaggtgacaatcaggatatctcaggaggtccaaggtggaacagacctctttgcctttcccagcgtctcatacccccggtagtgcagctgtgggtggaggctggggtgtctgcacgaagtcaggccagcgtcctcctccacagcctgtcactgccccctccccagcctgtgtccacagtgctgtgatcccgagggaagtcctccagtctaagtcacagtgccctgacaggtgagaagcaaactcccgctggaagcctccatctctttggaaaaacagttagtctggagcctgtggcccaggcccttctgtccccaggcatcatcccaacagctcattttccctagtccgccttcgttcaagggtcaggaatggaccagaacagatgggttctggaggcccctgaacagagggctatggctgtggagaaggttcttggcccgttggactcacacagaccctgtaccctctcggcaagcatcttcagtcagattatcctcagtttcagatacttcataataccttgtgttgtgtggggtcatacatcatcgtgtttgtaagagaagatggtcattttattctctgtataaaacttagctctaaagcagaaactaaagcagcaaatgcaggaaggctgtctcgccatcctcaagactcagcagctctcattctccagtggtgagcacaccatttgtgctgctgctgttgtcgtgaaatataataacagtggaagtcacaaaaatgtcccctgcccagccccctcgccgcccttgacctcctgcaggccatgtgtgtattacttgtctagtgatgtcctctcaaagtgctgtacgcgagctcggcgccacctccgcctccctttcagagcctgctccccgccctctctgctcgctgcattgtggtgttctcttctcaaggctttgaaatctccccttgcactgagattagtcgtcagatctctccccgtctccctcccaacttatacgacctgatttccttaggacggaaccgcaggcacctgcgccgggcgtcttactcccgctgcttgttctgtcccctccctcggaccaaacagtgctcatgcttcaggaccttgtttgtcgaagatgttggtttccctttctctgttatttatataaaaataatttatcaaaaggatattttaaaaaagctagtctgtcttgaaacttgtttaccttaaaattatcagaatctcagtgtttgaaagtactgaagcacaaacatatatcatctctgtaccattctgtactaaagcacttgagtctaataaataaagaaatcagcaccccttcccggtgtccaggggg

SEQ ID NO: 30810 - DNA, 2329 bp, Homo sapiens
  source 1..2329: mol_type = unassigned DNA
gcccagtccgcgcgtcagtcggtccctagcgcggctgcggggcggagagctgcggctggcccagcgcgcccacctgaggaggcggcggggtccgcaggcgtcgcgggacgaggagatcggagccgggagactcgcgcagcgccatggcccccattggcctcaaagctgttgtcggagagagtaagcaagatgacagacatcatgaccgagggcataacgattgtggaagatatcaataagcgcagagagccgctccccagcctggaggctgtgtatctcatcactccatccgagaagtccgtccactctctcatcagtgactttaaggacccgccgactgctaaataccgggctgcacacgtcttcttcactgactcttgtccagatgccctgtttaatgaactggtaaaatcccgagcagccaaagtcatcaaaactctgacggaaatcaatattgcatttctcccgtatgaatcccaggtctattccttggactctgctgactctttccaaagcttctacagtccccacaaggctcagatgaagaatcctatactggagcgcctggcagagcagatcgcgaccctttgtgccaccctgaaggagtacccggctgtgcggtatcggggggaatacaaggacaatgccctgctggctcagctaatccaggacaagctcgatgcctataaagctgatgatccaacaatgggggagggcccagacaaggcacgctcccagctcctgatcctggatcgaggctttgaccccagctcccctgtgctccatgaattgacttttcaggctatgagttatgatctgctgcctatcgaaaatgatgtatacaagtatgagaccagcggcatcggggaggcacgggtgaaggaggtgctcctggacgaggacgacgacctgtggatagcactgcgccacaagcacatcgcagaggtgtcccaggaagtcacccggtctctgaaagatttttcttctagcaagagaatgaatactggagagaagaccaccatgcgggacctgtcccagatgctgaagaagatgcctcagtaccagaaagagctcagcaagtactccacccacctgcaccttgctgaggactgtatgaagcattaccaaggcaccgtagacaaactctgccgagtggagcaggacctggccatgggcacagatgctgagggagagaagatcaaggaccctatgcgagccatcgtccccattctgctggatgccaatgtcagcacttatgacaaaatccgcatcatccttctctacatctttttgaagaatggcatcacggaggaaaacctgaacaaactgatccagcacgcccagatacccccggaggatagtgagatcatcaccaacatggctcacctcggcgtgcccatcgtcaccgattccacgctgcgtcgccggagcaagccggagcggaaggaacgcatcagcgagcagacctaccagctctcacggtggactccgattatcaaggacatcatggaggacactattgaggacaaacttgacaccaaacactacccttatatctctacccgttcctctgcctccttcagcaccaccgccgtcagcgcccgctatgggcactggcataagaacaaggccccaggcgagtaccgcagtggcccccgcctcatcattttcatccttgggggtgtgagcctgaatgagatgcgctgcgcctacgaggtgacccaggccaacggaaagtgggaggtgctgataggttctactcacattcttactcccaccaaatttctcatggacctgagacaccccgacttcagggagtcctctagggtatcttttgaggatcaggctccaacaatggagtgagagccaaagaaacaaagatccacacacatcctcaccccacagaaactgctggacacactgaagaaactgaataaaacagatgaagaaataagcagttaaaaaaataagtcgcccctccaaaacacgcccccatcccacagcgctccgcagcttcccaccaccgcccgcctcagttcctttgcgtctgttgcctccccagccctgcacgccctggctggcactgttgccgctgcattctcgtgttcagtgatgccctcttcttgtttgaaacaaaagaaaataatgcattgtgttttttaaaaagagtatcttatacatgtatcctaaaaagagaagctcatgtgcaattggtgcacagcaggagaaatttctggactgttaggatgaatggacgccttctccccgttatttaagatttgtgaccttgtacataaccctgggtgacgtgcacattgcttgggtatgg

SEQ ID NO: 30811 - DNA, 1868 bp, Homo sapiens
  source 1..1868: mol_type = unassigned DNA
agtcggtccctagcgcggctgcggggcggagagctgcggctggcccagcgcgcccacctgaggaggcggcggggtccgcaggcgtcgcgggacgaggagatcggagccgggagactcgcgcagcgccatggcccccattggcctcaaagctgttgtcggagagaagattatgcatgatgtgataaagaaggtcaagaagaagggggaatggaaggtgctggtggtggatcagttaagcatgaggatgctgtcctcctgctgcaagatgacagacatcatgaccgagggcccagacaaggcacgctcccagctcctgatcctggatcgaggctttgaccccagctcccctgtgctccatgaattgacttttcaggctatgagttatgatctgctgcctatcgaaaatgatgtatacaagtatgagaccagcggcatcggggaggcacgggtgaaggaggtgctcctggacgaggacgacgacctgtggatagcactgcgccacaagcacatcgcagaggtgtcccaggaagtcacccggtctctgaaagatttttcttctagcaagagaatgaatactggagagaagaccaccatgcgggacctgtcccagatgctgaagaagatgcctcagtaccagaaagagctcagcaagtactccacccacctgcaccttgctgaggactgtatgaagcattaccaaggcaccgtagacaaactctgccgagtggagcaggacctggccatgggcacagatgctgagggagagaagatcaaggaccctatgcgagccatcgtccccattctgctggatgccaatgtcagcacttatgacaaaatccgcatcatccttctctacatctttttgaagaatggcatcacggaggaaaacctgaacaaactgatccagcacgcccagatacccccggaggatagtgagatcatcaccaacatggctcacctcggcgtgcccatcgtcaccgattccacgctgcgtcgccggagcaagccggagcggaaggaacgcatcagcgagcagacctaccagctctcacggtggactccgattatcaaggacatcatggaggacactattgaggacaaacttgacaccaaacactacccttatatctctacccgttcctctgcctccttcagcaccaccgccgtcagcgcccgctatgggcactggcataagaacaaggccccaggcgagtaccgcagtggcccccgcctcatcattttcatccttgggggtgtgagcctgaatgagatgcgctgcgcctacgaggtgacccaggccaacggaaagtgggaggtgctgataggttctactcacattcttactcccaccaaatttctcatggacctgagacaccccgacttcagggagtcctctagggtatcttttgaggatcaggctccaacaatggagtgagagccaaagaaacaaagatccacacacatcctcaccccacagaaactgctggacacactgaagaaactgaataaaacagatgaagaaataagcagttaaaaaaataagtcgcccctccaaaacacgcccccatcccacagcgctccgcagcttcccaccaccgcccgcctcagttcctttgcgtctgttgcctccccagccctgcacgccctggctggcactgttgccgctgcattctcgtgttcagtgatgccctcttcttgtttgaaacaaaagaaaataatgcattgtgttttttaaaaagagtatcttatacatgtatcctaaaaagagaagctcatgtgcaattggtgcacagcaggagaaatttctggactgttaggatgaatggacgccttctccccgttatttaagatttgtgaccttgtacata

SEQ ID NO: 30812 - DNA, 3909 bp, Homo sapiens
  source 1..3909: mol_type = unassigned DNA
agtccgcgcgtcagtcggtccctagcgcggctgcggggcggagagctgcggctggcccagcgcgcccacctgaggaggcggcggggtccgcaggcgtcgcgggacgaggagatcggagccgggagactcgcgcagcgccatggcccccattggcctcaaagctgttgtcggagagaagattatgcatgatgtgataaagaaggtcaagaagaagggggaatggaaggtgctggtggtggatcagttaagcatgaggatgctgtcctcctgctgcaagatgacagacatcatgaccgagggcataacgattgtggaagatatcaataagcgcagagagccgctccccagcctggaggctgtgtatctcatcactccatccgagaagtccgtccactctctcatcagtgactttaaggacccgccgactgctaaataccgggctgcacacgtcttcttcactgactcttgtccagatgccctgtttaatgaactggtaaaatcccgagcagccaaagtcatcaaaactctgacggaaatcaatattgcatttctcccgtatgaatcccaggtctattccttggactctgctgactctttccaaagcttctacagtccccacaaggctcagatgaagaatcctatactggagcgcctggcagagcagatcgcgaccctttgtgccaccctgaaggagtacccggctgtgcggtatcggggggaatacaaggacaatgccctgctggctcagctaatccaggacaagctcgatgcctataaagctgatgatccaacaatgggggagggcccagacaaggcacgctcccagctcctgatcctggatcgaggctttgaccccagctcccctgtgctccatgaattgacttttcaggctatgagttatgatctgctgcctatcgaaaatgatgtatacaagtatgagaccagcggcatcggggaggcacgggtgaaggaggtgctcctggacgaggacgacgacctgtggatagcactgcgccacaagcacatcgcagaggtgtcccaggaagtcacccggtctctgaaagatttttcttctagcaagagaatgaatactggagagaagaccaccatgcgggacctgtcccagatgctgaagaagatgcctcagtaccagaaagagctcagcaagtactccacccacctgcaccttgctgaggactgtatgaagcattaccaaggcaccgtagacaaactctgccgagtggagcaggacctggccatgggcacagatgctgagggagagaagatcaaggaccctatgcgagccatcgtccccattctgctggatgccaatgtcagcacttatgacaaaatccgcatcatccttctctacatctttttgaagaatggcatcacggaggaaaacctgaacaaactgatccagcacgcccagatacccccggaggatagtgagatcatcaccaacatggctcacctcggcgtgcccatcgtcaccgattccacgctgcgtcgccggagcaagccggagcggaaggaacgcatcagcgagcagacctaccagctctcacggtggactccgattatcaaggacatcatggaggacactattgaggacaaacttgacaccaaacactacccttatatctctacccgttcctctgcctccttcagcaccaccgccgtcagcgcccgctatgggcactggcataagaacaaggccccaggcgagtaccgcagtggcccccgcctcatcattttcatccttgggggtgtgagcctgaatgagatgcgctgcgcctacgaggtgacccaggccaacggaaagtgggaggtgctgataggttctactcacattcttactcccaccaaatttctcatggacctgagacaccccgacttcagggagtcctctagggtatcttttgaggatcaggctccaacaatggagtgagagccaaagaaacaaagatccacacacatcctcaccccacagaaactgctggacacactgaagaaactgaataaaacagatgaagaaataagcagttaaaaaaataagtcgcccctccaaaacacgcccccatcccacagcgctccgcagcttcccaccaccgcccgcctcagttcctttgcgtctgttgcctccccagccctgcacgccctggctggcactgttgccgctgcattctcgtgttcagtgatgccctcttcttgtttgaaacaaaagaaaataatgcattgtgttttttaaaaagagtatcttatacatgtatcctaaaaagagaagctcatgtgcaattggtgcacagcaggagaaatttctggactgttaggatgaatggacgccttctccccgttatttaagatttgtgaccttgtacataaccctgggtgacgtgcacattgcttgggtatggaacggtagaaatttgggtgtttttaaaaccttgtttggggttgttcctgtccttgttgagaatcatagagatgtctgtgttcttggagtatttcacactgaggactaatctgctatcttcattccagtccctacccctcagtgcctgctctcatccaaataacctgggaggtgacaatcaggatatctcaggaggtccaaggtggaacagacctctttgcctttcccagcgtctcatacccccggtagtgcagctgtgggtggaggctggggtgtctgcacgaagtcaggccagcgtcctcctccacagcctgtcactgccccctccccagcctgtgtccacagtgctgtgatcccgagggaagtcctccagtctaagtcacagtgccctgacaggtgagaagcaaactcccgctggaagcctccatctctttggaaaaacagttagtctggagcctgtggcccaggcccttctgtccccaggcatcatcccaacagctcattttccctagtccgccttcgttcaagggtcaggaatggaccagaacagatgggttctggaggcccctgaacagagggctatggctgtggagaaggttcttggcccgttggactcacacagaccctgtaccctctcggcaagcatcttcagtcagattatcctcagtttcagatacttcataataccttgtgttgtgtggggtcatacatcatcgtgtttgtaagagaagatggtcattttattctctgtataaaacttagctctaaagcagaaactaaagcagcaaatgcaggaaggctgtctcgccatcctcaagactcagcagctctcattctccagtggtgagcacaccatttgtgctgctgctgttgtcgtgaaatataataacagtggaagtcacaaaaatgtcccctgcccagccccctcgccgcccttgacctcctgcaggccatgtgtgtattacttgtctagtgatgtcctctcaaagtgctgtacgcgagctcggcgccacctccgcctccctttcagagcctgctccccgccctctctgctcgctgcattgtggtgttctcttctcaaggctttgaaatctccccttgcactgagattagtcgtcagatctctccccgtctccctcccaacttatacgacctgatttccttaggacggaaccgcaggcacctgcgccgggcgtcttactcccgctgcttgttctgtcccctccctcggaccaaacagtgctcatgcttcaggaccttgtttgtcgaagatgttggtttccctttctctgttatttatataaaaataatttatcaaaaggatattttaaaaaagctagtctgtcttgaaacttgtttaccttaaaattatcagaatctcagtgtttgaaagtactgaagcacaaacatatatcatctctgtaccattctgtactaaagcacttgagtctaataaataaagaaatcagcaccccttcccggtgtccaggggg

SEQ ID NO: 30813 - DNA, 1889 bp, Homo sapiens
  source 1..1889: mol_type = unassigned DNA
accttgggacacacccggaagcggcggcggcgcccctcggggaagatggcgccctcggggctgaaggcggtggtgggggaaaaaattctgagcggagttattcggagtgtcaagaaggatggggagtggaaggtgcttatcatggatcacccaagcatgcgcatcttgtcttcctgctgcaaaatgtcagatatcctggctgagggcatcaccattgttgaagacatcaacaaacggcgggaacccattcccagtctggaggccatttatttgctgagccccacggagaagtcggttcaggccctgatcaaagacttccaggggaccccgactttcacctacaaagcggcccatatcttcttcaccgacacctgccccgagcccctgttcagtgagctaggccgctctcgtctggcaaaggtggtgaagacgttgaaggagattcaccttgccttcctcccctacgaggcccaggtgttctccctcgatgctccccacagcacctacaacctctactgccccttccgggcagaggagcgcacgcggcagctcgaggtgctggcccagcagattgccacgctgtgcgccaccctgcaggagtacccggccatccgctaccgcaagggcccagaggacacagcccagttggcccacgccgtcctggccaagctgaacgccttcaaggcagacactcccagtctgggcgagggcccagagaaaacccgctcccagctgctgataatggaccgggcagctgaccccgtgtccccactactgcatgagctcacgttccaggccatggcgtatgatctgctggacatagagcaggacacatacaggtatgagaccaccgggctgagcgaggcgcgggagaaggccgtcttgctggacgaggacgatgacttgtgggtggagcttcgccacatgcatatcgcagatgtgtccaagaaggtcacggagctcctgaggaccttctgtgagagcaagaggctgaccacggacaaggcgaacatcaaagacctatcccagatcctgaaaaagatgccgcagtaccagaaggagctgaataagtattctacgcacctgcatctagcagatgattgtatgaagcacttcaagggctcggtggagaagctgtgtagtgtggagcaggacctggccatgggctccgacgcagagggggagaagatcaaggactccatgaagctgatcgttccggtgctgctggacgcggcggtgcccgcctacgacaagatccgggtcctgctgctctacatcctccttcggaatggtgtgagtgaggagaacctggccaagctgatccagcatgccaatgtacaggcgcacagcagcctcatccgtaacctggagcagctgggaggcactgtcaccaaccccgggggctcggggacctccagccggctggagccgagagaacgcatggagcccacctatcagctgtcccgctggaccccggtcatcaaggatgtaatggaggacgccgtggaggaccggctggacaggaacctgtggcccttcgtatccgaccccgcccccacggccagctcccaggccgctgtcagtgcccgcttcggtcactggcacaagaacaaggctggcatagaagcccgggcgggcccccggctcatcgtgtatgtcatgggcggtgtggccatgtcagagatgagggccgcctacgaggtgaccagggccaccgagggcaagtgggaggtgctcattggctcctcacacatcctcaccccgacccgcttcctggatgacctgaaggcactggacaagaagctggaggacattgccctgccctgacccctggccccgccccctacccctccctttccagagaaataaactcttcccgtcgctctgcc

SEQ ID NO: 30814 - DNA, 1840 bp, Homo sapiens
  source 1..1840: mol_type = unassigned DNA
caaatccattcttaaaccttgcaagctgactgcgggagcccatggattgcaggcctcccctgcagcactccctggctgcagccccttcctgaccgtgcagctccctcgtggagccctgtgtgggactcccagggtggactctggatgtggggtcccaagaatgcagagccttctatgggtgaccccaggtggtgtcccagtcactttgccattgagggataggtgctgagggagcctgtcctctcagaacctcagtctccctgtctgtaaatttggggaacccagttggctgcacaacccctgcagaaccctgtcgtgtggctcttagctggtggtccctaagtgggtttctcctgcagtccctcctaagcatccacccctcctccccaagcctccaaccccccacacctgagactccccacgtggccctgcctggatgccacccacctgtgtcccttcctctgttcctactagttgttgaagacatcaacaaacggcgggaacccattcccagtctggaggccatttatttgctgagccccacggagaaggtgcctacatgagtgagcgtgtgtgtatgcgcgtgcatgcgtgtacatgtgcatgtgtgtgtatgtctgcatgcatgtgattgcatgtgtgcatgtgtatacgtgtgcatgtgtccatgtgtatgtgtatgtgtgtgcatgtgtgtgtgcatctgtgtatgcatgtgtgtgcggtttgcatgtgtgtctatgtatgtgtctgtgtgcatgtgcatgtgtgtgcgtctgtgtgtgcatttgtgtgtatgtgtgtatgcgtgtgtgtctgtgggtctgtgtgtgcatttgtgtctgtgcatgtgtgtatgcgtgtgtatgtatgtgtgtgcatctgtgtgcatctgtatgtgtgtgtgtgcgtctgtctgtgtgcatgtgtgtatgcgtgtgtatgtatgtgtctgcgtctgtgtgtgcgtctgtgtgtatctgtgtgtgcatgtgtgtatgcgtgtatatgtatgtgcatctgtgtgcatgtgtctatgtatgtgtgtgcatctgtgtgtgcgtgtgtatgcgtgtgtgtatgcgtctgtgtgtgtatgcgtgtgtgtgcgcatcagtgtctgcatgtgtgtatatgtgtgtatgtgtgcgcgcgcatctgtgtgtgtgcatgtgtgtatgtatgtgtgtgcatctctgtgtgtgcatgtgtgtatgtgtgtgtgcatctgtgtgtgtgtgcatgtgtgcatgcgtgtgtatgtgtgtgtgcgtgcgtgcatctgtgtgtgtgcgcgtgtgcccatgtgggtgcgacactagtgtgcatttgcacatatacatgtccccgtccgtccatgtttgcacatggtggcagatggggggtggctgggaggcctaggcagccaatgagcctaggtgtgcaggctcaggcccagagagtgatccaccttccccagtcggttcaggccctgatcaaagacttccaggggaccccgactttcacctacaaagcggcccatatcttcttcaccgacacctgccccgagcccctgttcagtgagctaggccgctctcgtctggcaaaggtggtgaagacgttgaaggagattcaccttgccttcctcccctacgaggcccaggtacggcccgggctcatcctgggcagggggtgggggtttgtgaccaaatgtcccctgttccctcagaaacagacactgaggctgggcgcagtggctcatacctgtaatcccagcgctgtgggaggccagggcaggaggatcacttggggccaggagtttgagaccagcctgggtacagagcaagaccccgtctcttaa

SEQ ID NO: 30815 - DNA, 1880 bp, Homo sapiens
  source 1..1880: mol_type = unassigned DNA
accttgggacacacccggaagcggcggcggcgcccctcggggaagatggcgccctcggggctgaaggcggtggtgggggaaaaaattctgagcggagttattcggagtgtcaagaaggatggggagtggaaggtgcttatcatggatcacccaagcatgcgcatcttgtcttcctgctgcaaaatgtcagatatcctggctgagggcatcaccattgttgaagacatcaacaaacggcgggaacccattcccagtctggaggccatttatttgctgagccccacggagaaggccctgatcaaagacttccaggggaccccgactttcacctacaaagcggcccatatcttcttcaccgacacctgccccgagcccctgttcagtgagctaggccgctctcgtctggcaaaggtggtgaagacgttgaaggagattcaccttgccttcctcccctacgaggcccaggtgttctccctcgatgctccccacagcacctacaacctctactgccccttccgggcagaggagcgcacgcggcagctcgaggtgctggcccagcagattgccacgctgtgcgccaccctgcaggagtacccggccatccgctaccgcaagggcccagaggacacagcccagttggcccacgccgtcctggccaagctgaacgccttcaaggcagacactcccagtctgggcgagggcccagagaaaacccgctcccagctgctgataatggaccgggcagctgaccccgtgtccccactactgcatgagctcacgttccaggccatggcgtatgatctgctggacatagagcaggacacatacaggtatgagaccaccgggctgagcgaggcgcgggagaaggccgtcttgctggacgaggacgatgacttgtgggtggagcttcgccacatgcatatcgcagatgtgtccaagaaggtcacggagctcctgaggaccttctgtgagagcaagaggctgaccacggacaaggcgaacatcaaagacctatcccagatcctgaaaaagatgccgcagtaccagaaggagctgaataagtattctacgcacctgcatctagcagatgattgtatgaagcacttcaagggctcggtggagaagctgtgtagtgtggagcaggacctggccatgggctccgacgcagagggggagaagatcaaggactccatgaagctgatcgttccggtgctgctggacgcggcggtgcccgcctacgacaagatccgggtcctgctgctctacatcctccttcggaatggtgtgagtgaggagaacctggccaagctgatccagcatgccaatgtacaggcgcacagcagcctcatccgtaacctggagcagctgggaggcactgtcaccaaccccgggggctcggggacctccagccggctggagccgagagaacgcatggagcccacctatcagctgtcccgctggaccccggtcatcaaggatgtaatggaggacgccgtggaggaccggctggacaggaacctgtggcccttcgtatccgaccccgcccccacggccagctcccaggccgctgtcagtgcccgcttcggtcactggcacaagaacaaggctggcatagaagcccgggcgggcccccggctcatcgtgtatgtcatgggcggtgtggccatgtcagagatgagggccgcctacgaggtgaccagggccaccgagggcaagtgggaggtgctcattggctcctcacacatcctcaccccgacccgcttcctggatgacctgaaggcactggacaagaagctggaggacattgccctgccctgacccctggccccgccccctacccctccctttccagagaaataaactcttcccgtcgctctgcc

SEQ ID NO: 30816 - DNA, 1914 bp, Homo sapiens
  source 1..1914: mol_type = unassigned DNA
acacacccggaagcggcggcggcgcccctcggggaagatggcgccctcggggctgaaggcggtggtgggggaaaaaattctgagcggagttattcggagtgtcaagaaggatggggagtggaaggtgcttatcatggatcacccaagcatgcgcatcttgtcttcctgctgcaaaatgtcagatatcctggctgagggcatcaccattgttgaagacatcaacaaacggcgggaacccattcccagtctggaggccatttatttgctgagccccacggagaaggctcaggcccagagagtgatccaccttccccagtcggttcaggccctgatcaaagacttccaggggaccccgactttcacctacaaagcggcccatatcttcttcaccgacacctgccccgagcccctgttcagtgagctaggccgctctcgtctggcaaaggtggtgaagacgttgaaggagattcaccttgccttcctcccctacgaggcccaggtgttctccctcgatgctccccacagcacctacaacctctactgccccttccgggcagaggagcgcacgcggcagctcgaggtgctggcccagcagattgccacgctgtgcgccaccctgcaggagtacccggccatccgctaccgcaagggcccagaggacacagcccagttggcccacgccgtcctggccaagctgaacgccttcaaggcagacactcccagtctgggcgagggcccagagaaaacccgctcccagctgctgataatggaccgggcagctgaccccgtgtccccactactgcatgagctcacgttccaggccatggcgtatgatctgctggacatagagcaggacacatacaggtatgagaccaccgggctgagcgaggcgcgggagaaggccgtcttgctggacgaggacgatgacttgtgggtggagcttcgccacatgcatatcgcagatgtgtccaagaaggtcacggagctcctgaggaccttctgtgagagcaagaggctgaccacggacaaggcgaacatcaaagacctatcccagatcctgaaaaagatgccgcagtaccagaaggagctgaataagtattctacgcacctgcatctagcagatgattgtatgaagcacttcaagggctcggtggagaagctgtgtagtgtggagcaggacctggccatgggctccgacgcagagggggagaagatcaaggactccatgaagctgatcgttccggtgctgctggacgcggcggtgcccgcctacgacaagatccgggtcctgctgctctacatcctccttcggaatggtgtgagtgaggagaacctggccaagctgatccagcatgccaatgtacaggcgcacagcagcctcatccgtaacctggagcagctgggaggcactgtcaccaaccccgggggctcggggacctccagccggctggagccgagagaacgcatggagcccacctatcagctgtcccgctggaccccggtcatcaaggatgtaatggaggacgccgtggaggaccggctggacaggaacctgtggcccttcgtatccgaccccgcccccacggccagctcccaggccgctgtcagtgcccgcttcggtcactggcacaagaacaaggctggcatagaagcccgggcgggcccccggctcatcgtgtatgtcatgggcggtgtggccatgtcagagatgagggccgcctacgaggtgaccagggccaccgagggcaagtgggaggtgctcattggctcctcacacatcctcaccccgacccgcttcctggatgacctgaaggcactggacaagaagctggaggacattgccctgccctgacccctggccccgccccctacccctccctttccagagaaataaactcttcccgtcgctctgcc

SEQ ID NO: 30817 - DNA, 1869 bp, Homo sapiens
  source 1..1869: mol_type = unassigned DNA
gcggcggcggcgcccctcggggaagatggcgccctcggggctgaaggcggtggtgggggaaaaaattctgagcggagttattcggagtgtcaagaaggatggggagtggaaggtgcttatcatggatcacccaagcatgcgcatcttgtcttcctgctgcaaaatgtcagatatcctggctgagggcatcaccattgttgaagacatcaacaaacggcgggaacccattcccagtctggaggccatttatttgctgagccccacggagaagtcggttcaggccctgatcaaagacttccaggggaccccgactttcacctacaaagcggcccatatcttcttcaccgacacctgccccgagcccctgttcagtgagctaggccgctctcgtctggcaaaggtggtgaagacgttgaaggagattcaccttgccttcctcccctacgaggcccaggtgttctccctcgatgctccccacagcacctacaacctctactgccccttccgggcagaggagcgcacgcggcagctcgaggtgctggcccagcagattgccacgctgtgcgccaccctgcaggagtacccggccatccgctaccgcaagggcccagaggacacagcccagttggcccacgccgtcctggccaagctgaacgccttcaaggcagacactcccagtctgggcgagggcccagagaaaacccgctcccagctgctgataatggaccgggcagctgaccccgtgtccccactactgcatgagctcacgttccaggccatggcgtatgatctgctggacatagagcaggacacatacaggtatgagaccaccgggctgagcgaggcgcgggagaaggccgtcttgctggacgaggacgatgacttgtgggtggagcttcgccacatgcatatcgcagatgtgtccaagaaggtcacggagctcctgaggaccttctgtgagagcaagaggctgaccacggacaaggcgaacatcaaagacctatcccagatcctgaaaaagatgccgcagtaccagaaggagctgaataagtattctacgcacctgcatctagcagatgattgtatgaagcacttcaagggctcggtggagaagctgtgtagtgtggagcaggacctggccatgggctccgacgcagagggggagaagatcaaggactccatgaagctgatcgttccggtgctgctggacgcggcggtgcccgcctacgacaagatccgggtcctgctgctctacatcctccttcggaatggtgtgagtgaggagaacctggccaagctgatccagcatgccaatgtacaggcgcacagcagcctcatccgtaacctggagcagctgggaggcactgtcaccaaccccgggggctcggggacctccagccggctggagccgagagaacgcatggagcccacctatcagctgtcccgctggaccccggtcatcaaggatgtaatggaggacgccgtggaggaccggctggacaggaacctgtggcccttcgtatccgaccccgcccccacggccagctcccaggccgctgtcagtgcccgcttcggtcactggcacaagaacaaggctggcatagaagcccgggcgggcccccggctcatcgtgtatgtcatgggcggtgtggccatgtcagagatgagggccgcctacgaggtgaccagggccaccgagggcagtgggaggtgctcattggctcctcacacatcctcaccccgacccgcttcctggatgacctgaaggcactggacaagaagctggaggacattgccctgccctgacccctggccccgccccctacccctccctttccagagaaataaactcttcccgtcgctctgcca

SEQ ID NO: 30818 - DNA, 3940 bp, Homo sapiens
  source 1..3940: mol_type = unassigned DNA
gttcgccatggatttccctatcaaccctcagccctggcctttgatcctgtacagaagatcctggcagtgggaactcagactggtgctttaaggctctttggtcgtccaggagtagaatgttattgccagcatgacagtggagctgcagtaatccagctccagttcctgattaatgagggagcgcttgtgagtgccttggctgatgacaccttacacttatggaatttacgtcagaagaggcctgccatactacattcgcttaaattttgcagagaaagggttacattttgccatctgcctttccagagtaagtggctctatgtgggcactgaacgaggtaatatacatattgtcaatgtggagtccttcacactctcaggctacgtcattatgtggaataaagccattgaactgtcatctaaatctcacccaggacctgtggtccatataagtgataatccaatggacgagggaaagatatttgaaaagactgggaaaagagagaggaaacaaataccatttttttccaaaaggtgtatgtatctcagattgcctaggaaagaagagataagcttttgattggctttgaatctggaacagtagttttatgggacctcaaatcaaagaaagccgactacagatacacatatgatgaggctatccactctgttgcttggcatcatgaaggaaaacaatttatttgcagtcattcagatggcaccttgactatatggaatgtaaggtcccctgctaaaccagtacagacaatcactccacatggaaaacagttaaaggatgggaagaagccagaaccatgcaaacctatcctcaaggtggaattcaaaacgactagatctggggagccttttattattttatcaggaggtttgtcatatgatactgtaggaagaagaccttgcttaacagtgatgcatgggaaaagcactgctgtgctagaaatggactattcaattgttgattttctaacgctgtgtgaaacaccatacccaaatgattttcaagaaccatatgctgtggttgttcttctagaaaaggatttagtacttatagaccttgcacaaaatggatatcctatatttgaaaatccctaccctttgagtatacatgagtcccctgttacatgttgcgaatattttgcggattgtcctgtggaccttattcctgcactttattctgttggagctagacagaaacgtcaaggttacagcaaaaaggaatggcccatcaacggaggtaattggggcttgggtgctcaaagttacccagaaataattattacagggcatgctgatgggtcagttaagttctgggatgcttctgcaataactctacaagtattatataagctaaagacatctaaagtatttgaaaagtcaagaaataaagatgacaggccaaacacagacattgtagatgaagatccatatgccattcagatcatctcctggtgtccagaaagtagaatgctgtgcatcgctggagtttcagctcatgtcattatttatagattcagcaagcaggaagtaatcacagaagtcattccgatgcttgaagttcgattattatatgagataaatgatgtggaaactccggagggtgagcagccaccacctttgccaacacccgtgggagggtccaaccctcagcccatccctcctcagtctcatccatctaccagtagcagttcatctgatgggcttcgtgataatgtaccttgtttaaaagttaaaaactcaccacttaaacagtctccaggttatcaaacagaactagttattcagttggtttgggtgggtggagaaccaccacaacaaataaccagcctggcagtcaattcttcctatggactggtggtttttggcaattgcaatggcattgctatggttgactacctccagaaagcagtgctgctcaacctgggcactattgaattatatggctctaatgatccttatcggagagaaccccgatctcctcgtaaatctcgacagccttcaggagccggtctgtgtgatattagtgaagggactgttgttccagaggatcgctgcaaatctccaacctctggttcttcatcaccacacaattcagatgatgaacaaaaaatgaataattttatagaaaaggcaaagatgtcaaggaagttaagcttacctactgacctaaagcctgatttagatgtaaaggataactcctttagccgatcacggagttcaagtgtaacaagcattgacaaagaatcccgagaagcgatctccgctcttcatttctgtgaaacgtttactcgaaagacggactcgtccccttccccttgtctatgggttggaacaacgctaggaacagtgcttgtcattgcactgaaccttcccccagggggagagcaaagacttcttcagccagtaattgtgtctccaagtggtactatattgaggttaaaaggtgcaatcttgagaatggcatttctggataccacaggctgcttaataccacctgcgtatgaaccctggagagagcacaatgttcctgaagaaaaagacgaaaaggagaaattgaaaaaacggcggcctgtctcagtatccccctcctcttctcaggaaattagtgaaaaccagtatgcagtgatatgttctgaaaagcaagcaaaagtaatctcactgccaacccagaactgtgcttataagcaaaatattacagagacctcgtttgtgcttcgtggagatattgtagcattgagtaacagtatctgccttgcctgtttctgtgccaatggacatataatgacttttagtttgccaagtttaagacctctgttggatgtgtattacttgccccttaccaatatgcggatagccagaacgttctgctttaccaacaatggacaagcattataccttgtttcacctacagaaatccagagacttacttatagtcaagagacctgtgaaaatcttcaggaaatgttgggtgaactcttcactcctgtagaaacacctgaagcaccaaacaggggattctttaaaggcttatttggaggtggtgcacaatctcttgacagagaagaactatttggagaatcgtcctcaggaaaggcttcaaggagccttgcacagcatattcctggccctggtggcattgaaggcgtaaaaggggcagcatctggagttgttggtgaattagcacgagccaggctggcactagatgaaagagggcagaaacttggcgatctggaagaaagaactgcggccatgttatcaagtgcagagtcattttctaaacatgctcatgagattatgttgaaatacaaagataagaagtggtaccagttctgacaaccagaatccaataagtccaacttcagccagaaggaaaaaagttttccatttttattacattctttaggaaagttaacgttaaagggatgttcgtcactgaatactgttctttcctagcacagtcatgcactgttttacctcagtcatgtggctttaactgaggagtgttcacacgcactcgaaatggagtatatggtgtgtgccagttatgagttgaccatttgggaattaaacaggtcacacgtgacagatgaagaaaccaagggggctgctgaggagacctggtgcagggactaatcctggatcattcctgtattaaactttcatatgccaaaagggtttgtgccgttttatctgccatcagtgtttgacctgtttagggcagaggcaataagtcagaagtcttgaagttgaaatagttatatgtgtgtcattggactggattataaacagctgtcttggactttccctctcttaacactgactggtcatcagtatcattagtgaaaaagaaacaaattgtttgttatcatctctttagacagataagctgaatggtgggctttaaataataaaaacatacacat

SEQ ID NO: 30819 - DNA, 3456 bp, Homo sapiens
  source 1..3456: mol_type = unassigned DNA
atgaggaaattcaacatcaggaaggtgctggacggcctgaccgccggctcgtcctcggcgtcgcagcagcaacagcagcagcatccgcctgggaaccgggagccggagatccaggaaacgctccagtccgagcactttcagctctgcaagactgttcgccatggatttccctatcaaccctcagccctggcctttgatcctgtacagaagatcctggcagtgggaactcagactggtgctttaaggctctttggtcgtccaggagtagaatgttattgccagcatgacagtggagctgcagtaatccagctccagttcctgattaatgagggagcgcttgtgagtgccttggctgatgacaccttacacttatggaatttacgtcagaagaggcctgccatactacattcgcttaaattttgcagagaaagggttacattttgccatctgcctttccagagtaagtggctctatgtgggcactgaacgaggtaatatacatattgtcaatgtggagtccttcacactctcaggctacgtcattatgtggaataaagccattgaactgtcatctaaatctcacccaggacctgtggtccatataagtgataatccaatggacgagggaaagcttttgattggctttgaatctggaacagtagttttatgggacctcaaatcaaagaaagccgactacagatacacatatgatgaggctatccactctgttgcttggcatcatgaaggaaaacaatttatttgcagtcattcagatggcaccttgactatatggaatgtaaggtcccctgctaaaccagtacagacaatcactccacatggaaaacagttaaaggatgggaagaagccagaaccatgcaaacctatcctcaaggtggaattcaaaacgactagatctggggagccttttattattttatcaggaggtttgtcatatgatactgtaggaagaagaccttgcttaacagtgatgcatgggaaaagcactgctgtgctagaaatggactattcaattgttgattttctaacgctgtgtgaaacaccatacccaaatgattttcaagaaccatatgctgtggttgttcttctagaaaaggatttagtacttatagaccttgcacaaaatggatatcctatatttgaaaatccctaccctttgagtatacatgagtcccctgttacatgttgcgaatattttgcggattgtcctgtggaccttattcctgcactttattctgttggagctagacagaaacgtcaaggttacagcaaaaaggaatggcccatcaacggaggtaattggggcttgggtgctcaaagttacccagaaataattattacagggcatgctgatgggtcagttaagttctgggatgcttctgcaataactctacaagtattatataagctaaagacatctaaagtatttgaaaagtcaagaaataaagatgacaggccaaacacagacattgtagatgaagatccatatgccattcagatcatctcctggtgtccagaaagtagaatgctgtgcatcgctggagtttcagctcatgtcattatttatagattcagcaagcaggaagtaatcacagaagtcattccgatgcttgaagttcgattattatatgagataaatgatgtggaaactccggagggtgagcagccaccacctttgccaacacccgtgggagggtccaaccctcagcccatccctcctcagtctcatccatctaccagtagcagttcatctgatgggcttcgtgataatgtaccttgtttaaaagttaaaaactcaccacttaaacagtctccaggttatcaaacagaactagttattcagttggtttgggtgggtggagaaccaccacaacaaataaccagcctggcagtcaattcttcctatggactggtggtttttggcaattgcaatggcattgctatggttgactacctccagaaagcagtgctgctcaacctgggcactattgaattatatggctctaatgatccttatcggagagaaccccgatctcctcgtaaatctcgacagccttcaggagccggtctgtgtgatattagtgaagggactgttgttccagaggatcgctgcaaatctccaacctctggttcttcatcaccacacaattcagatgatgaacaaaaaatgaataattttatagaaaaggtgaagaccaaaagcagaaagttttccaagatggtagccaatgatatagcaaagatgtcaaggaagttaagcttacctactgacctaaagcctgatttagatgtaaaggataactcctttagccgatcacggagttcaagtgtaacaagcattgacaaagaatcccgagaagcgatctccgctcttcatttctgtgaaacgtttactcgaaagacggactcgtccccttccccttgtctatgggttggaacaacgctaggaacagtgcttgtcattgcactgaaccttcccccagggggagagcaaagacttcttcagccagtaattgtgtctccaagtggtactatattgaggttaaaaggtgcaatcttgagaatggcatttctggataccacaggctgcttaataccacctgcgtatgaaccctggagagagcacaatgttcctgaagaaaaagacgaaaaggagaaattgaaaaaacggcggcctgtctcagtatccccctcctcttctcaggaaattagtgaaaaccagtatgcagtgatatgttctgaaaagcaagcaaaagtaatctcactgccaacccagaactgtgcttataagcaaaatattacagagacctcgtttgtgcttcgtggagatattgtagcattgagtaacagtatctgccttgcctgtttctgtgccaatggacatataatgacttttagtttgccaagtttaagacctctgttggatgtgtattacttgccccttaccaatatgcggatagccagaacgttctgctttaccaacaatggacaagcattataccttgtttcacctacagaaatccagagacttacttatagtcaagagacctgtgaaaatcttcaggaaatgttgggtgaactcttcactcctgtagaaacacctgaagcaccaaacaggggattctttaaaggcttatttggaggtggtgcacaatctcttgacagagaagaactatttggagaatcgtcctcaggaaaggcttcaaggagccttgcacagcatattcctggccctggtggcattgaaggcgtaaaaggggcagcatctggagttgttggtgaattagcacgagccaggctggcactagatgaaagagggcagaaacttggcgatctggaagaaagaactgcggccatgttatcaagtgcagagtcattttctaaacatgctcatgagattatgttgaaatacaaagataagaagtggtaccagttctga

SEQ ID NO: 30820 - DNA, 521 bp, Homo sapiens
  source 1..521: mol_type = unassigned DNA
gaaagcagtgctgctcaacctgggcactattgaattatatggctctaatgatccttatcggagagaaccccgatctcctcgtaaatctcgacagccttcaggagccggtctgtgtgatattagtgaagggactgttgttccagaggatcgctgcaaatctccaacctctggttcttcatcaccacacaattcagatgatgaacaaaaaatgaataattttatagaaaaggcaaagatgtcaaggaagttaagcttacctactgacctaaagcctgatttagatgtaaaggataactcctttagccgatcacggagttcaagtgtaacaagcattgacaaagaatcccgagaagcgatctccgctcttcatttctgtgaaacgtttactcgaaagacggactcgtccccttccccttgtctatgggttggaacaacgctaggaacagtgcttgtcattgcactgaaccttcccccagggggagagcaaagacttcttcagccagtaattgtgtctccaagtg

SEQ ID NO: 30821 - DNA, 6409 bp, Homo sapiens
  source 1..6409: mol_type = unassigned DNA
tgttcggattatcttttgcttccccccagctgcctccttaccctcacactcccactcctccgtttccgcggtcgaagctgccttcggccccgggtggtctcccccgcccggggaccccctgtgcctcccctcccgggctgcgggggagcccctccgagaccatgaggaaattcaacatcaggaaggtgctggacggcctgaccgccggctcgtcctcggcgtcgcagcagcaacagcagcagcatccgcctgggaaccgggagccggagatccaggaaacgctccagtccgagcactttcagctctgcaagactgttcgccatggatttccctatcaaccctcagccctggcctttgatcctgtacagaagatcctggcagtgggaactcagactggtgctttaaggctctttggtcgtccaggagtagaatgttattgccagcatgacagtggagctgcagtaatccagctccagttcctgattaatgagggagcgcttgtgagtgccttggctgatgacaccttacacttatggaatttacgtcagaagaggcctgccatactacattcgcttaaattttgcagagaaagggttacattttgccatctgcctttccagagtaagtggctctatgtgggcactgaacgaggtaatatacatattgtcaatgtggagtccttcacactctcaggctacgtcattatgtggaataaagccattgaactgtcatctaaatctcacccaggacctgtggtccatataagtgataatccaatggacgagggaaagcttttgattggctttgaatctggaacagtagttttatgggacctcaaatcaaagaaagccgactacagatacacatatgatgaggctatccactctgttgcttggcatcatgaaggaaaacaatttatttgcagtcattcagatggcaccttgactatatggaatgtaaggtcccctgctaaaccagtacagacaatcactccacatggaaaacagttaaaggatgggaagaagccagaaccatgcaaacctatcctcaaggtggaattcaaaacgactagatctggggagccttttattattttatcaggaggtttgtcatatgatactgtaggaagaagaccttgcttaacagtgatgcatgggaaaagcactgctgtgctagaaatggactattcaattgttgattttctaacgctgtgtgaaacaccatacccaaatgattttcaagaaccatatgctgtggttgttcttctagaaaaggatttagtacttatagaccttgcacaaaatggatatcctatatttgaaaatccctaccctttgagtatacatgagtcccctgttacatgttgcgaatattttgcggattgtcctgtggaccttattcctgcactttattctgttggagctagacagaaacgtcaaggttacagcaaaaaggaatggcccatcaacggaggtaattggggcttgggtgctcaaagttacccagaaataattattacagggcatgctgatgggtcagttaagttctgggatgcttctgcaataactctacaagtattatataagctaaagacatctaaagtatttgaaaagtcaagaaataaagatgacaggccaaacacagacattgtagatgaagatccatatgccattcagatcatctcctggtgtccagaaagtagaatgctgtgcatcgctggagtttcagctcatgtcattatttatagattcagcaagcaggaagtaatcacagaagtcattccgatgcttgaagttcgattattatatgagataaatgatgtggaaactccggagggtgagcagccaccacctttgccaacacccgtgggagggtccaaccctcagcccatccctcctcagtctcatccatctaccagtagcagttcatctgatgggcttcgtgataatgtaccttgtttaaaagttaaaaactcaccacttaaacagtctccaggttatcaaacagaactagttattcagttggtttgggtgggtggagaaccaccacaacaaataaccagcctggcagtcaattcttcctatggactggtggtttttggcaattgcaatggcattgctatggttgactacctccagaaagcagtgctgctcaacctgggcactattgaattatatggctctaatgatccttatcggagagaaccccgatctcctcgtaaatctcgacagccttcaggaggtgtgctgattgtgacttcttgcatgtgcggcctttctagcttatattctgaatctatgaaaaaactacgttcttcttttttaaccggtctgtgtgatattagtgaagggactgttgttccagaggatcgctgcaaatctccaacctctgcaaagatgtcaaggaagttaagcttacctactgacctaaagcctgatttagatgtaaaggataactcctttagccgatcacggagttcaagtgtaacaagcattgacaaagaatcccgagaagcgatctccgctcttcatttctgtgaaacgtttactcgaaagacggactcgtccccttccccttgtctatgggttggaacaacgctaggaacagtgcttgtcattgcactgaaccttcccccagggggagagcaaagacttcttcagccagtaattgtgtctccaagtggtactatattgaggttaaaaggtgcaatcttgagaatggcatttctggataccacaggctgcttaataccacctgcgtatgaaccctggagagagcacaatgttcctgaagaaaaagacgaaaaggagaaattgaaaaaacggcggcctgtctcagtatccccctcctcttctcaggaaattagtgaaaaccagtatgcagtgatatgttctgaaaagcaagcaaaagtaatctcactgccaacccagaactgtgcttataagcaaaatattacagagacctcgtttgtgcttcgtggagatattgtagcattgagtaacagtatctgccttgcctgtttctgtgccaatggacatataatgacttttagtttgccaagtttaagacctctgttggatgtgtattacttgccccttaccaatatgcggatagccagaacgttctgctttaccaacaatggacaagcattataccttgtttcacctacagaaatccagagacttacttatagtcaagagacctgtgaaaatcttcaggaaatgttgggtgaactcttcactcctgtagaaacacctgaagcaccaaacaggggattctttaaaggcttatttggaggtggtgcacaatctcttgacagagaagaactatttggagaatcgtcctcaggaaaggcttcaaggagccttgcacagcatattcctggccctggtggcattgaaggcgtaaaaggggcagcatctggagttgttggtgaattagcacgagccaggctggcactagatgaaagagggcagaaacttggcgatctggaagaaagaactgcggccatgttatcaagtgcagagtcattttctaaacatgctcatgagattatgttgaaatacaaagataagaagtggtaccagttctgacaaccagaatccaataagtccaacttcagccagaaggaaaaaagttttccatttttattacattctttaggaaagttaacgttaaagggatgttcgtcactgaatactgttctttcctagcacagtcatgcactgttttacctcagtcatgtggctttaactgaggagtgttcacacgcactcgaaatggagtatatggtgtgtgccagttatgagttgaccatttgggaattaaacaggtcacacgtgacagatgaagaaaccaagggggctgctgaggagacctggtgcagggactaatcctggatcattcctgtattaaactttcatatgccaaaagggtttgtgccgttttatctgccatcagtgtttgacctgtttagggcagaggcaataagtcagaagtcttgaagttgaaatagttatatgtgtgtcattggactggattataaacagctgtcttggactttccctctcttaacactgactggtcatcagtatcattagtgaaaaagaaacaaattgtttgttatcatctctttagacagataagctgaatggtgggctttaaataataaaaacatacacatagttgacttgtgtatgagctactcttggattcttgttattatagacttgtatttagttcatattttgtcaaaagcaaaacaagaagatacatcacttttcattgaaaagaaaagtgtagagcatgactgaattgctcatcattctgggagtttccatgtagtggctatgcagtgtggaaagtgagaaaaacctccattgtggtgaggagaatacttcaatgtcccttgtccttgttctcattaattcagctaaaggtggatttgaccaaaataatgctggttaaatttgtagaaatgttgaaattggctgtgttttaaattttgcttgaatttttataaaatgtttaaccaaatgtacctttgcattctttaattaaaattgcttaaaaaaaaactttcattatttcagtaaaatgctcagctcccttttcaaaatgccctttatttgctaactgttccaatacactcaggtgatgagccaattaaatgttagtgcacatgctatcgcatggaaaattacaagcatctgttgtcaataattatataagagtttagtctgatgacctacaaaatattttgtgtagaaatatactataaatctgtacatatcctttcaaggttttaaaaaaccaaaaagaaaggaaaatatgtacactgtgataactaaattatttctgtattggaatataatacaatttgagaccagcaatggacaatgaatgattgtttcatagaatagcattacgggcaggaaagaaaccacctagtagatctagaagtaagcaatctcagaatacagactaatctgagattattattgattgttgttaaagcaacccagcaaaagcaaaatggaagcattaaaattaatgttaatgaaatttaaatattgtcttctataaaaaattcctttaaatgattttgttttttcattaagagataatcagagcacaaattgatagtaaacaggatggttgtttttctattctatatgatcattaaaggaatatgtaggacatcttaactttttcatacagtctgttatgcatattttcctctacttttcattaataaagcttttatgtttacattttataacatgcactactagatgcaaaagtttacatcaaagtttactttaaatatcatttggtagggactaaatgtgtgtgatagagataattgatcaagccaaaagaaatattttttaaataagcccttttcaaaagtttttgaatttatagaaagcaccaatgaataacatatttctgtttcgttaatgtcagctgcctgaacattcagcagtttataaattgcttaatttgtgttatctattatccagtaaacccatagttccatgatatgtcacaggaattgttaggtcctattttaaaggtacagttttgtgaatgtcatcaataaaatcaacagttatggatttgaagaagttgggaaagcattatgtagattaatatactggttggttccctatctatgtggaaggtcatattagctgcaattatttaatttgctgtgttattttgtgttatataacacaaatatatttgtatattaacttcatttttactgtcatttttcctgttgtatacaaaatgaactaatcttgtaattattttcaaatatagaagtatatacattagatggatttccaagattttgtaagaaaatcttaaatcagtgttttgagttatttaatttttaaattaatctacaaattatgcacaacaaactagagactcagttaggattagaaagcttaaagtatgtttgagtgtaggaaataagcttctcagagttatacttgattctgtctgtagataagagacagtctacagtaataactaacccagggaatttactgtaatttgagaggtaacatctctatttttttctttttaaatacagaaagtaatagtcaccagcaagccacgatttcaggaaaactgactaaaaaaaaaagtcaaaatagaaaatatcagaaaaatgaaagatttttgtgtgccctctccatatcctcattgtttttgttgcatttgtccttgactctaaaatcactgaagtattcatgattagtagtttgtaagtaggaagtggtttttctgtatgtaccatatatccagttcatttcagttttcaaactaaaatccatatgtatttgctgagaaagttatttgaaatcttatattctgacaaattctgtacatt

SEQ ID NO: 30822 - DNA, 3297 bp, Homo sapiens
  source 1..3297: mol_type = unassigned DNA
atgaggaaattcaacatcaggaaggtgctggacggcctgaccgccggctcgtcctcggcgtcgcagcagcaacagcagcagcatccgcctgggaaccgggagccggagatccaggaaacgctccagtccgagcactttcagctctgcaagactgttcgccatggatttccctatcaaccctcagccctggcctttgatcctgtacagaagatcctggcagtgggaactcagactggtgctttaaggctctttggtcgtccaggagtagaatgttattgccagcatgacagtggagctgcagtaatccagctccagttcctgattaatgagggagcgcttgtgagtgccttggctgatgacaccttacacttatggaatttacgtcagaagaggcctgccatactacattcgcttaaattttgcagagaaagggttacattttgccatctgcctttccagagtaagtggctctatgtgggcactgaacgaggtaatatacatattgtcaatgtggagtccttcacactctcaggctacgtcattatgtggaataaagccattgaactgtcatctaaatctcacccaggacctgtggtccatataagtgataatccaatggacgagggaaagcttttgattggctttgaatctggaacagtagttttatgggacctcaaatcaaagaaagccgactacagatacacatatgatgaggctatccactctgttgcttggcatcatgaaggaaaacaatttatttgcagtcattcagatggcaccttgactatatggaatgtaaggtcccctgctaaaccagtacagacaatcactccacatggaaaacagttaaaggatgggaagaagccagaaccatgcaaacctatcctcaaggtggaattcaaaacgactagatctggggagccttttattattttatcaggaggtttgtcatatgatactgtaggaagaagaccttgcttaacagtgatgcatgggaaaagcactgctgtgctagaaatggactattcaattgttgattttctaacgctgtgtgaaacaccatacccaaatgattttcaagaaccatatgctgtggttgttcttctagaaaaggatttagtacttatagaccttgcacaaaatggatatcctatatttgaaaatccctaccctttgagtatacatgagtcccctgttacatgttgcgaatattttgcggattgtcctgtggaccttattcctgcactttattctgttggagctagacagaaacgtcaaggttacagcaaaaaggaatggcccatcaacggaggtaattggggcttgggtgctcaaagttacccagaaataattattacagggcatgctgatgggtcagttaagttctgggatgcttctgcaataactctacaagtattatataagctaaagacatctaaagtatttgaaaagtcaagaaataaagatgacaggccaaacacagacattgtagatgaagatccatatgccattcagatcatctcctggtgtccagaaagtagaatgctgtgcatcgctggagtttcagctcatgtcattatttatagattcagcaagcaggaagtaatcacagaagtcattccgatgcttgaagttcgattattatatgagataaatgatgtggaaactccggagggtgagcagccaccacctttgccaacacccgtgggagggtccaaccctcagcccatccctcctcagtctcatccatctaccagtagcagttcatctgatgggcttcgtgataatgtaccttgtttaaaagttaaaaactcaccacttaaacagtctccaggttatcaaacagaactagttattcagttggtttgggtgggtggagaaccaccacaacaaataaccagcctggcagtcaattcttcctatggactggtggtttttggcaattgcaatggcattgctatggttgactacctccagaaagcagtgctgctcaacctgggcactattgaattatatggctctaatgatccttatcggagagaaccccgatctcctcgtaaatctcgacagccttcaggagccggtctgtgtgatattagtgaagggactgttgttccagaggatcgctgcaaatctccaacctctgatgtaaaggataactcctttagccgatcacggagttcaagtgtaacaagcattgacaaagaatcccgagaagcgatctccgctcttcatttctgtgaaacgtttactcgaaagacggactcgtccccttccccttgtctatgggttggaacaacgctaggaacagtgcttgtcattgcactgaaccttcccccagggggagagcaaagacttcttcagccagtaattgtgtctccaagtggtactatattgaggttaaaaggtgcaatcttgagaatggcatttctggataccacaggctgcttaataccacctgcgtatgaaccctggagagagcacaatgttcctgaagaaaaagacgaaaaggagaaattgaaaaaacggcggcctgtctcagtatccccctcctcttctcaggaaattagtgaaaaccagtatgcagtgatatgttctgaaaagcaagcaaaagtaatctcactgccaacccagaactgtgcttataagcaaaatattacagagacctcgtttgtgcttcgtggagatattgtagcattgagtaacagtatctgccttgcctgtttctgtgccaatggacatataatgacttttagtttgccaagtttaagacctctgttggatgtgtattacttgccccttaccaatatgcggatagccagaacgttctgctttaccaacaatggacaagcattataccttgtttcacctacagaaatccagagacttacttatagtcaagagacctgtgaaaatcttcaggaaatgttgggtgaactcttcactcctgtagaaacacctgaagcaccaaacaggggattctttaaaggcttatttggaggtggtgcacaatctcttgacagagaagaactatttggagaatcgtcctcaggaaaggcttcaaggagccttgcacagcatattcctggccctggtggcattgaaggcgtaaaaggggcagcatctggagttgttggtgaattagcacgagccaggctggcactagatgaaagagggcagaaacttggcgatctggaagaaagaactgcggccatgttatcaagtgcagagtcattttctaaacatgctcatgagattatgttgaaatacaaagataagaagtggtaccagttctga

SEQ ID NO: 30823 - DNA, 4431 bp, Homo sapiens
  source 1..4431: mol_type = unassigned DNA
actcctccgtttccgcggtcgaagctgccttcggccccgggtggtctcccccgcccggggaccccctgtgcctcccctcccgggctgcgggggagcccctccgagaccatgaggaaattcaacatcaggaaggtgctggacggcctgaccgccggctcgtcctcggcgtcgcagcagcaacagcagcagcatccgcctgggaaccgggagccggagatccaggaaacgctccagtccgagcactttcagctctgcaagactgttcgccatggatttccctatcaaccctcagccctggcctttgatcctgtacagaagatcctggcagtgggaactcagactggtgctttaaggctctttggtcgtccaggagtagaatgttattgccagcatgacagtggagctgcagtaatccagctccagttcctgattaatgagggagcgcttgtgagtgccttggctgatgacaccttacacttatggaatttacgtcagaagaggcctgccatactacattcgcttaaattttgcagagaaagggttacattttgccatctgcctttccagagtaagtggctctatgtgggcactgaacgaggtaatatacatattgtcaatgtggagtccttcacactctcaggctacgtcattatgtggaataaagccattgaactgtcatctaaatctcacccaggacctgtggtccatataagtgataatccaatggacgagggaaagcttttgattggctttgaatctggaacagtagttttatgggacctcaaatcaaagaaagccgactacagatacacatatgatgaggctatccactctgttgcttggcatcatgaaggaaaacaatttatttgcagtcattcagatggcaccttgactatatggaatgtaaggtcccctgctaaaccagtacagacaatcactccacatggaaaacagttaaaggatgggaagaagccagaaccatgcaaacctatcctcaaggtggaattcaaaacgactagatctggggagccttttattattttatcaggaggtttgtcatatgatactgtaggaagaagaccttgcttaacagtgatgcatgggaaaagcactgctgtgctagaaatggactattcaattgttgattttctaacgctgtgtgaaacaccatacccaaatgattttcaagaaccatatgctgtggttgttcttctagaaaaggatttagtacttatagaccttgcacaaaatggatatcctatatttgaaaatccctaccctttgagtatacatgagtcccctgttacatgttgcgaatattttgcggattgtcctgtggaccttattcctgcactttattctgttggagctagacagaaacgtcaaggttacagcaaaaaggaatggcccatcaacggaggtaattggggcttgggtgctcaaagttacccagaaataattattacagggcatgctgatgggtcagttaagttctgggatgcttctgcaataactctacaagtattatataagctaaagacatctaaagtatttgaaaagtcaagaaataaagatgacaggccaaacacagacattgtagatgaagatccatatgccattcagatcatctcctggtgtccagaaagtagaatgctgtgcatcgctggagtttcagctcatgtcattatttatagattcagcaagcaggaagtaatcacagaagtcattccgatgcttgaagttcgattattatatgagataaatgatgtggaaactccggagggtgagcagccaccacctttgccaacacccgtgggagggtccaaccctcagcccatccctcctcagtctcatccatctaccagtagcagttcatctgatgggcttcgtgataatgtaccttgtttaaaagttaaaaactcaccacttaaacagtctccaggttatcaaacagaactagttattcagttggtttgggtgggtggagaaccaccacaacaaataaccagcctggcagtcaattcttcctatggactggtggtttttggcaattgcaatggcattgctatggttgactacctccagaaagcagtgctgctcaacctgggcactattgaattatatggctctaatgatccttatcggagagaaccccgatctcctcgtaaatctcgacagccttcaggagccggtctgtgtgatattagtgaagggactgttgttccagaggatcgctgcaaatctccaacctctgcaaagatgtcaaggaagttaagcttacctactgacctaaagcctgatttagatgtaaaggataactcctttagccgatcacggagttcaagtgtaacaagcattgacaaagaatcccgagaagcgatctccgctcttcatttctgtgaaacgtttactcgaaagacggactcgtccccttccccttgtctatgggttggaacaacgctaggaacagtgcttgtcattgcactgaaccttcccccagggggagagcaaagacttcttcagccagtaattgtgtctccaagtggtactatattgaggttaaaaggtgcaatcttgagaatggcatttctggataccacaggctgcttaataccacctgcgtatgaaccctggagagagcacaatgttcctgaagaaaaagacgaaaaggagaaattgaaaaaacggcggcctgtctcagtatccccctcctcttctcaggaaattagtgaaaaccagtatgcagtgatatgttctgaaaagcaagcaaaagtaatctcactgccaacccagaactgtgcttataagcaaaatattacagagacctcgtttgtgcttcgtggagatattgtagcattgagtaacagtatctgccttgcctgtttctgtgccaatggacatataatgacttttagtttgccaagtttaagacctctgttggatgtgtattacttgccccttaccaatatgcggatagccagaacgttctgctttaccaacaatggacaagcattataccttgtttcacctacagaaatccagagacttacttatagtcaagagacctgtgaaaatcttcaggaaatgttgggtgaactcttcactcctgtagaaacacctgaagcaccaaacaggggattctttaaaggcttatttggaggtggtgcacaatctcttgacagagaagaactatttggagaatcgtcctcaggaaaggcttcaaggagccttgcacagcatattcctggccctggtggcattgaaggcgtaaaaggggcagcatctggagttgttggtgaattagcacgagccaggctggcactagatgaaagagggcagaaacttggcgatctggaagaaagaactgcggccatgttatcaagtgcagagtcattttctaaacatgctcatgagattatgttgaaatacaaagataagaagtggtaccagttctgacaaccagaatccaataagtccaacttcagccagaaggaaaaaagttttccatttttattacattctttaggaaagttaacgttaaagggatgttcgtcactgaatactgttctttcctagcacagtcatgcactgttttacctcagtcatgtggctttaactgaggagtgttcacacgcactcgaaatggagtatatggtgtgtgccagttatgagttgaccatttgggaattaaacaggtcacacgtgacagatgaagaaaccaagggggctgctgaggagacctggtgcagggactaatcctggatcattcctgtattaaactttcatatgccaaaagggtttgtgccgttttatctgccatcagtgtttgacctgtttagggcagaggcaataagtcagaagtcttgaagttgaaatagttatatgtgtgtcattggactggattataaacagctgtcttggactttccctctcttaacactgactggtcatcagtatcattagtgaaaaagaaacaaattgtttgttatcatctctttagacagataagctgaatggtgggctttaaataataaaaacatacacatagttgacttgtgtatgagctactcttggattcttgttattatagacttgtatttagttcatattttgtcaaaagcaaaacaagaagatacatcacttttcattgaaaagaaaagtgtagagcatgactgaattgctcatcattctgggagtttccatgtagtggctatgcagtgtggaaagtgagaaaaacctccattgtggtgaggagaatacttcaatgtcccttgtccttgttctcattaattcagctaaaggtggatttgaccaaaataatgctggttaaatttgtagaaatgttgaaattggctgtgttttaaattttgcttgaatttttataaaatgtttaaccaaatgtacctttgcattctttaattaaaattgctt

SEQ ID NO: 30824 - DNA, 791 bp, Homo sapiens
  source 1..791: mol_type = unassigned DNA
attgaattatatggctctaatgatccttatcggagagaaccccgatctcctcgtaaatctcgacagccttcaggaggtgtgctgattgtgacttcttgcatgtgcggcctttctagcttatattctgaatctatgaaaaaactacgttcttcttttttaaccggtctgtgtgatattagtgaagggactgttgttccagaggatcgctgcaaatctccaacctctgcaaagatgtcaaggaagttaagcttacctactgacctaaagcctgatttagatgtaaaggataactcctttagccgatcacggagttcaagtgtaacaagcattgacaaagaatcccgagaagcgatctccgctcttcatttctgtgaaacgtttactcgaaagacggactcgtccccttccccttgtctatgggttggaacaacgctaggaacagtgcttgtcattgcactgaaccttcccccagggggagagcaaagacttcttcagccagtaattgtgtctccaagtggtactatattgaggttaaaaggtgcaatcttgagaatggcatttctggataccacaggctgcttaataccacctgcgtatgaaccctggagagagcacaatgttcctgaagaaaaagacgaaaaggagaaattgaaaaaacggcggcctgtctcagtatccccctcctcttctcaggaaattagtgaaaaccagtatgcagtgatatgttctgaaaagcaagcaaaagtaatctcactgccaacccagaactgtgcttataagcaaaatattac

SEQ ID NO: 30825 - DNA, 2160 bp, Homo sapiens
  source 1..2160: mol_type = unassigned DNA
actcctccgtttccgcggtcgaagctgccttcggccccgggtggtctcccccgcccggggaccccctgtgcctcccctcccgggctgcgggggagcccctccgagaccatgaggaaattcaacatcaggaaggtgctggacggcctgaccgccggctcgtcctcggcgtcgcagcagcaacagcagcagcatccgcctgggaaccgggagccggagatccaggaaacgctccagtccgagcactttcagctctgcaagactgttcgccatggatttccctatcaaccctcagccctggcctttgatcctgtacagaagatcctggcagtgggaactcagactggtgctttaaggctctttggtcgtccaggagtagaatgttattgccagcatgacagtggagctgcagtaatccagctccagttcctgattaatgagggagcgcttgtgagtgccttggctgatgacaccttacacttatggaatttacgtcagaagaggcctgccatactacattcgcttaaattttgcagagaaagggttacattttgccatctgcctttccagagtaagtggctctatgtgggcactgaacgaggtaatatacatattgtcaatgtggagtccttcacactctcaggctacgtcattatgtggaataaagccattgaactgtcatctaaatctcacccaggacctgtggtccatataagtgataatccaatggacgagggaaagcttttgattggctttgaatctggaacagtagttttatgggacctcaaatcaaagaaagccgactacagatacacatatgatgaggctatccactctgttgcttggcatcatgaaggaaaacaatttatttgcagtcattcagatggcaccttgactatatggaatgtaaggtcccctgctaaaccagtacagacaatcactccacatggaaaacagttaaaggatgggaagaagccagaaccatgcaaacctatcctcaaggtggaattcaaaacgactagatctggggtttgttgagatccaacagatatattccaacaatagctatattccaacaatagattaaatgaactctaagaggtgtatcatctgtttgactcttgcatccttcattgtgtgacctgtagcatagttatctgacttctttgtggttcattttcctcacttatgacatagatggataaaatgtcagacattagttgtttaattgagatgataatgtatgtaaaacatttcaagcagtttctggtatataataaactctataaatgattgagaagccatttttttaaggaaatcccctgccaccaattgatttttatttgttacatttgtcctatggcaaaggaattaaaataggaaaagcatggtagcaaagaaagaaaaacaggaagaaaatctgaaaaaaaaaatctatgattataatacaaaatgaattggctaaatatttaaattaatagtgactaattaggttctattcttatctagttattttaacaaatattgactggcaacaaaggcagcagttcagggaagattttttcctctgtgcttcacctgttccagtttttactcctaaataatgttaatatttatgagttcaggtttcttcaagatggcagtaatacttttcctttcatagaattagaaatgaaaatttaaaatgttgctcttttgtaggcatttgtaaatacagtcatccactacctaatagcatcatgatcagtggtggactgtatatacaatgacggtcccaataaattataatattgtactttactgtaccttttctatgtttatatacacaaatacttaccattgtgttacagttgcctacaatacttagtacagtaatatgctatataggtttgtaacctaggagtaataggctatacaatatagcctagatatgtagtatatcatcgagatttgtgtaagttacactctatgatgttcatacaatgacaaaattgtccaatgatgcattcctcagaaggtatcctttgttgttaaatgacgtagttatactgttaactggatcagtaagatcaccattttgtaacagtgttctctactttctcaatttcttttgtcacctaagatgggaaattcagtaaattcaacatattcttcttttctctc

SEQ ID NO: 30826 - DNA, 9496 bp, Homo sapiens
  source 1..9496: mol_type = unassigned DNA
gacgtccccgggcaccccgcccccttcacctcccagctttgccggggaagaagcagggcggggcaagctaggggccggcccgggggcggggcctgcctcccacggcgggagggcggagcctgctctggagcctgactgctcggttaggacctcggagagcgccaggcgccgcgaccagagggcccagagaagcggccggagcccgcctacctcggccccctcagcttcccgggctggcaggcggctagaggcgtctgaggaagtgtttaaaatgaagaagtttaatttccgaaaagttttggatggcttaactgcctcctcccctggcagtggtagcagcagtggcagtaacagtggtggtggggctggaagtggttccgtacatccggcggggactgcaggggttctcagagaggaaattcaggaaactttgacttcggagtatttccagatttgcaagacagttcggcatggttttcctcatcagcccacagcattagcctttgatccagttcagaaaatcttggctattgggacgagaacaggtgctatacgaatactcgggagacctggtgttgattgctattgccaacatgaaagtggtgcagctgtcctacagctccaatttttgatcaatgagggtgccttggtcagtgcaagttcagatgatacacttcatttgtggaaccttagacaaaaaaggccagccatactccattctcttaaatttaaccgggaacgaattacttactgtcatctacctttccagagtaaatggctttatgttggaacagaaagaggaaatacacatattgtaaatattgaatctttcattctttctggatatgttatcatgtggaacaaggcaattgaactatccactaagactcatccaggtccagttgtacatttaagcgatagcccaagagatgaaggcaaactgctaataggttatgaaaatggtactgtagtattctgggacttgaaatctaaaagagcagaactgagagtttattatgatgaggctattcattcaattgattggcatcatgagggcaaacagttcatgtgcagccattcagatggtagtttgactttatggaacctgaaaagcccaagtcgccctttccagaccacaattccacatggaaaaagtcaaagagaaggaagaaaatctgaatcttgtaaaccaattcttaaagtagaatacaagacctgcaaaaacagcgaaccattcataatattctctggtgggctgtcctatgacaaagcttgtagaagaccaagtttaaccatcatgcatggaaaagcaattacagtacttgaaatggatcatcctattgttgaatttctaactttatgtgaaacgccctatccaaatgaatttcaagaaccctatgctgtcgtggtacttctggagaaagatctcattgtagttgatctgacacaaagcaattttccaatctttgaaaatccatatcccatggacattcatgaatcaccagttacatgcacagcatactttgcagattgtcctccggatttgattctagtactgtattctataggagtcaagcataaaaaacaaggatacagtaataaggagtggccaatcagtggaggagcttggaaccttggagcacaaacatatccagaaattattattactggtcatgcagatggatcaataaaattttgggatgcttctgcaataactctgcagatgctgtacaagctaaaaacttcaaaagtgtttgaaaaacagaaggtaggagaaggaaaacaaacatgtgaaattgtagaggaagacccatttgccattcagatgatttactggtgtccagagagcagaatattctgtgtatcaggagtctctgcatatgtcataatttataaattcagcagacatgaaattacaacagaaatagtgtcattagaggtacgacttcagtatgatgttgaagatattattacccctgaaccagaaacaagtcctccgtttccagatctctcagcccagcttccttcttcaaggagtctttctgggagcactaacactgttgctagtgaaggagtaacaaaggacagtattccatgcctcaatgtgaagacacggccagtgcgaatgcctccaggatatcaagcagaacttgttattcaattggtgtgggtagatggtgaacctccacaacagattactagtcttgctgtaagctcagcatatggaatagttgcatttgggaactgcaatgggttggctgtggtggattttatacagaagacagtactgttaagcatggggaccattgacctatatagatcaagtgacttataccagcgacaaccacggtctcctcgaaaaaacaaacagttcattgcagacaacttttgcatgcgtggcctgtctaacttttatcctgatttaacgaaacggatccgtacttcctatcagagtttaactgaactgaatgacagtccagttcccctagaacttgagcgctgcaagtctcctacctcagaccatgtaaatggacactgcacaagtccaacttctcagagttgcagttctggaaaacgtctttctagtgccgatgtttcaaaagtaaatcgctggggtcctggaagaccaccatttcgaaaggcccagtcagcagcctgcatggagatttctttaccagttacaacagaagaaaaccgagaaaattcctataatcgttctagaagctctagtatctccagtattgacaaagattctaaagaagcaattacagcactatacttcatggactcctttgcacggaaaaatgactctaccatctctccttgtctgttcgttggaaccagtctgggaatggtgttaatcatctccttaaacctaccattagcagatgaacaaaggtttacagagccagtcatggtattgccaagtggtacattcctctcattgaaaggagctgtgctaacattctcctgtatggaccgaatgggtggattaatgcaaccgccatatgaagtttggagggatccaaacaacatagatgaaaatgaaaaatcttggagaaggaaagtggtaatgaactcatcttctgcatcccaagaaataggagatcatcagtatacaataatctgctcagaaaaacaagccaaagtcttctcactgccttctcagacttgcctttatgttcataacatcacggagacatcttttatactgcaagcaaatgtggtggtcatgtgtagcagtgcctgcttggcatgcttttgtgctaacggacatatcatgataatgagcctacctagtcttcgcccaatgttggatgttaattatttgccactgacagacatgaggatagcacgaacattttgttttaccaatgaaggacaggcattatacctcgtctctcctactgaaattcagcggttaacatacagccaagaaatgtgtgataatctacaggacatgctaggagatttgtttactcccatagagacaccagaagctcaaaacagaggctttctcaagggactgtttggtggaagcggacaaacatttgacagagaagagctctttggggaagcttcggcaggaaaagcatcccgcagccttgcgcaacacattcctggaccaggtagtatagaagggatgaaaggcgctgctggaggggtgatgggagagctgacccgtgcacggattgcacttgatgaaagaggacagaggctaggagagctggaagagaaaactgcaggcatgatgaccagtgcagaagcattttccaaacatgcacatgagttaatgctgaaatacaaggataagaaatggtaccaattctgacttctaaagaagctgtgactgctttgagaaaccatattcagggaaaccaaatttattcccagcatcactactcaactgctagaagccagtttcttctacaaaatgttccatttacagtcaatctgaaattttcataaaagagatgtatcagagacactgtgcaacccaaaggctggagccctggttaaaatcccaaaatacggctgaatttgccttttcccatgtggaatggagctatcatcttggcatgtcattcgataaggatttatatttagtaactacggggagtcctcttgatttgaaaattcctgtacaaacaaaagcattaatgcacttaatgaaaaaaaatctttgcatgataaattaacatcttaaggggaaaagaaaaaaaagcatgttgtgatagaagaaaaaaagattcatggtaaactatttctatcaattgggccacactcaacaatttaaaaaatctgcatttgaagatgtcagtgcatttcaaatatatttgccatacccaactgaaacggaaaacaaaacaaaacaagaacccagagttttctcctcatctgtaactttcattgtactagaaccttattgaattcttatggcaagagtctgattaatgttctctctccatgttttacatcattcacagttgtgtcaaaatcaaatattgccagtatagtaaattattcccaacacaatcagtttcatttctatcaccttcagaatgggttgctgtttttagcacaaaccatgcagggttgggtcacctcaaagcattttcttcagcctggcttgtactctataggggagttggtagtaggtgtggggaatctataggaacaatagagttagctatgagaactgacttcacaaaaagggaaatttcacacaccccaatttcagcttctaaagtgatatattttaaaagcttcatttgtatccttgtctgccagttacacagtatattactgttcaaacccagtagggtctgcaatcgaaaggtgctcttgcagcctgacattcacaaaccaaactggtcattctctttagtgtgattcagtaaaatctcagttaatgttttgggaaagggattctgatttatgacatttctgatttacaagggctttccttagaaaatacctttcggtttgatacttaccactggaaattggttcgatacttaccactggaaatctttataaaatatagtgatctgtttgctatcttggtctcagtcatcattatagacaatagaaatacataaagagtttaatgatacaaaatcaatgcttttgtccctaggtcaaataatataagccactagattatgtcaatagatgccaaacacttgtcccttattaaagactcttttaaagctggaataaagaatatccttaacatgatacaaggtatctataactcaccagaaaagcaccagagtcaaaaccaaatagagacacctactaccatttaacatgattctggaagtcaaaagttataggaatgtatatatacacattccaggacccatcctgtaatatgttgtttcgtcaagaaaagttttaattatggttttggcttattgaatttttgtttatcaaggtctcattggatttacatttgtgtttcttaagacttcacaattttcctggatttcaggttattttattagccaaaaaatcgtatttttatttcctttttagtctaattttttgctagaagttgtactttctagcaaatgtttctagtggtacaatgttctcagtaattttgaggagaacaaagatgagtgaaagagttagataatgtacactaggatagcatttctcagagtccttgaatcctcttgttaagaaagcctctctgaatctcccagactcctgtgaacagccttacggtaacagaatctggcttggaaacacagacattacatgactgtataatttatagaattataaaattatatggtaaaaatattaaagaaacttaagagtaggatctagaaaatactagtggccaaattgcaatgtattctttgtaccatctgtttcaaagacttagttttctgattttcagaacaaatactttatcgtttctgtattttaaaaaaaactaaaagagtaaaatattagtttattttagaaataatgaaattcagtccaaagtagcagtacatttgatgagtatttctgaagccttcaataagatttaacttgttttaacttgatctacatcgagatttctcaaaagcagcactattagctgaaagtctttgttgtggggaactgtcctgtgtattgtaggatgttagcaacatccctggcctctgtctactagatgccagtaagaacctcctagtaatgacaatcaaaatgtctccagtcattgccaaaatttctcccagttcacagccactattctacatcatacaaagaggtagattgtgtgaatatgtaatatatgttgttgtataaaactgtacaataagtatacaatgtcttagcaagataaattattatacccaaaattacatgtgtggttcatatgcaataagatacaattttgaagaaagcttataggaatcagtgaaaaataacaactacagaatattttaaggcacacagagaaaatatcaaaaaggacattatagcatttcactgtagaagtgcttaaaaccttggcctcagtgaatagatcaaaagtttataattagcacaccaattggaagtaaacaggtgcttctcaaatgcttgaaaagaaaaggctctttgaagtagttaaaacgtgtctttcaaaattgcttttataagcccttccttaacgtaagggtaacttcatctcacaaactcctggttagtggaatccaaattaatgaggttttactgtatcaaaattatttttataattcaaagagatgatagcaataagaagaatctaatgtggatgtgatttttctctttgaacaattctgttctgttgcactgaccttagcacgcacgcacacacacacacaccatcgccaccactaccatcatcatcttatcctcatctttggaaaataagtactgttgatccatgtaatcctttgcatagtctcatctttactatctttcttctatttcggaacataagaaaaatactcctaataacttggacaatgatacagaaagtgactctgagccttagttaccatcaaaattacattctatctgctaaagcgacatcagaagataaggcttgcaaaccacagtcccaacaagttgaccttgtctccctatgatttccttggaagataaggcctttttagtgttacagtagaaaatgggccttttcatttattcatctgtgagaagctagaggtatttgtttccctgataataacgtgagcaatagtccctaccttgaaatcatccattagtcttggagtttggagggaggaatgattgattcctcatttgttttaatcacctacaaaagcagtactactgactttgcttcttacacttcactgagccccagactttagggccccaatcattgtcaagatcattgtctaactggaactctgaaaggacagtgacagaactgaatgagatgttttccagtgattcagtcacaaagacaattttctcagatcttttgaaagtgattctcaaataaataaatcaaaatccaactcctttccctcaaagtttctagggatctgaaggaaaaggtttactgttggagtccctttttatgtgacccatgtaccagttttaaaggcatcatctatactttatctacatgaagggatcaccatgactttgagagaaaaaagaatcagattaggcctaacattggttgaagaagattaaaatagattcttatattcaagcagaagggaaaaatgaagccaatctagaaaagtaagctaaaaatcctctccttggcttaggatcattgggtcaaactgggagtatatctgtgtgattacaacctgctgctatgagaaaaaagaattgtaacttgaccatgttggctcacacagggcaatgcaaaagaagtcaaaacattcatatcaggtcttggtatctgtgtcaggagaaacgtggtggctttcacagcttcttcacctctgtcctctgtcatgcaactccatttttggctaggtactatttcacatgcacactgtcctgggtgccagaaatacttgtggtgtacttggtttgagcagtacctctagtatgcaccattccagggaacatggttgtcaacataacaagtttagtgtgtgtatttgcagacaacatagccctgaaagcatgaaatgtagaataggtaaggtctgtcttagaaaaggaggaggaagtaccaatttggtgcaagaagatcgtggtgaggaaggacatgggagccacagtgaagtgaaagaggctttaaggaatcagatgcacagatggatgctttgatttacacatttatctagaggagtgattctcaaccttgactgtacataagaatcacctcaggaaatttttaaattcccaattatattaaaatcatttggagtgggaaccagacaccaatatttgcgaaagcctccaaggcggttctaatgtccagccaaagttgattatcactgctttatggccaactaaggaaaccttgtttgtctgccttggctggtgctccagccccagttctgagtggtcagggaaggcaagatgtaagatatagtaatggtatttattctgtatgtctcacagaacaaaagcatttgagaatttctgaccaggcagtgctccatcaactcttaataatcatctttgtgatattctcctatgtgacttgtccatcaattattccaattcaaaggtctaggttttttttcaattgtcttacacatgtgacatcacaagataccagaagtagcacagtaaattcaagagcatataaagctaagtggaaaactaattcttcatatttagacagtggaaattctcaaaacaatcatttgctaaattaggtccaaatttattattcattcttcttctggaggagacatgggtaccaggtacctgttctgctgtaggtatatttcactggacttggtcttagcaaaaaggaagaacaaatcttcctttttgattgttatctcaatcaaaagctcccagggccacttggatttattttcttagtctttggacatgtgtttaaaggaaaagaatacctgtaacttcctatatgacatccagtgccctgaaagggtgcttacaccttcaaaaaaggagagtccagcctatcaaaggcagtaacacataatgagaagaaactcagagttattgcctttcatactgctttccctctgctgttggcccacccttcttgactgcaaagccagaaaataaactagatggtggttttggacaattgtacacaggaacagaatctctaataacctataatttttagtacttaattatgtgatgttttattctaggaaataagaaacagatgacatcattgatgtatctttctttcatcttcagaatttttgcatcttttcagaaaatgacaaattactatttttctgttgcactcagcaattgtgactatacttaacaaaattcttgtagtctgtagagatatcaataaaattgtatatgtttgtacata

SEQ ID NO: 30827 - DNA, 479 bp, Homo sapiens
  source 1..479: mol_type = unassigned DNA
cccccaacgtcgtttttctgaaaataaaatactctgagccgaacgtttcgaagaaggaaagtccgcccttaagagagagacagagtcttgtgtttaaaatgaagaagtttaatttccgaaaagttttggatggcttaactgcctcctcccctggcagtggtagcagcagtggcagtaacagtggtggtggggctggaagtggttccgtacatccggcggggactgcaggggttctcagagaggaaattcaggaaactttgacttcggagtatttccagatttgcaagacagttcggcatggttttcctcatcagcccacagcattagcctttgatccagttcagaaaatcttggctattgggacgagaacaggtgctatacgaatactcgggagacctggtgttgattgctattgccaacatgaaagtggtgcagctgtcctacagctccaatttttgatcaatgagggtgccttggtc

SEQ ID NO: 30828 - DNA, 4132 bp, Homo sapiens
  source 1..4132: mol_type = unassigned DNA
gaggcctggggcgggtcgcgggtcccggcccccagcccccagcccctagccgctgctctttgccccgggccagggcgctcgggctcgcccacggcggcactgagcatgctcagaggcggccgcgcgggcaggtttgcttcgcaggcgctcgcactcggcggcgggcgggcgcgcggctgcagctggagctccagcgcccggagttggagttgccgggagtttccccccaacccctcccttttcgcgcgcggcagcaggagccggcgcgggagccgcgagcggcggcgagccagcacccgggccggctaagccttgtccggagcccggagccccgcgcggggcagccccccggggaggagcctcgtgctctgggacgcgtgccgcgcactggcacggcaggggcgcgagccaggctgcacgattcactgcgtgctgtcctcacttgttctacaatgagtgccaaatctgctatcagcaaggaaatttttgcacctcttgatgaaaggatgctgggagctgtccaagtcaagaggaggacaaagaaaaagattcctttcttggcaactggaggtcaaggcgaatatttaacttatatctgcctgtcagtgacaaacaagaaacccacacaggcgtccatcacaaaggtcaaacagtttgaaggctccacatcatttgttcggagatcacagtggatgctcgagcagcttcgccaggttaatggtatcgatcctaatggggattcggcagagtttgatttgttgtttgaaaatgcttttgaccagtgggtagccagcacagcgtcagaaaaatgcaccttcttccagatcctccaccatacctgccagaggtacctcacggacaggaagccagagtttattaactgccaatccaaaattatgggaggaaacagcatcctccattcagctgctgacagcgtgaccagcgcagtgcagaaggcaagccaggccttgaatgagcgtggagagcgattaggccgagcagaggagaagacagaagacctgaagaacagcgcccagcagtttgcagaaactgcgcacaagcttgccatgaagcacaaatgttgagaaactgcctatcctggtgactcttcttaagagaaactgaagagtttgttcagcagtttttacaagaattcgggacctccgcttgcttctttttttccaatatttggacacttagagtggtttttgttttttcttttcagatgttaatgtgaaagaaagggtgttgcatttttacatttccctaatgatcttgctaataaatgctacaatagcatcagcttcattttgggtttttgcctcctcccactgtgtgtatgtgtgtatatgtatgttttgaatatgttttctttattaaaaaatattttttgtagtttgaatatgaaatttggaccaaatgataaactgcgctgagtctaaactggcaacatgtatttttttctctgatattaagcaggaaggcattttaatgtggtgacatcagatgttatttttcctagatgaaaataaaagtcaagcagtgattagtttcactcactgtcctagctacacttaatttgaagattaaaattctacattgtggaaaacaattgaatttattgggaaaaacagcagtcttagattttgctccttgcatagtaatcttttgcatgaaccatcaccagcgttcaaaaaaaaaaaaaaatcagaatcgcagatagaaatctctttcctgagttacagtttaaatactcttgctacttgtatccagggtgtttacttggaattatcatatgaagggtaaaaatttgagagtaaagccctaaagaaaagcctacctaaaaccctctgtgtactcacagatgtttctcttgtcactgtcatagtgatggtcgctggtatggaaaagtgcttatatttttatcaaaaaattgatttgtccaggtaaaggtctgtgtcaatgataatgtgaacaagtagtacatttaaaatgtttgtcttgtctttttacagtcatgcctattttagagacaccttcataatgtccttgggagagggcctttagtttcttggtatctggattttggaggttttgatgttgtttttgctatctatttatttaatgtaatttaatatgtgagtttcttgacaaattgcatttcatggcaattgcaccttgcctggtctgatataaaacaccacaatcacaaacctttacattgcagtcagtttcaatacagttggtcacacacctcgtgattttctattactcaagataataaggggcttagggtctagaagttctgtttcctagagggttaaaatgctaaacataaaaaaagctgtgctttttttgtgaaactaggagacaagctgcacatctcagacacattgtaagcctaccactgcagcgcattgatttttaagctgcctgaatcttcaggacccctatctattccatcctatccattttgctgattgagtcgatatgtattgcagcctcttacataggagcataagatgacttttggattgttaatactgatttaaatagctgaagttctcctaataaagcattcccaaggagagagaaagtttgtctactgggggtaaaaatatcagatggtgcacattaaaagggagatgagatttgtcggagacagatttcagaatccttttagatgatccaattcaagaaaaccctctataaaatttaataaactgtataagttaactataatattttatactttctttttggtgtcttaaaaatttaaagaagcgaggaacatgccatttggtgagtaccgttggaagctattttaatttctaggaaaagccccaaatatcactccaaatagattttgtttgcagatctcagttcagaatgcacacacacacacacacacacacacacacacacacagagatgtatttatctttccaaattggattctggtttcagagatagagagttggtataaataattgaaaggataaatctaaaaccccctgacagtccgccaaattcaagaacagaagtggttgccaactctctaacaacaatgtttgggaagctgattccaaagtagctgaggatgaggtcataagcatactgtgaaacccaagattcttcttccctggtagaattacaatagttactcttgataaatataagtattccatgtcttgccctctttcctcactctctgcttatccttttagacctaagtttcattggaaatagcctgaattagaagaaagcccatccgaatctttattagccccctctaatgattagtttccaggctgcgttcatacctttgacctctcagtgtcaaagtcctacctaggcctccccacaacagagagggccgtaacagcaatccctgcccctcctttacctcccagcctcttgcagaggagcccagtgataacacatgtgaagttctttgctgtcctcttgtagaaggtgctgcagtgcaaagtattaatacggtcttagacaaaataactgtcatgatttgggaccagtttggttgagcttgtcagaagacatttcatttgtttcatttctgcacttctctatgaattttgggatactatatttctgtgaaggacttattgtatagacaactcaaaaaggaaagaaactttccagtattaccacttcttcctggaatatagctgtagtatttctcactagtattattagatacctgtgtacagaaagtatgcagttattcaggttaatgtttcatattaaagaatgtatttgtaaaatgtaacatgatcagtagttaccttttttcaagctctgaagaagttcagattacgtgttagacttaagttacagtgaaaactgttttaatactacttttgtggctagcaaaggttgtgcatctatttaaaattatttacaggatgctctaaataaggggcattaaagataggtttagctcttaattttagaaattgtgacactactgatgtctgtcatacagttattcttcagaagttctctgagatgtcaaatataatttttgtttaattcagagataagtaacacctgctctattgattcactattacaacaaaccctaattttgtcattaaatattttaactctg

SEQ ID NO: 30829 - DNA, 686 bp, Homo sapiens
  source 1..686: mol_type = unassigned DNA
gggcgcgagccaggctgcacgattcactgcgtgctgtcctcacttgttctacaatgagtgccaaatctgctatcagcaaggaaatttttgcacctcttgatgaaaggatgctgggagctgtccaagtcaagaggaggacaaagaaaaagattcctttcttggcaactggaggtcaaggcgaatatttaacttatatctgcctgtcagtgacaaacaagaaacccacacaggcgtccatcacaaaggtcaaacagtttgaaggctccacatcatttgttcggagatcacagtggatgctcgagcagcttcgccaggttaatggtatcgatcctaatggggattcggcagagtttgatttgttgtttgaaaatgcttttgaccagtgggtagccagcacagcgtcagaaaaatgcaccttcttccagatcctccaccatacctgccagaggtacctcacggacaggaagccagagtttattaactgccaatccaaaattatgggaggaaacagcatcctccattcagctgctgacagcgtgaccagcgcagtgcagaaggcaagccaggccttgaatgagcgtggagagcgattaggccgagcagaggagaagacagaagacctgaagaacagcgcccagcagtttgcagaaactgcgcacaaggtgacctttcggggaagaaaataa

SEQ ID NO: 30830 - DNA, 4021 bp, Homo sapiens
  source 1..4021: mol_type = unassigned DNA
ctcccttttcgcgcgcggcagcaggagccggcgcgggagccgcgagcggcggcgagccagcacccgggccggctaagccttgtccggagcccggagccccgcgcggggcagccccccggggaggagcctcgtgctctgggacgcgtgccgcgcactggcacggcaggggcgcgagccaggctgcacgtttcctgtttagaaagttctgctccttcataaggaccttgaagtactaggaggaaaggtgctttgtgtgtggagttttccatgaagtgcagtcccaactaaaaggctgcgttaaagattcactgcgtgctgtcctcacttgttctacaatgagtgccaaatctgctatcagcaaggaaatttttgcacctcttgatgaaaggatgctgggagctgtccaagtcaagaggaggacaaagaaaaagattcctttcttggcaactggaggtcaaggcgaatatttaacttatatctgcctgtcagtgacaaacaagaaacccacacaggcgtccatcacaaaggtcaaacagtttgaaggctccacatcatttgttcggagatcacagtggatgctcgagcagcttcgccaggttaatggtatcgatcctaatggggattcggcagagtttgatttgttgtttgaaaatgcttttgaccagtgggtagccagcacagcgtcagaaaaatgcaccttcttccagatcctccaccatacctgccagaggtacctcacggacaggaagccagagtttattaactgccaatccaaaattatgggaggaaacagcatcctccattcagctgctgacagcgtgaccagcgcagtgcagaaggcaagccaggccttgaatgagcgtggagagcgattaggccgagcagaggagaagacagaagacctgaagaacagcgcccagcagtttgcagaaactgcgcacaagcttgccatgaagcacaaatgttgagaaactgcctatcctggtgactcttcttaagagaaactgaagagtttgttcagcagtttttacaagaattcgggacctccgcttgcttctttttttccaatatttggacacttagagtggtttttgttttttcttttcagatgttaatgtgaaagaaagggtgttgcatttttacatttccctaatgatcttgctaataaatgctacaatagcatcagcttcattttgggtttttgcctcctcccactgtgtgtatgtgtgtatatgtatgttttgaatatgttttctttattaaaaaatattttttgtagtttgaatatgaaatttggaccaaatgataaactgcgctgagtctaaactggcaacatgtatttttttctctgatattaagcaggaaggcattttaatgtggtgacatcagatgttatttttcctagatgaaaataaaagtcaagcagtgattagtttcactcactgtcctagctacacttaatttgaagattaaaattctacattgtggaaaacaattgaatttattgggaaaaacagcagtcttagattttgctccttgcatagtaatcttttgcatgaaccatcaccagcgttcaaaaaaaaaaaaaaatcagaatcgcagatagaaatctctttcctgagttacagtttaaatactcttgctacttgtatccagggtgtttacttggaattatcatatgaagggtaaaaatttgagagtaaagccctaaagaaaagcctacctaaaaccctctgtgtactcacagatgtttctcttgtcactgtcatagtgatggtcgctggtatggaaaagtgcttatatttttatcaaaaaattgatttgtccaggtaaaggtctgtgtcaatgataatgtgaacaagtagtacatttaaaatgtttgtcttgtctttttacagtcatgcctattttagagacaccttcataatgtccttgggagagggcctttagtttcttggtatctggattttggaggttttgatgttgtttttgctatctatttatttaatgtaatttaatatgtgagtttcttgacaaattgcatttcatggcaattgcaccttgcctggtctgatataaaacaccacaatcacaaacctttacattgcagtcagtttcaatacagttggtcacacacctcgtgattttctattactcaagataataaggggcttagggtctagaagttctgtttcctagagggttaaaatgctaaacataaaaaaagctgtgctttttttgtgaaactaggagacaagctgcacatctcagacacattgtaagcctaccactgcagcgcattgatttttaagctgcctgaatcttcaggacccctatctattccatcctatccattttgctgattgagtcgatatgtattgcagcctcttacataggagcataagatgacttttggattgttaatactgatttaaatagctgaagttctcctaataaagcattcccaaggagagagaaagtttgtctactgggggtaaaaatatcagatggtgcacattaaaagggagatgagatttgtcggagacagatttcagaatccttttagatgatccaattcaagaaaaccctctataaaatttaataaactgtataagttaactataatattttatactttctttttggtgtcttaaaaatttaaagaagcgaggaacatgccatttggtgagtaccgttggaagctattttaatttctaggaaaagccccaaatatcactccaaatagattttgtttgcagatctcagttcagaatgcacacacacacacacacacacacacacacacacacagagatgtatttatctttccaaattggattctggtttcagagatagagagttggtataaataattgaaaggataaatctaaaaccccctgacagtccgccaaattcaagaacagaagtggttgccaactctctaacaacaatgtttgggaagctgattccaaagtagctgaggatgaggtcataagcatactgtgaaacccaagattcttcttccctggtagaattacaatagttactcttgataaatataagtattccatgtcttgccctctttcctcactctctgcttatccttttagacctaagtttcattggaaatagcctgaattagaagaaagcccatccgaatctttattagccccctctaatgattagtttccaggctgcgttcatacctttgacctctcagtgtcaaagtcctacctaggcctccccacaacagagagggccgtaacagcaatccctgcccctcctttacctcccagcctcttgcagaggagcccagtgataacacatgtgaagttctttgctgtcctcttgtagaaggtgctgcagtgcaaagtattaatacggtcttagacaaaataactgtcatgatttgggaccagtttggttgagcttgtcagaagacatttcatttgtttcatttctgcacttctctatgaattttgggatactatatttctgtgaaggacttattgtatagacaactcaaaaaggaaagaaactttccagtattaccacttcttcctggaatatagctgtagtatttctcactagtattattagatacctgtgtacagaaagtatgcagttattcaggttaatgtttcatattaaagaatgtatttgtaaaatgtaacatgatcagtagttaccttttttcaagctctgaagaagttcagattacgtgttagacttaagttacagtgaaaactgttttaatactacttttgtggctagcaaaggttgtgcatctatttaaaattatttacaggatgctctaaataaggggcattaaagataggtttagctcttaattttagaaattgtgacactactgatgtctgtcatacagttattcttcagaagttctctgagatgtcaaatataatttttgtttaattcagagataagtaacacctgctctattgattcactattacaacaaaccctaattttgtcattaaatattttaactctgtgatga

SEQ ID NO: 30831 - DNA, 1970 bp, Homo sapiens
  source 1..1970: mol_type = unassigned DNA
ccaggctgcacggtaggaccggggcgaggggagccaggcggtcagggcggaggccaagcccgggagatgcggttgcagccgccacggctgttggggcgcctggcgctccgtccgaggcgggtggctgtgaggccaggggagtaggcaggctcccagagagattcttccaagttggcgggtggcgggagagggggccgcgcgccccggcgcagctgctttgtgcgcgcagagagggactcgtgtccctggttctctccaaccctgggacccgttgtgcgggcagtattgggcaagccgcagaacggagcgatttcctccgagaaagttgaggatggagcctttttttccgcaccgtccccgcgatggcatgggccccgagaatgctgccccgaggctcccagtgtgggggagctcggggtcgctgcgcctctagcttgagcgcagaaatccgcgaatcactccgatcttcgcgaactctggcatcttctaggaaaatcattactgccaaaactgaggcgagcttttctggcgggcacggcaccctgcccccagggcgctggccctgggcgatgccccctttccgatctcaggcttggtcaagggcgccaggttccgaattcgcgcttgccgtgcacgccggcatcgagcctcaccaacaccgccgggcaacgtggctggagtagattcactgcgtgctgtcctcacttgttctacaatgagtgccaaatctgctatcagcaaggaaatttttgcacctcttgatgaaaggatgctgggagctgtccaagtcaagaggaggacaaagaaaaagattcctttcttggcaactggaggtcaaggcgaatatttaacttatatctgcctgtcagtgacaaacaagaaacccacacaggcgtccatcacaaaggtcaaacagtttgaaggctccacatcatttgttcggagatcacagtggatgctcgagcagcttcgccaggttaatggtatcgatcctaatggggattcggcagagtttgatttgttgtttgaaaatgcttttgaccagtgggtagccagcacagcgtcagaaaaatgcaccttcttccagatcctccaccatacctgccagaggtacctcacggacaggaagccagagtttattaactgccaatccaaaattatgggaggaaacagcatcctccattcagctgctgacagcgtgaccagcgcagtgcagaaggcaagccaggccttgaatgagcgtggagagcgattaggccgagcagaggagaagacagaagacctgaagaacagcgcccagcagtttgcagaaactgcgcacaagcttgccatgaagcacaaatgttgagaaactgcctatcctggtgactcttcttaagagaaactgaagagtttgttcagcagtttttacaagaattcgggacctccgcttgcttctttttttccaatatttggacacttagagtggtttttgttttttcttttcagatgttaatgtgaaagaaagggtgttgcatttttacatttccctaatgatcttgctaataaatgctacaatagcatcagcttcattttgggtttttgcctcctcccactgtgtgtatgtgtgtatatgtatgttttgaatatgttttctttattaaaaaatattttttgtagtttgaatatgaaatttggaccaaatgataaactgcgctgagtctaaactggcaacatgtatttttttctctgatattaagcaggaaggcattttaatgtggtgacatcagatgttatttttcctagatgaaaataaaagtcaagcagtgattagtttcactcactgtcctagctacacttaatttgaagattaaaattctacattgtggaaaacaattgaatttattgggaaaaacagcagtcttagattttgctccttgcatagtaatcttttgcatgaaccatcaccagcgttcaaaaaaaaaaaaaaa

SEQ ID NO: 30832 - DNA, 1223 bp, Homo sapiens
  source 1..1223: mol_type = unassigned DNA
attacgcttccctagggactgggtgggagagaataggatcgattcactgcgtgctgtcctcacttgttctacaatgagtgccaaatctgctatcagcaaggaaatttttgcacctcttgatgaaaggatgctgggagctgtccaagtcaagaggaggacaaagaaaaagattcctttcttggcaactggaggtcaaggcgaatatttaacttatatctgcctgtcagtgacaaacaagaaacccacacaggcgtccatcacaaaggtcaaacagtttgaaggctccacatcatttgttcggagatcacagtggatgctcgagcagcttcgccaggttaatggtatcgatcctaatggggattcggcagagtttgatttgttgtttgaaaatgcttttgaccagtgggtagccagcacagcgtcagaaaaatgcaccttcttccagatcctccaccatacctgccagaggtacctcacggacaggaagccagagtttattaactgccaatccaaaattatgggaggaaacagcatcctccattcagctgctgacagcgtgaccagcgcagtgcagaaggcaagccaggccttgaatgagcgtggagagcgattaggccgagcagaggagaagacagaagacctgaagaacagcgcccagcagtttgcagaaactgcgcacaagcttgccatgaagcacaaatgttgagaaactgcctatcctggtgactcttcttaagagaaactgaagagtttgttcagcagtttttacaagaattcgggacctccgcttgcttctttttttccaatatttggacacttagagtggtttttgttttttcttttcagatgttaatgtgaaagaaagggtgttgcatttttacatttccctaatgatcttgctaataaatgctacaatagcatcagcttcattttgggtttttgcctcctcccactgtgtgtatgtgtgtatatgtatgttttgaatatgttttctttattaaaaaatattttttgtagtttgaatatgaaatttggaccaaatgataaactgcgctgagtctaaactggcaacatgtatttttttctctgatattaagcaggaaggcattttaatgtggtgacatcagatgttatttttcctagatgaaaataaaagtcaagcagtgattagtttcactcactgtcctagctacacttaatttgaagattaaaattctacattg

SEQ ID NO: 30833 - DNA, 682 bp, Homo sapiens
  source 1..682: mol_type = unassigned DNA
acagatagaatactggcagaatggaaatgactggcatgtcagtgatgagtttatagagaagcatttaggattttcctaggtcctgcagtcagtgggtgttcttgctgcaagtgcgtcagtcaaacccaatcaaaagaaatgtcggcttgtttcctagacactagacgagcggcctttctgcagtgtgacctgccttcctcttacaggatactcaccctgccggagtctggtcactgtgggtcagctgagccagtttctgatgctcctgctctcctcctttcaggaaacagcatcctccattcagctgctgacagcgtgaccagcgcagtgcagaaggcaagccaggccttgaatgagcgtggagagcgattaggccgagcagaggagaagacagaagacctgaagaacagcgcccagcagtttgcagaaactgcgcacaagcttgccatgaagcacaaatgttgagaaactgcctatcctggtgactcttcttaagagaaactgaagagtttgttcagcagtttttacaagaattcgggacctccgcttgcttctttttttccaatatttggacacttagagtggtttttgttttttcttttcagatgttaatgtgaaagaaagggtgttgcatttttacatttccctaatgatcttgctaataaatgctacaatagcatca

SEQ ID NO: 30834 - DNA, 4021 bp, Homo sapiens; identical to SEQ ID NO: 30830
  source 1..4021: mol_type = unassigned DNA

SEQ ID NO: 30835 - DNA, 1311 bp, Homo sapiens
  source 1..1311: mol_type = unassigned DNA
tttcctgtttagaaagttctgctccttcataaggaccttgaagtactaggaggaaaggtgctttgtgtgtggagttttccatgaagtgcagtcccaactaaaaggctgcgttaaaggctagagtagtgcagtggcgtgatctcagctcactccagcctctgcctcccgggctcaagtgacccacctgcctcagcctcccaagtagctgggacaacagatgtgagccaccacacccagattcactgcgtgctgtcctcacttgttctacaatgagtgccaaatctgctatcagcaaggaaatttttgcacctcttgatgaaaggatgctgggagctgtccaagtcaagaggaggacaaagaaaaagattcctttcttggcaactggaggtcaaggcgaatatttaacttatatctgcctgtcagtgacaaacaagaaacccacacaggcgtccatcacaaaggtcaaacagtttgaaggctccacatcatttgttcggagatcacagtggatgctcgagcagcttcgccaggttaatggtatcgatcctaatggggattcggcagagtttgatttgttgtttgaaaatgcttttgaccagtgggtagccagcacagcgtcagaaaaatgcaccttcttccagatcctccaccatacctgccagaggtacctcacggacaggaagccagagtttattaactgccaatccaaaattatgggaggaaacagcatcctccattcagctgctgacagcgtgaccagcgcagtgcagaaggcaagccaggccttgaatgagcgtggagagcgattaggccgagcagaggagaagacagaagacctgaagaacagcgcccagcagtttgcagaaactgcgcacaagcttgccatgaagcacaaatgttgagaaactgcctatcctggtgactcttcttaagagaaactgaagagtttgttcagcagtttttacaagaattcgggacctccgcttgcttctttttttccaatatttggacacttagagtggtttttgttttttcttttcagatgttaatgtgaaagaaagggtgttgcatttttacatttccctaatgatcttgctaataaatgctacaatagcatcagcttcattttgggtttttgcctcctcccactgtgtgtatgtgtgtatatgtatgttttgaatatgttttctttattaaaaaatattttttgtagtttgaatatgaaatttggaccaaatgataaactgcgctgagtctaaactggcaacatgtatttttttctctgatattaagcaggaaggcattttaatg

SEQ ID NO: 30836 - DNA, 5164 bp, Homo sapiens
  source 1..5164: mol_type = unassigned DNA
gtgttgtgtttggagagagggtagacagcagtgggaaggggacgtaactgagaagcatgaaacaccttgagtggaccatgagacctgcttagagttaggggaaagcttgagaggttcaaggatagaagaactcagggtggttcaggtgtgacatgggttatgtgggcatttctggattgctctgggaaggttgctccaccccggtcaggatcaggcgagggggaaccagcctgagtgcagctgccaactcccgccgagtgcgtctgcgaactcccggagcggagtcccgcgtgccgccacctccccgcgggacgcactctcctcgctcccccgggccccgcgtcctccccccggccacccttccccacttttccccccttttccaatcacatggcattttaagaatgccggaaagatggcggtagcggcggcggcggcggcggctgggccggctggcgcgggaggcggccgggcgcagcggagcgggctgctggaagttttggtgcgggatcgctggcacaaagttctggtgaacttgagcgaggacgccctggttctgagcagcgaggagggcgctgcggcgtacaacggcatcgggaccgccaccaatggctcgttctgcaggggcgccggggctgggcacccgggcgcgggcggcgcgcagcccccggactcgcccgccggggtccgcaccgctttcaccgacctgcccgagcaggtgcccgagtccatctcgaaccagaagcgtggcgtgaaggtgctgaagcaggagctgggcgggctggggatcagcatcaaggggggcaaggagaacaagatgcccatcctcatcagcaagatcttcaaggggctggcggcggaccagacccaagccctgtacgtgggcgacgccatcctgtccgtgaacggagccgacctgcgggacgccacccacgacgaggcggtgcaggcgttgaagcgcgcgggcaaggaagtgctgctggaagtgaagtacatgcgagaagccacgccctatgtgaagaaaggatccccagtatccgagattgggtgggaaacacctccgcctgaatcccctcggttagggggcagcacctcagaccccccgtcatcgcagtccttctccttccacagagaccggaaaagcatccccctcaaaatgtgctacgtcactcggagtatggccttggccgaccctgagaacaggcagcttgaaatccactctccagatgctaagcacacggtgatcctaaggagcaaggactcagccacggcccaggcatggttcagtgccatccattccaacgttaatgacctgctgacccgagtgattgctgaggtcagagagcagctggggaaaacaggcattgctgggagccgagagattaggcatcttggctggcttgcagaaaaggtgccaggggagagcaagaaacagtggaaaccagccctggttgtgctgactgagaaagaccttttaatctatgacagcatgccacggaggaaggaagcctggttcagcccagttcacacataccctcttcttgccaccaggctggtccattcaggtccaggaaagggatcaccccaggctggtgtggatctgtcctttgcaacgcgaactggtaccaggcaagggattgaaacacatctcttcagagcagagaccagcagggacctctcccactggacaaggagcatagtacagggttgccacaattctgctgaactcattgctgaaatcagcactgcttgcacctacaaaaaccaggagtgccgtttgaccatacattatgagaatggattttctattaccactgaaccacaggagggtgcctttcccaagaccatcatacagtctccttatgaaaagctcaaaatgtcttcagatgatggaatcaggatgctgtatttagattttggaggcaaagatggagagattcaactggaccttcattcctgccccaagccaattgttttcatcattcattccttcctgtcagctaagattacaagactgggcttggtggcctgaagacaggggtgacttgcctttgagaaaagaagggctgcaatgccaccagagaacgtgatgtcagacaccatctgtagtgagcagcgcaccagatgtagcgtgctacagtcagctttagctctcaagagtcgtatgtaactgtcccagactcctctgtcagtttcagcaactacaagggataccctgcgaaagtaccatgagaaatatcagagtaaaactttctagaacagtacaaggttaaagaggtgaggtgacgggaaatacacagcatagctttgaaataatgacaaccaaggacatgaccattagaacagcatgtgcagatcttaatcatcccagttcctaggcaacttgttcaccaggtacgcaagggccgaatagttgagaaatggacattcttacctactcctcctagccccctatccccagtaacagtgatcccttttcttattgtgatttatttcctaattcttgctgagttgactttcccttgtaggaaaagaaaaatatttcaaatagaaacccaccttttatttaagtatgaagcagctgttactttttaaaaaatgaattatctttcaatggtgtagaatgattccaaagtgtctccattagcatatactgagcaggaattaaataaagcatcagatactgatctgagctgtaagctggtagaatctgagccaaagtagactgcttaaattgataagctttgctaaagagttgtatgcacaaaggatgattaattctgggactatactcacaccaaggtctgctgtcttatagccaagaattacagctttatttatagagagtgaattatgggtattttttcagaaaatattgtcatctgatatacacataaaacaactcacattgttggagttaactaattatccccatttcatggttttcagtggcaacttactgacccttgtttttgcctgtgcttgtatgcatgcattttcaagcaagtaataaagcagcctcatttaattctggataatgctgggttttacatatagactgaatgctataatcaaatctattgacagtatctgcagttctttcagaattccagggaaataatataacgacctgatatctttctacaggaatattttcagacattatatagcacattactgatttaatgcttttacttttatctttcaaaacaaattcactaaaaataacacctattgattttgaagtcacttttctcaaaccttgaaaatgagctctaggatctctataaacatttctaacacttttcctgtagtttacatagacagacatctgttgttagacctgtgtgtttttaaagaatcatatgttaacaaatacccatgcaaagagcttcaaaaagtgaaaccgtgttaaaggaacacaatttttctcactcagacatatttgtttattgaattgcaaagttttattttaaatcagcatttccccaaagaatatatcatatgacgctagttccaaggggcttgactgagtggtgttttgctggggggagacaggggtttgttaatacactttactaaatactgagctgaaaaatgttaaatagatttcacgattgcctccttgaagattttaaagttcattgtggttcttcaaggcgaaatccggtgaaccattcctcacacttacctacaggactcttttctaatggagcatcttgtgaagctagtgggtttttttgttgttgttatttgttttttttttttaatgctttagaaaacacagctttaggatattgactttttgtttatttctattttcaaatgctgaaaagtcaagtcccagtttgaataccatagaaaagctttgatgcatttgtaaattatattgcactctttcactatatattttcaaaatcactggaatgttgttatacaagagaattataattgtgtattgtaaataacatattaaaatacatatattaatgccaatagttaaattcaacaatatgtaatctaaggtgctcggttctacatgaagtatgagttaactgctcataattaagttgccaagattctattatatatttatagacaaattaaaatgatcataattacaaatatgatttctttatcacttaagctttgggctgattaatatctgtgtgggggtcaatggaaactacattctctacatttataaacatttaatttaattatttatattttaggaaaatatatttgaataaaattaatgcattttctagagtaaattaaaatgttattagcaagaaatagaaaatttgactaagataattgtgtatatgaatcatttttcccccaagttaaaatgtatcataatagagaggctctaatgaatcaatttccaatactcatttctttcttattttgaattcaagttacaatgactttacactgtagattttaatcttgtctgatgtgtgctggtgtgtatgacacaaactcataagtctggatcatgcttgggtacagtcaatgaatcaaccgagtcactttgaggaatttgtttttgtccaatttgctctgtgctcaatcccatgaattattaaatttacaatgtttgtccccaaatgaaaaccaatataaatgaatgatgttttaatctgtactttatgggaagttgcctatttgtcagtagatgtggttaagtgagtcctctggtgcagtgacatccttttaagccatctcatagggatttaaagaaggccaataggaatatagatattggtttttctttctctgacttgaactaagtaggagaaaccaaaccataaacctattacaaactacccaggcagaggcatttacttaattcatcaactagtgcaattaaaaccctgaaaacacatgatccttgttgactctgcttggttgaagcaggaaagaatggtcttgatggtcagaaagttttaaaattaatgggcagggcctttctggaccctgttttccaaacacgttagatattccgtcttgaggggattggagtaggctacagtgagggggtaatttttggatgtatctggacttttaaaaaatgtgcctatatttatagcaccatgaatattatgtaaaatttatatatgaattaaataaatattcacctctgatttccagtgca

SEQ ID NO: 30837 - DNA, 2273 bp, Homo sapiens
  source 1..2273: mol_type = unassigned DNA
cttgctttggggttttgcaactggctgctggcttttttcccctcccctgtctcggtctctccttcttcttttaggttgctccaccccggtcaggatcaggcgagggggaaccagcctgagtgcagctgccaactcccgccgagtgcgtctgcgaactcccggagcggagtcccgcgtgccgccacctccccgcgggacgcactctcctcgctcccccgggccccgcgtcctccccccggccacccttccccacttttccccccttttccaatcacatggcattttaagaatgccggaaagatggcggtagcggcggcggcggcggcggctgggccggctggcgcgggaggcggccgggcgcagcggagcgggctgctggaagttttggtgcgggatcgctggcacaaagttctggtgaacttgagcgaggacgccctggttctgagcagcgaggagggcgctgcggcgtacaacggcatcgggaccgccaccaatggctcgttctgcaggggcgccggggctgggcacccgggcgcgggcggcgcgcagcccccggactcgcccgccggggtccgcaccgctttcaccgacctgcccgagcaggtgcccgagtccatctcgaaccagaagcgtggcgtgaaggtgctgaagcaggagctgggcgggctggggatcagcatcaaggggggcaaggagaacaagatgcccatcctcatcagcaagatcttcaaggggctggcggcggaccagacccaagccctgtacgtgggcgacgccatcctgtccgtgaacggagccgacctgcgggacgccacccacgacgaggcggtgcaggcgttgaagcgcgcgggcaaggaagtgctgctggaagtgaagtacatgcgagaagccacgccctatgtgaagaaaggatccccagtatccgagattgggtgggaaacacctccgcctgaatcccctcggttagggggcagcacctcagaccccccgtcatcgcagtccttctccttccacagagaccggaaaagcatccccctcaaaatgtgctacgtcactcggagtatggccttggccgaccctgagaacaggcagcttgaaatccactctccagatgctaagcacacggtgatcctaaggagcaaggactcagccacggcccaggcatggttcagtgccatccattccaacgttaatgacctgctgacccgagtgattgctgaggtcagagagcagctggggaaaacaggcattgctgggagccgagagattaggcatcttggctggcttgcagaaaaggtgccaggggagagcaagaaacagtggaaaccagccctggttgtgctgactgagaaagaccttttaatctatgacagcatgccacggaggaaggaagcctggttcagcccagttcacacataccctcttcttgccaccaggctggtccattcaggtccaggaaagggatcaccccaggctggtgtggatctgtcctttgcaacgcgaactggtaccaggcaagggattgaaacacatctcttcagagcagagaccagcagggacctctcccactggacaaggagcatagtacagggttgccacaattctgctgaactcattgctgaaatcagcactgcttgcacctacaaaaaccaggagtgccgtttgaccatacattatgagaatggattttctattaccactgaaccacaggagggtgcctttcccaagaccatcatacagtctccttatgaaaagctcaaaatgtcttcagatgatggaatcaggatgctgtatttagattttggaggcaaagatggagagattcaactggaccttcattcctgccccaagccaattgttttcatcattcattccttcctgtcagctaagattacaagactgggcttggtggcctgaagacaggggtgacttgcctttgagaaaagaagggctgcaatgccaccagagaacgtgatgtcagacaccatctgtagtgagcagcgcaccagatgtagcgtgctacagtcagctttagctctcaagagtcgtatgtaactgtcccagactcctctgtcagtttcagcaactacaagggataccctgcgaaagtaccatgagaaatatcagagtaaaactttctagaacagtacaaggttaaagaggtgaggtgacgggaaatacacagcatagctttgaaataatgacaaccaaggacatgaccattagaacagcatgtgcagatcttaatcatcccagttcctaggcaacttgtt

SEQ ID NO: 30838 - DNA, 559 bp, Homo sapiens
  source 1..559: mol_type = unassigned DNA
aacatttgtccctggggtctgaggcaggcatgacctgttgaaaaccccaggccagcagagacacctgtccagggctcgatagaaaacatttcttgcatttaaggacaggaggtttaagccactcgggctacgttgactcttcattctagaatcttgggacagcgtattcccttttaactcctggggagcccagggccttggtctgagtttagcttcctccagggaacccgggtggaaaggagagacaggttgctccaccccggtcaggatcaggcgagggggaaccagcctgagtgcagctgccaactcccgccgagtgcgtctgcgaactcccggagcggagtcccgcgtgccgccacctccccgcgggacgcactctcctcgctcccccgggccccgcgtcctccccccggccacccttccccacttttccccccttttccaatcacatggcattttaagaatgccggaaagatggcggtagcggcggcggcggcggcggctgggccggctggcgcgggaggcggccgggcgcagcggagcgggctgctggaagttt

SEQ ID NO: 30839 - DNA, 9789 bp, Homo sapiens
  source 1..9789: mol_type = unassigned DNA
gggcgggaagagggaagcgccgaggctgcctgactggaatgagggtagctgcggcgactgcggcggctggagcggggccggccatggcggtgtggacgcgggccaccaaagcggggctggtggagctgctcctgagggagcgctgggtccgagtggtggccgagctgagcggggagagcctgagcctgacgggcgacgccgccgcggccgagctggagcccgctctgggacccgcggccgccgccttcaacggcctcccaaacggcggcggcgcgggcgactcgctgcccgggagcccaagccgcggcctggggcccccgagcccgccggcgccgcctcggggccccgcgggtgaggcgggcgcgtcgccgcccgtgcgccgggtgcgggtggtgaagcaagaggcgggcggcctgggcatcagcatcaagggcggccgcgagaaccggatgccgatcctcatctccaagatcttccccgggctggctgccgaccagagccgggcgctgcggctgggcgacgccatcctgtcggtgaacggcaccgacctgcgccaggccacccacgaccaggccgtgcaggcgctgaagcgcgcgggcaaggaggtgctgctggaggtcaagttcatccgagaagtaacaccatatatcaagaagccatcattagtatcagatctgccgtgggaaggtgcagccccccagtcaccaagctttagtggcagtgaggactctggttcgccaaaacaccagaacagcaccaaggacaggaagatcatccctctcaaaatgtgctttgctgctagaaacctaagcatgccggatctggaaaacagattgatagagctacattctcctgatagcaggaacacgttgatcctacgctgcaaagatacagccacagcacactcctggttcgtagctatccacaccaacataatggctctcctcccacaggtgttggctgaactcaacgccatgcttggggcaaccagtacagcaggaggcagtaaagaggtgaagcatattgcctggctggcagaacaggcaaaactagatggtggaagacagcaatggagacctgtcctcatggctgtgactgagaaggatttgctgctctatgactgtatgccgtggacaagagatgcctgggcgtcaccatgccacagctacccacttgttgccaccaggttggttcattctggctccggatgtcgatccccctcccttggatctgaccttacatttgctaccaggacaggctctcgacagggcattgagatgcatctcttcagggtggagacacatcgggatctgtcatcctggaccaggatacttgttcagggttgccatgctgctgctgagctgatcaaggaagtctctctaggctgcatgttaaatggccaagaggtgaggcttactattcactatgaaaatgggttcaccatctcaagggaaaatggaggctccagcagcatattgtaccgctacccctttgaaaggctgaagatgtctgctgatgatggcatccgaaatctatacttggattttggtggtcccgagggagaactgaccatggacctgcactcttgtccgaagccgattgtatttgtgttgcacacgtttttatcggccaaagtcactcgtatgggactgcttgtatgagcaacaaaaaatcagaaaagagccttgactgtcacaagaaatatttccacctcaaaaaaaaaaaagcacaaaaagaaactctttgctctccttcagcacagtgccttcccaaggacctgcaaataactgctgaaccataaccgtgtttaaagaagagcctacctttcacagtctaccttggccagatattctagcactctaaaaggctccaaaatgaagctgttgatttattctcatttcaaaatatggtttatgagtaattaggtttatttctactgctaaaaagaatggctcattgttttctttttttttcattgttttcatttttagacataatcaaatacccaagcattgttttctttttcttctccctgtaggatttgtgttgtgcttagccttgatctcttgttcagaacaattgtcccttcccaggtgctagcttgcagcagcctgttgcttcctgagcattccagataggtcgtatgtcttggaatttactgtcctcactagctccttccaccataggaagtccttgaattgtatcaccaaagggttgttccatttgccctggatctccctctatctcagcctggccatcacttcccaccttatcccaagctttgccactgtctctaggacttagaacttgtaaatttgatttgccttgccttctacttcctttctagtggtgactgagttgaaaagcaagttggaagccactgcttttaaagaaaagttttgcttggtttaggtttttccaattttatttttgttaggagccaggggataagatttattttaaatgaaaatcctcttcctaggttaagccattttttttattgcttaccaaatgtgcctttggttagggttagtggagctttattagtcactatttgaataactggaaatcactgccatttccaggagatcacctatcctagttttgaggaatagtcattgaggtgggtttccttaatggcatctcttctagtaggcagatctgtttgaacaagataaatcctaaagagccagcctgcttgaggagtagacttggtgggtgaagccagcaattccgcacaaacgtcatgttgaattgttttgggctgcccaaaaacaacaggatgcagcatcctggctgtggcctggccctttgtggcagcagtggcatggacaagcaactgctaattcgagacttactattggcttcacagcacaccctacagtgagcagggtgatgagaccgtggaacagctacctgcttttggttaagattgccagatatcattaggacacagtagcagcaagaatgctgattttgtagtgttagaaaatgaactcagcttgtttttcctaattttgaaggtggtatatatctgcaaacatttaaaatggtataatatcatataaaatgtcaaaattagcacagtccctggatctcaaagaataggtaatattgacttggatgttctttatgctctctgaagaaaggtctagggaaagttcttgtttgcttgattgatcaagagtgccacggaagaatgtgagcgctgtggagggtggaggagggtgtcacttcagatggggcaggcacagggggagaaaagaagagaaaaacacacctgtgtgcaaaatgagctatttggtttcagtgcggcctgaccgatggggaggacccatgagcagagagagttctaggtcaacattgtaactccattgtcctccttcacccataagtcagtcctccttcctcattacagtgaaaccaacaatatgcagaggttggggagagatgcctgttcttcccccagcttcatataattgtcaaagttccaaaaatgaattatctgaactgcttaaaactggaaattaaaatctagacaagaatatgtctttcaagagctttttatgttttgaaagttcataaacctaagattggctccatctgagataaattttcttttctttttttttttgagacggagtctcgttctgtctcccaggctggagtgcagtggcatgatctcggctcactgcaacctccacctcctaggttcaagtgattctcctgagtagctggggttatagctacccaccaccacacccagctaatttttgtatttttagtagaggcaggttttcaccatgttggctaggctggtcttgaactcccgacctcaagtgatccacctgccttggcctcccaaagtgctgggattataggtgtgagcccccgtgcctggcccacaataaattttcatttcagagaaggaaaaaaatctcttgaacgtccagaaatgatttctggaatcagaatttcaatatgtaataccctcaggtaggcaatcttgaaccctctatgcagtgagagcattattaatatgagatgttgaatgatgcctttacagacttcagcagcaaagccatttggttgaggttttctgtgttaatgtgaaaagctaagccactgagatttgcaggggagcttctgagccaccctgcttgttggttatatgaggatgtaaaataggtggaattaaaatgtgagcaggaaaggcaaggcatgtgtgcattttcactcattttggtcaaggttaaactgacatgtatagcactgaggtctgtagggttcttaatatcttttgagtcttgctgtgaaatgaaagtgtgggaggtttcctttgtccattagcagccccaagaaccagaacccttttgctgcttttcttacatacctaacagctctccagtcatgatgaccaaggttgttcttcaatcaaatgtgtttgtgggattttcagtccgcaaatgaagtgctctctaatgaatgggacaccatgataaatatgtatttatatttagatgccaaagtatggcaaattatttccaaatgataactacaaatgggaattttcgatattctaccttttttatagaaccagctcacttttcatttctttttcattttgaattaagaaaattgttgaggatgtggtgggttccagtgtgtggaatggaaaggaaactgcagaatagtgtctgctccccattcagagggactgcttcctgtgccccccagacccggggcttcgacagcttctccacattccacacagatgcctaggagcagcgagttggtatatgaaaagtctcccaccttttctcctaaaacttctctcctttctctccataaaaagaaaaggaaaggaacaaaagaaaaacattcagtttttctttttctgaaaaaggtaagtcctttcctgaagtcatcaaatgaaacattatctggaaattagtttctaatgttgtatatgaagaaatacttaaatataagttcctgcagtatttattagatagttgtaactgtaaactcacctccctagtagataagagtttcaggttaaatactggaacatatataggcagtcaaaaatactactttaaatgtcattcacctattttaaagccatgttttagcactttttaggccaaagaaggtctgatagtgcctgtttttatgttctgtactctcacaaactttgttactcaaaattattgcatggcaggagagattggattatttatttcttatatttttataagtaaaaaaatctttctaaacaacaaatacctaacattattactgattgttttcctaatttatcctcctaagttgaatggtaacaaagcttttccagctgaatgaatgcacttagctgataaaccagaatttgttcttttttttccttcttttttttttgagacaggttctcactctgtcaccgaggttggagtgcagtggtatgatcatagctgactgcagcctcaaccttctgggctcaaatgatcctttcacctcagcctcctgagtagctgggaccacaggtgtgtgccaccacacctggctaatttttatggatttttttttcttttttttttttcgccatgttgcccaggctggtcttgaactcttggcactcaagcagtccttctgcctcagcctcccaaagtgctgggattacagatgtgagccactgcacctggccccagaaattatgcttaaaaaaaaaattaagctgtgtggaatctggacaaggctatgtttctcctagaaacaggttttgctgtaaatggttttgatgggcgaaagtgtgagaaaaggttataatagattcttttttttaattttgtgagaaattccaggtcttcttgcttaacttatatgcatgtggatatatttgttttcaaagccatggaagaatctctgttcatatattttaatgcaaattaccttgtatgctgctatgcaaattctattaaaaggcctacctgcttaagaattaaacatttttgaaactttcagggaagacctgtagactcaagcactttctctgcttttttgtatcttatcttggacacttatgctgaattatgttcttattattttcactggttataagctattccttgtacataatatttaaactatccaaatatccagcatacatttccatgtggctgccatcggctgttgatgccatgaatgaaatggctggttagaaagccaaaggtcttcttttttcaattcctaatgaataagtaaaatgccagatctctttggtctcaaagcaaattgctctgatcagatcaaatatctatgtaatgaaaagagacttacttaaatttgggattctgcttaaactttaagttgaatttgactgtagtcattcattctttttatatatctctgtcaggtatgacattaattaccaggtggtattatactctactttgagtttggacatcactttcagttaaatttctgttgttattgtggcttttttttttttttaaccccactgaagatggaagtagagcagtctgccatctcctgctgttctttctctgtgccccctaattgcttggtaatctaaaattattctgactttccacatactgtctttaaaaaccaattgtagcaatctgcccgcctccaccctttaagctaaatctttcactgtgctggatacatagacactcgataaatgtgtgatgatagttctaaaataattatgctatatatcagggttctgtatttttgagcaatatcattattcctatgctgtgatgttaaatggaatttattttacactagtaatagactgcttaagtggctgatttgaaacctttctctaaaaaaacaaaaacatctggcagatgagtgacacaaattcattctcttaaaggatagaatttcaagttaaggataaggcacaataaataggcacatagaggacatctgtttttgtttttggttttggttttgtttttttttgtctctctgactagctaaactgccaactagaagaatggttgttatgtagtaactcagaagaatcttttaataagtttcttcttttgtttcaaaacaaacttgagcttcatttcttgccacctctattctttcttcccacgttgggtgactgaactgatgcttattctagttttagaagaggatccacatttaatgtaaggcataaatatgccttttgcaaattattgcttgttctccagtgaacatttgatcatattcaacagaaatccaccatataaaccataatccttgaattgccccttttaaaatagattggttaaaaccaaaaacctataagagagaaatgatatttcattgtattgtaggtttgggaatcctggttagatttataatttctggccgggtgcggtggctcatgcctgtattcccagtactttgggagcccaaggtgggtggatcacctgaggtaaggagtttgagaccagcctggccaacatggtgaaaccccatctctactaaaaatacaaaaagttagctgggcatggtggtgcgcgcctgtggtcccagctactcgggaggctgaggtgggagaatcccttgaacccaggaggcagaagttgcagtgagctgagatcatgccattgcactccagcctgggcaacagagcgagacttcatctccaaaaaaagaaaaagaagaaaaagatttataatttctgagtcccctaagtccctttctcagtttgcaataatcttacgtccatgctattgacactaattttgaaactggaaagctaattaatgacatattcatgtgttctttcatctaataaacatttattaatgtatagttctacaccaggcattctgaagggtccaaaagaaagttcctgccctctagtagcacataatccgttatttctcagcacaccatgccatctgtttatcattcagcagttaagtaattcatcacttcatatttttaccaaagtatatttacaagtctgtttatctggatctggcaaactggaaaatgtttgaagggatactcaggctttgatccatgccaacatgaaaggactccaagcacatttaagtaggctggtcttttcatcatgcatgattttttttttagtgcaaatttagactttagtttgggaaagagaacagtatacagtatcctttgtaagataaatcacaacaacaaaaattaagttttattgcacaaagtagataaatgagaaagtctttcttaaaaaatgcttctttaactgtaacagcaaaactaaatgcatattttatcaaccccttatttctaattgctgtattcatttccacccttaaactatttaagcatttcatctgctgaaagtccttatatacatggtagacggaatatttctccattaatgatagatcaaaatgaagatatttaaaaattaacaaaatcaggccaaggcaggaggatcactttagcccaggaggtccagaccagcctgggcaacacagcgggaccccgactccatttaaaaaattaaaaaaaaaaaaaaaacttttaacatttaaaaaataaaaattaacaaaatttcacttattccaggacacgctggcatttggactcaatgaaaagggcacctaaagaaaataaggctgactgaatgttttccataattttcacacaataacagtccctttctatccagcttgccttccatttatctctagggttagcttttcaggcaacatccttggtcattgcccagaaagtacctgagctatcagtgattggaatggcacaggaaaccgaatcacatgggtgccctccccttggttttcaagtatcttggagttgtgcacaaaaattaggtcatgccttcagtgtcttgttctttaaacctaccctttgacaatcaggtgctaatgattgtatactattaaaaccagcacataagtattgtaaatgtgtgttcctcctaggttggaagaaatgtctttccttctatctgggtcctgttaaagcgggtgtcagttgtgtcttttcacctcgatttgtgaattaatagaattggggggagaggaaatgatgatgtcaattaagtttcaggtttggcatgatcatcattctcgatgatattctcactttgtcgcaaatctgcccttatcgtaagaacaagtttcagaattttccctccactatacgactccagtattatgtttacaatccattggatgagtgcagcattataagaccttggtgcccagaaaaatctgtcctttttggtaccaaacctgaggtcttttggaagataatgtagaaaaccactacctattgaaggcctgttttggctaatctgtgcaaactctgatgatacctgcttatgtggattcttttccacactgctttcatttttaagtataaagacttagaaaactagaataatgcttttacaaataattaaaagtatgtgatgttctgggttttttccttctttttagaaccctgtatttaaacaagccttctttttaagtcttgtttgaaatttaagtctcagatcttctggataccaaatcaaaaacccaacgcgtaaaacagggcagtatttgtgttcctaattttaaaaagctttatgtatactctataaatatagatgcataaacaacacttccccttgagtagcacatcaacatacagcattgtacattacaatgaaaatgtgtaacttaagggtattatatatataaatacatatatacctttgtaacctttatactgtaaataaaaaagttgctttagtca

SEQ ID NO: 30840 - DNA, 1505 bp, Homo sapiens
  source 1..1505: mol_type = unassigned DNA
cgacatcctttgtggtgccacagcacatggatttcagaaccgcctgtgaggagacaaagacaggaatttgtttgctgcaggatggtaaccaggagcctttcaaagtgcggctgcacctagccaaagacattttgatgatccaggaacaggatgtgatatgtgtgtctggtgagcctttctattctggtgaaagaacggtgaccatcagaagacaaacagtaggaggatttggattaagcataaagggaggagcagaacataacattccagttgtcgtttcaaaaatctccaaggaacaaagagcggaactttcaggactactttttattggagatgcaattctacagataaatggcattaatgtgagaaaatgtagacatgaagaagtggttcaggttcttcggaatgctggagaagaagtgactctaacagtgtcatttttaaaaagagcacctgctttcctcaaactcccattgaatgaagattgtgcatgtgctccaagtgaccagagcagtggcacctcctctcctctctgtgacagtggcttacatctcaactaccatcccaacaatacagacacattatcatgctcgtcgtggccgacgtctccaggcttgaggtgggagaagcgatggtgcgacctcagactgatccctctacttcattcgcgcttctctcagtatgtgcccggcacagatttgagtcggcagaatgcctttcaagtcattgctgtggatggggtctgcactgggattattcagtgcctctctgctgaagactgcgttgactggctacaagcaatagcaactaacatttcaaatctcacaaagcacaatattaaaaaaatcaacagaaactttcctgtaaaccagcagattgtctacatgggctggtgtgaagcccgggagcaagaccccctccaggacagagtgtactccccgaccttcctggccctgaggggctcatgtctctacaagtttctggcacctccagtgaccacctgggactggacgagagcagagaaaacattctcagtttatgagattatgtgcaagatcctcaaggacagtgacctgctggaccgacggaaacagtgcttcaccgtgcagtctgagtctggggaggacctgtacttctcagtggagctggaaagtgacctcgcccagtgggaaagagccttccagacagcaacctttctagaagtagaacggatacagtgcaagacctatgcatgtgtgctagaaagtcatctaatgggactcacaattgatttcagcacaggatttatctgctttgatgctgcaacaaaggagttggaattttctaatttatttgctgttcttcactgcattcattccttctttgctgccaaggtagcttgtttggaccctctatttttaggcaatcaagctactgcttctactgctgccagctctgctaccacgagcaaagcaaagtatacaacttgacatactgaactcttcattgacacaccccatgactgt

SEQ ID NO: 30841 - DNA, 1703 bp, Homo sapiens
  source 1..1703: mol_type = unassigned DNA
ttagaagctctgagaaatcatgggccgtgcggtaggggttgaaatgctcaaaggtccacacttcttgaaataaacagaatggtcttgagtggattgcaactgttttggaaatagctttgtgaaaagagggtggagagctactcaaaattctacgttagagagactgaaaagacatctaatttcattgctcggcagacgacatcctttgtggtgccacagcacatggatttcagaaccgcctgtgaggagacaaagacaggaatttgtttgctgcaggatggtaaccaggagcctttcaaagtgcggctgcacctagccaaagacattttgatgatccaggaacaggatgtgatatgtgtgtctggtgagcctttctattctggtgaaagaacggtgaccatcagaagacaaacagtaggaggatttggattaagcataaagggaggagcagaacataacattccagttgtcgtttcaaaaatctccaaggaacaaagagcggaactttcaggactactttttattggagatgcaattctacagataaatggcattaatgtgagaaaatgtagacatgaagaagtggttcaggttcttcggaatgctggagaagaagtgactctaacagtgtcatttttaaaaagagcacctgctttcctcaaactcccattgaatgaagattgtgcatgtgctccaagtgaccagagcagtggcacctcctctcctctctgtgacagtggcttacatctcaactaccatcccaacaatacagacacattatcatgctcgtcgtggccgacgtctccaggcttgaggtgggagaagcgatggtgcgacctcagactgatccctctacttcattcgcgcttctctcagtatgtgcccggcacagatttgagtcggcagaatgcctttcaagtcattgctgtggatggggtctgcactgggattattcagtgcctctctgctgaagactgcgttgactggctacaagcaatagcaactaacatttcaaatctcacaaagcacaatattaaaaaaatcaacagaaactttcctgtaaaccagcagattgtctacatgggctggtgtgaagcccgggagcaagaccccctccaggacagagtgtactccccgaccttcctggccctgaggggctcatgtctctacaagtttctggcacctccagtgaccacctgggactggacgagagcagagaaaacattctcagtttatgagattatgtgcaagatcctcaaggacagtgacctgctggaccgacggaaacagtgcttcaccgtgcagtctgagtctggggaggacctgtacttctcagtggagctggaaagtgacctcgcccagtgggaaagagccttccagacagcaacctttctagaagtagaacggatacagtgcaagacctatgcatgtgtgctagaaagtcatctaatgggactcacaattgatttcagcacaggatttatctgctttgatgctgcaacaaaggagttggaattttctaatttatttgctgttcttcactgcattcattccttctttgctgccaaggtagcttgtttggaccctctatttttaggcaatcaagctactgcttctactgctgccagctctgctaccacgagcaaagcaaagtatacaacttgacatactgaactcttcattgacacaccccatgactgtat

SEQ ID NO: 30842 - DNA, 1925 bp, Homo sapiens
  source 1..1925: mol_type = unassigned DNA
cccttccagccggagctcgcgagccgcggtggcggctggtggccaccccagggaaataaagccgttgctgctgcagcaaaatggctcaaagtccaaccaaagtctggccttttcctgagcctaggctgtgggcgactcgctagcactgccctgggcctccaagctgcctgctcgctgagctcagcgctgacactcacaggagctgcgttcgccggatcctctgagaggctctgcaacgatcccgatccaattcagcagcgttttaaaagactgctctccagaatgttgagattgcccgagaagtgaccccagcaaaagaaaaatattgctgtacctaaattcaaacgacatcctttgtggtgccacagcacatggatttcagaaccgcctgtgaggagacaaagacaggaatttgtttgctgcaggatggtaaccaggagcctttcaaagtgcggctgcacctagccaaagacattttgatgatccaggaacaggatgtgatatgtgtgtctggtgagcctttctattctggtgaaagaacggtgaccatcagaagacaaacagtaggaggatttggattaagcataaagggaggagcagaacataacattccagttgtcgtttcaaaaatctccaaggaacaaagagcggaactttcaggactactttttattggagatgcaattctacagataaatggcattaatgtgagaaaatgtagacatgaagaagtggttcaggttcttcggaatgctggagaagaagtgactctaacagtgtcatttttaaaaagagcacctgctttcctcaaactcccattgaatgaagattgtgcatgtgctccaagtgaccagagcagtggcacctcctctcctctctgtgacagtggcttacatctcaactaccatcccaacaatacagacacattatcatgctcgtcgtggccgacgtctccaggcttgaggtgggagaagcgatggtgcgacctcagactgatccctctacttcattcgcgcttctctcagtatgtgcccggcacagatttgagtcggcagaatgcctttcaagtcattgctgtggatggggtctgcactgggattattcagtgcctctctgctgaagactgcgttgactggctacaagcaatagcaactaacatttcaaatctcacaaagcacaatattaaaaaaatcaacagaaactttcctgtaaaccagcagattgtctacatgggctggtgtgaagcccgggagcaagaccccctccaggacagagtgtactccccgaccttcctggccctgaggggctcatgtctctacaagtttctggcacctccagtgaccacctgggactggacgagagcagagaaaacattctcagtttatgagattatgtgcaagatcctcaaggacagtgacctgctggaccgacggaaacagtgcttcaccgtgcagtctgagtctggggaggacctgtacttctcagtggagctggaaagtgacctcgcccagtgggaaagagccttccagacagcaacctttctagaagtagaacggatacagtgcaagacctatgcatgtgtgctagaaagtcatctaatgggactcacaattgatttcagcacaggatttatctgctttgatgctgcaacaaaggctgtcctttggaggtataaattctctcagcttaaaggttcttcagatgatggcaagagcaaaatcaaatttttgtttcagaatccagatactaaacagattgaagcaaaggagttggaattttctaatttatttgctgttcttcactgcattcattccttctttgctgccaaggtagcttgtttggaccctctatttttaggcaatcaagctactgcttctactgctgccagctctgctaccacgagcaaagcaaagtatacaacttga

SEQ ID NO: 30843 - DNA, 3504 bp, Homo sapiens
  source 1..3504: mol_type = unassigned DNA
ttaggggctcccgtccccttacttcagcaccagaggggatggacagcgtctccggactgagctgcagccacagggacggaactacgctgccgccgccgctgtccttgccgccactgtcgtcgccacgggcagctgggctacttgctcctcgcagctaaaaggcggtgcctcctattaccccctcgcctcccggcccccttccttaatggatgaaaagtacccctccctctacacctgctgtacctaaggacaggactctgaggagtactcttgctccacagattaaactctcagcagcaacttcaagaatcatttttctataggggtctgggaggaattctggaggagagtaaagtcgaagttcttagaagctctgagaaatcatgggccgtgcggtaggggttgaaatgctcaaaggtccacacttcttgaaataaacagaatggtcttgagtggattgcaactgttttggaaatagctttgtgaaaagagggtggagagctactcaaaattctacgttagagagactgaaaagacatctaatttcattgctcggcagactgctctccagaatgttgagattgcccgagaagtgaccccagcaaaagaaaaatattgctgtacctaaattcaaacgacatcctttgtggtgccacagcacatggatttcagaaccgcctgtgaggagacaaagacaggaatttgtttgctgcaggatggtaaccaggagcctttcaaagtgcggctgcacctagccaaagacattttgatgatccaggaacaggatgtgatatgtgtgtctggtgagcctttctattctggtgaaagaacggtgaccatcagaagacaaacagtaggaggatttggattaagcataaagggaggagcagaacataacattccagttgtcgtttcaaaaatctccaaggaacaaagagcggaactttcaggactactttttattggagatgcaattctacagataaatggcattaatgtgagaaaatgtagacatgaagaagtggttcaggttcttcggaatgctggagaagaagtgactctaacagtgtcatttttaaaaagagcacctgctttcctcaaactcccattgaatgaagattgtgcatgtgctccaagtgaccagagcagtggcacctcctctcctctctgtgacagtggcttacatctcaactaccatcccaacaatacagacacattatcatgctcgtcgtggccgacgtctccaggcttgaggtgggagaagcgatggtgcgacctcagactgatccctctacttcattcgcgcttctctcagtatgtgcccggcacagatttgagtcggcagaatgcctttcaagtcattgctgtggatggggtctgcactgggattattcagtgcctctctgctgaagactgcgttgactggctacaagcaatagcaactaacatttcaaatctcacaaagcacaatattaaaaaaatcaacagaaactttcctgtaaaccagcagattgtctacatgggctggtgtgaagcccgggagcaagaccccctccaggacagagtgtactccccgaccttcctggccctgaggggctcatgtctctacaagtttctggcacctccagtgaccacctgggactggacgagagcagagaaaacattctcagtttatgagattatgtgcaagatcctcaaggacagtgacctgctggaccgacggaaacagtgcttcaccgtgcagtctgagtctggggaggacctgtacttctcagtggagctggaaagtgacctcgcccagtgggaaagagccttccagacagcaacctttctagaagtagaacggatacagtgcaagacctatgcatgtgtgctagaaagtcatctaatgggactcacaattgatttcagcacaggatttatctgctttgatgctgcaacaaaggctgtcctttggaggtataaattctctcagcttaaaggttcttcagatgatggcaagagcaaaatcaaatttttgtttcagaatccagatactaaacagattgaagcaaaggagttggaattttctaatttatttgctgttcttcactgcattcattccttctttgctgccaaggtagcttgtttggaccctctatttttaggcaatcaagctactgcttctactgctgccagctctgctaccacgagcaaagcaaagtatacaacttgacatactgaactcttcattgacacaccccatgactgtataagcaggacacatttactcatcattttagaccctagagaaaccataacatcaccaagtcgacagtggaggcaaatcaaaatttcggcagaaaaagaaggtcatgtggaacctcaaaaacacttctattctggatgacatctgtgaaatatactacatgaacagaacagcttgttctcactcagttgctttgtaccagtaagtgtattgctttcaccaaaagtggagacaaaagaataaattatttgaagaagtatgtaaataacataaaaatagtaagctacctatgaataaaaatacttattaaatgattacttctgtattttagattattttgtatgactagtacatgttgggcagagtcataggaaaacaaatgccctatcttgtattatgagggacataaaagagttaaaaaccataaatcagcaaggagcatgcaaaaaaatctcatcaaagaaggatgcactttaatttgctgatgtaaatttgcccttgtgttctcatcccatgatttgacactggcattccaattgtttttatcttattgtaaatattccgaagaacttccaaaggataattacattgacccatgatagatacaatgtgaaatggactattctcccttggatcactgttattgaaatgtcttattagctgccaaagtcaatcaaatatgccaacagtgtattaatttaattatgagtgatggaaaatttcatgaacctctcatttcttccttggtttgaaagagatttgtattttacctaataagatttattatcaaattaaagtttcataaattttcagtgaacccaaaaccttttgtagagaaaataatataaacaaatatggtgtgagaaacaattctttgtaatccgaagtctactagttaatcatgaactaaaatgtcccccgaaaacagtcccaaagctattatagatgttaattaaatgacattttttcattttagtactattttatgagaaacaaaggtgatatttaaagataaaagttaaaattctttaacctcccttgtcatggaaagtgattaagtaatgccaactatgcaggttgttttaggtattttgtcctaagaatgtaaatgtgaaaggctgggaaatttgaaagccttagaggtgtgcaatttactcagattccaggtattattcaactagttgtataacatggaacacagtctctgtccttcagtacagcttttttgagatattttaaaaagtcagctgtgtatg

SEQ ID NO: 30844 - DNA, 548 bp, Homo sapiens
  source 1..548: mol_type = unassigned DNA
aaatagctttgtgaaaagagggtggagagctactcaaaattctacgttagagagactgaaaagacatctaatttcattgctcggcagtgaacactggacacgttggtgggagttgttctgtgctgagagcatagcaatgaatacagagacagcagacctgccttcacagactgctctccagaatgttgagattgcccgagaagtgaccccagcaaaagaaaaatattgctgtacctaaattcaaacgacatcctttgtggtgccacagcacatggatttcagaaccgcctgtgaggagacaaagacaggaatttgtttgctgcaggatggtaaccaggagcctttcaaagtgcggctgcacctagccaaagacattttgatgatccaggaacaggatgtgatatgtgtgtctggtgagcctttctattctggtgaaagaacggtgaccatcagaagacaaacagtaggaggatttggattaagcataaagggaggagcagaacataacattccagttgtcgtttcaaaaatctccaaggaacaaagag

SEQ ID NO: 30845 - DNA, 1087 bp, Homo sapiens
  source 1..1087: mol_type = unassigned DNA
gggaggagcttgcttctccattctggtgtgatccaggaacagctgtcttccagctctgaaagagtgtggtgtaaaggaattcattagccatggatgtattcatgaaaggactttcaaaggccaaggagggagttgtggctgctgctgagaaaaccaaacagggtgtggcagaagcagcaggaaagacaaaagagggtgttctctatgtaggctccaaaaccaaggagggagtggtgcatggtgtggcaacagtggctgagaagaccaaagagcaagtgacaaatgttggaggagcagtggtgacgggtgtgacagcagtagcccagaagacagtggagggagcagggagcattgcagcagccactggctttgtcaaaaaggaccagttgggcaagaatgaagaaggagccccacaggaaggaattctggaagatatgcctgtggatcctgacaatgaggcttatgaaatgccttctgaggaagggtatcaagactacgaacctgaagcctaagaaatatctttgctcccagtttcttgagatctgctgacagatgttccatcctgtacaagtgctcagttccaatgtgcccagtcatgacatttctcaaagtttttacagtgtatctcgaagtcttccatcagcagtgattgaagtatctgtacctgcccccactcagcatttcggtgcttccctttcactgaagtgaatacatggtagcagggtctttgtgtgctgtggattttgtggcttcaatctacgatgttaaaacaaattaaaaacacctaagtgactaccacttatttctaaatcctcactatttttttgttgctgttgttcagaagttgttagtgatttgctatcatatattataagatttttaggtgtcttttaatgatactgtctaagaataatgacgtattgtgaaatttgttaatatatataatacttaaaaatatgtgagcatgaaactatgcacctataaatactaaatatgaaattttaccattttgcgatgtgttttattcacttgtgtttgtatataaatggtgagaattaaaataaaacgttatctcattgcaaaaata

SEQ ID NO: 30846 - DNA, 1096 bp, Homo sapiens
  source 1..1096: mol_type = unassigned DNA
gaattcattagccatggatgtattcatgaaaggactttcaaaggccaaggagggagttgtggctgctgctgagaaaaccaaacagggtgtggcagaagcagcaggaaagacaaaagagggtgttctctatgtaggctccaaaaccaaggagggagtggtgcatggtgtggcaacagtggctgagaagaccaaagagcaagtgacaaatgttggaggagcagtggtgacgggtgtgacagcagtagcccagaagacagtggagggagcagggagcattgcagcagccactggctttgtcaaaaaggaccagttgggcaaggaagggtatcaagactacgaacctgaagcctaagaaatatctttgctcccagtttcttgagatctgctgacagatgttccatcctgtacaagtgctcagttccaatgtgcccagtcatgacatttctcaaagtttttacagtgtatctcgaagtcttccatcagcagtgattgaagtatctgtacctgcccccactcagcatttcggtgcttccctttcactgaagtgaatacatggtagcagggtctttgtgtgctgtggattttgtggcttcaatctacgatgttaaaacaaattaaaaacacctaagtgactaccacttatttctaaatcctcactatttttttgttgctgttgttcagaagttgttagtgatttgctatcatatattataagatttttaggtgtcttttaatgatactgtctaagaataatgacgtattgtgaaatttgttaatatatataatacttaaaaatatgtgagcatgaaactatgcacctataaatactaaatatgaaattttaccattttgcgatgtgttttattcacttgtgtttgtatataaatggtgagaattaaaataaaacgttatctcattgcaaaaatattttatttttatcccatctcactttaataataaaaatcatgcttataagcaacatgaattaagaactgacacaaaggacaaaaatataaagttattaatagccatttgaagaaggaggaattttagaagaggtagagaaaatggaacattaaccctacactcggaattc

SEQ ID NO: 30847 - DNA, 1420 bp, Homo sapiens
  source 1..1420: mol_type = unassigned DNA
agagagggggcgagcgaccgagcgccgcgacgcggaagtgaggtgcgtgcgggctgcagcgcagaccccggcccggcccctccgagagcgtcctgggcgctccctcacgccttgccttcaagccttctgcctttccaccctcgtgagcggagaactgggagtggccattcgacgacaggttagcgggtttgcctcccactcccccagcctcgcgtcgccggctcacagcggcctcctctggggacagtcccccccgggtgccgcctccgcccttcctgtgcgctccttttccttcttctttcctattaaatattatttgggaattgtttaaattttttttttaaaaaaagagagaggcggggaggagtcggagttgtggagaagcagagggactcagtgtggtgtaaaggaattcattagccatggatgtattcatgaaaggactttcaaaggccaaggagggagttgtggctgctgctgagaaaaccaaacagggtgtggcagaagcagcaggaaagacaaaagagggtgttctctatgtaggctccaaaaccaaggagggagtggtgcatggtgtggcaacagtggctgagaagaccaaagagcaagtgacaaatgttggaggagcagtggtgacgggtgtgacagcagtagcccagaagacagtggagggagcagggagcattgcagcagccactggctttgtcaaaaaggaccagttgggcaagaatgaagaaggagccccacaggaaggaattctggaagatatgcctgtggatcctgacaatgaggcttatgaaatgccttctgaggaagggtatcaagactacgaacctgaagcctaagaaatatctttgctcccagtttcttgagatctgctgacagatgttccatcctgtacaagtgctcagttccaatgtgcccagtcatgacatttctcaaagtttttacagtgtatctcgaagtcttccatcagcagtgattgaagtatctgtacctgcccccactcagcatttcggtgcttccctttcactgaagtgaatacatggtagcagggtctttgtgtgctgtggattttgtggcttcaatctacgatgttaaaacaaattaaaaacacctaagtgactaccacttatttctaaatcctcactatttttttgttgctgttgttcagaagttgttagtgatttgctatcatatattataagatttttaggtgtcttttaatgatactgtctaagaataatgacgtattgtgaaatttgttaatatatataatacttaaaaatatgtgagcatgaaactatgcacctataaatactaaatatgaaattttaccattttgcgatgtgttttattcacttgtgtttgtatataaatggtgagaattaaaataaaacgttatctcattgcaaaaata

SEQ ID NO: 30848 - DNA, 3173 bp, Homo sapiens
  source 1..3173: mol_type = unassigned DNA
aggagaaggagaaggaggaggactaggaggaggaggacggcgacgaccagaaggggcccaagagagggggcgagcgaccgagcgccgcgacgcggaagtgaggtgcgtgcgggctgcagcgcagaccccggcccggcccctccgagagcgtcctgggcgctccctcacgccttgccttcaagccttctgcctttccaccctcgtgagcggagaactgggagtggccattcgacgacagtgtggtgtaaaggaattcattagccatggatgtattcatgaaaggactttcaaaggccaaggagggagttgtggctgctgctgagaaaaccaaacagggtgtggcagaagcagcaggaaagacaaaagagggtgttctctatgtagtggctgagaagaccaaagagcaagtgacaaatgttggaggagcagtggtgacgggtgtgacagcagtagcccagaagacagtggagggagcagggagcattgcagcagccactggctttgtcaaaaaggaccagttgggcaagaatgaagaaggagccccacaggaaggaattctggaagatatgcctgtggatcctgacaatgaggcttatgaaatgccttctgaggaagggtatcaagactacgaacctgaagcctaagaaatatctttgctcccagtttcttgagatctgctgacagatgttccatcctgtacaagtgctcagttccaatgtgcccagtcatgacatttctcaaagtttttacagtgtatctcgaagtcttccatcagcagtgattgaagtatctgtacctgcccccactcagcatttcggtgcttccctttcactgaagtgaatacatggtagcagggtctttgtgtgctgtggattttgtggcttcaatctacgatgttaaaacaaattaaaaacacctaagtgactaccacttatttctaaatcctcactatttttttgttgctgttgttcagaagttgttagtgatttgctatcatatattataagatttttaggtgtcttttaatgatactgtctaagaataatgacgtattgtgaaatttgttaatatatataatacttaaaaatatgtgagcatgaaactatgcacctataaatactaaatatgaaattttaccattttgcgatgtgttttattcacttgtgtttgtatataaatggtgagaattaaaataaaacgttatctcattgcaaaaatattttatttttatcccatctcactttaataataaaaatcatgcttataagcaacatgaattaagaactgacacaaaggacaaaaatataaagttattaatagccatttgaagaaggaggaattttagaagaggtagagaaaatggaacattaaccctacactcggaattccctgaagcaacactgccagaagtgtgttttggtatgcactggttccttaagtggctgtgattaattattgaaagtggggtgttgaagaccccaactactattgtagagtggtctatttctcccttcaatcctgtcaatgtttgctttacgtattttggggaactgttgtttgatgtgtatgtgtttataattgttatacatttttaattgagccttttattaacatatattgttatttttgtctcgaaataattttttagttaaaatctattttgtctgatattggtgtgaatgctgtacctttctgacaataaataatattcgaccatgaataaaaaaaaaaaaaaagtgggttcccgggaactaagcagtgtagaagatgattttgactacaccctccttagagagccataagacacattagcacatattagcacattcaaggctctgagagaatgtggttaactttgtttaactcagcattcctcactttttttttttaatcatcagaaattctctctctctctctctctttttctctcgctctctttttttttttttttttacaggaaatgcctttaaacatcgttggaactaccagagtcaccttaaaggagatcaattctctagactgataaaaatttcatggcctcctttaaatgttgccaaatatatgaattctaggatttttccttaggaaaggtttttctctttcagggaagatctattaactccccatgggtgctgaaaataaacttgatggtgaaaaactctgtataaattaatttaaaaattatttggtttctctttttaattattctggggcatagtcatttctaaaagtcactagtagaaagtataatttcaagacagaatattctagacatgctagcagtttatatgtattcatgagtaatgtgatatatattgggcgctggtgaggaaggaaggaggaatgagtgactataaggatggttaccatagaaacttccttttttacctaattgaagagagactactacagagtgctaagctgcatgtgtcatcttacactagagagaaatggtaagtttcttgttttatttaagttatgtttaagcaaggaaaggatttgttattgaacagtatatttcaggaaggttagaaagtggcggttaggatatattttaaatctacctaaagcagcatattttaaaaatttaaaagtattggtattaaattaagaaatagaggacagaactagactgatagcagtgacctagaacaatttgagattaggaaagttgtgaccatgaatttaaggatttatgtggatacaaattctcctttaaagtgtttcttcccttaatatttatctgacggtaatttttgagcagtgaattactttatatatcttaatagtttatttgggaccaaacacttaaacaaaaagttctttaagtcatataagccttttcaggaagcttgtctcatattcactcccgagacattcacctgccaagtggcctgaggatcaatccagtcctaggtttattttgcagacttacattctcccaagttattcagcctcatatgactccacggtcggctttaccaaaacagttcagagtgcactttggcacacaattgggaacagaacaatctaatgtgtggtttggtattccaagtggggtctttttcagaatctctgcactagtgtgagatgcaaacatgtttcctcatctttctggcttatccagtatgtagctatttgtgacataataaatatatacatatatgaaaata

SEQ ID NO: 30849 - DNA, 1290 bp, Homo sapiens
  source 1..1290: mol_type = unassigned DNA
gacaaatcagcggtgggggcggagagccgaggagaaggagaaggaggaggactaggaggaggaggacggcgacgaccagaaggggcccaagagagggggcgagcgaccgagcgccgcgacgcggaagtgaggtgcgtgcgggctgcagcgcagaccccggcccggcccctccgagagcgtcctgggcgctccctcacgccttgccttcaagccttctgcctttccaccctcgtgagcggagaactgggagtggccattcgacgacagtgtggtgtaaaggaattcattagccatggatgtattcatgaaaggactttcaaaggccaaggagggagttgtggctgctgctgagaaaaccaaacagggtgtggcagaagcagcaggaaagacaaaagagggtgttctctatgtaggctccaaaaccaaggagggagtggtgcatggtgtggcaacagtggctgagaagaccaaagagcaagtgacaaatgttggaggagcagtggtgacgggtgtgacagcagtagcccagaagacagtggagggagcagggagcattgcagcagccactggctttgtcaaaaaggaccagttgggcaagaatgaagaaggagccccacaggaaggaattctggaagatatgcctgtggatcctgacaatgaggcttatgaaatgccttctgaggaagggtatcaagactacgaacctgaagcctaagaaatatctttgctcccagtttcttgagatctgctgacagatgttccatcctgtacaagtgctcagttccaatgtgcccagtcatgacatttctcaaagtttttacagtgtatctcgaagtcttccatcagcagtgattgaagtatctgtacctgcccccactcagcatttcggtgcttccctttcactgaagtgaatacatggtagcagggtctttgtgtgctgtggattttgtggcttcaatctacgatgttaaaacaaattaaaaacacctaagtgactaccacttatttctaaatcctcactatttttttgttgctgttgttcagaagttgttagtgatttgctatcatatattataagatttttaggtgtcttttaatgatactgtctaagaataatgacgtattgtgaaatttgttaatatatataatacttaaaaatatgtgagcatgaaactatgcacctataaatactaaatatgaaattttaccattttgcgatgtgttttattcacttgtgtttgtatataaatggtgagaattaaaataaaacgttatctcattgcaaaaata

SEQ ID NO: 30850 - DNA, 3127 bp, Homo sapiens
  source 1..3127: mol_type = unassigned DNA
gccattcgacgacaggttagcgggtttgcctcccactcccccagcctcgcgtcgccggctcacagcggcctcctctggggacagtcccccccgggtgccgcctccgcccttcctgtgcgctccttttccttcttctttcctattaaatattatttgggaattgtttaaattttttttttaaaaaaagagagaggcggggaggagtcggagttgtggagaagcagagggactcagtgtggtgtaaaggaattcattagccatggatgtattcatgaaaggactttcaaaggccaaggagggagttgtggctgctgctgagaaaaccaaacagggtgtggcagaagcagcaggaaagacaaaagagggtgttctctatgtaggctccaaaaccaaggagggagtggtgcatggtgtggcaacagtggctgagaagaccaaagagcaagtgacaaatgttggaggagcagtggtgacgggtgtgacagcagtagcccagaagacagtggagggagcagggagcattgcagcagccactggctttgtcaaaaaggaccagttgggcaaggaagggtatcaagactacgaacctgaagcctaagaaatatctttgctcccagtttcttgagatctgctgacagatgttccatcctgtacaagtgctcagttccaatgtgcccagtcatgacatttctcaaagtttttacagtgtatctcgaagtcttccatcagcagtgattgaagtatctgtacctgcccccactcagcatttcggtgcttccctttcactgaagtgaatacatggtagcagggtctttgtgtgctgtggattttgtggcttcaatctacgatgttaaaacaaattaaaaacacctaagtgactaccacttatttctaaatcctcactatttttttgttgctgttgttcagaagttgttagtgatttgctatcatatattataagatttttaggtgtcttttaatgatactgtctaagaataatgacgtattgtgaaatttgttaatatatataatacttaaaaatatgtgagcatgaaactatgcacctataaatactaaatatgaaattttaccattttgcgatgtgttttattcacttgtgtttgtatataaatggtgagaattaaaataaaacgttatctcattgcaaaaatattttatttttatcccatctcactttaataataaaaatcatgcttataagcaacatgaattaagaactgacacaaaggacaaaaatataaagttattaatagccatttgaagaaggaggaattttagaagaggtagagaaaatggaacattaaccctacactcggaattccctgaagcaacactgccagaagtgtgttttggtatgcactggttccttaagtggctgtgattaattattgaaagtggggtgttgaagaccccaactactattgtagagtggtctatttctcccttcaatcctgtcaatgtttgctttacgtattttggggaactgttgtttgatgtgtatgtgtttataattgttatacatttttaattgagccttttattaacatatattgttatttttgtctcgaaataattttttagttaaaatctattttgtctgatattggtgtgaatgctgtacctttctgacaataaataatattcgaccatgaataaaaaaaaaaaaaaagtgggttcccgggaactaagcagtgtagaagatgattttgactacaccctccttagagagccataagacacattagcacatattagcacattcaaggctctgagagaatgtggttaactttgtttaactcagcattcctcactttttttttttaatcatcagaaattctctctctctctctctctttttctctcgctctctttttttttttttttttacaggaaatgcctttaaacatcgttggaactaccagagtcaccttaaaggagatcaattctctagactgataaaaatttcatggcctcctttaaatgttgccaaatatatgaattctaggatttttccttaggaaaggtttttctctttcagggaagatctattaactccccatgggtgctgaaaataaacttgatggtgaaaaactctgtataaattaatttaaaaattatttggtttctctttttaattattctggggcatagtcatttctaaaagtcactagtagaaagtataatttcaagacagaatattctagacatgctagcagtttatatgtattcatgagtaatgtgatatatattgggcgctggtgaggaaggaaggaggaatgagtgactataaggatggttaccatagaaacttccttttttacctaattgaagagagactactacagagtgctaagctgcatgtgtcatcttacactagagagaaatggtaagtttcttgttttatttaagttatgtttaagcaaggaaaggatttgttattgaacagtatatttcaggaaggttagaaagtggcggttaggatatattttaaatctacctaaagcagcatattttaaaaatttaaaagtattggtattaaattaagaaatagaggacagaactagactgatagcagtgacctagaacaatttgagattaggaaagttgtgaccatgaatttaaggatttatgtggatacaaattctcctttaaagtgtttcttcccttaatatttatctgacggtaatttttgagcagtgaattactttatatatcttaatagtttatttgggaccaaacacttaaacaaaaagttctttaagtcatataagccttttcaggaagcttgtctcatattcactcccgagacattcacctgccaagtggcctgaggatcaatccagtcctaggtttattttgcagacttacattctcccaagttattcagcctcatatgactccacggtcggctttaccaaaacagttcagagtgcactttggcacacaattgggaacagaacaatctaatgtgtggtttggtattccaagtggggtctttttcagaatctctgcactagtgtgagatgcaaacatgtttcctcatctttctggcttatccagtatgtagctatttgtgacataataaatatatacatatatgaaaata

SEQ ID NO: 30851 - DNA, 728 bp, Homo sapiens
  source 1..728: mol_type = unassigned DNA
cagtgtggtgtaaaggaattcattagccatggatgtattcatgaaaggactttcaaaggccaaggagggagttgtggctgctgctgagaaaaccaaacagggtgtggcagaagcagcaggaaagacaaaagagggtgttctctatgtaggctccaaaaccaaggagggagtggtgcatggtgtggcaacagtggctgagaagaccaaagagcaagtgacaaatgttggaggagcagtggtgacgggtgtgacagcagtagcccagaagacagtggagggagcagggagcattgcagcagccactggctttgtcaaaaaggaccagttgggcaaggtatggctgtgtacgttttgtgttacatttataagctggtgagattacggttcattttcatgtgaggcctggaggcaggagcaagatacttactgtggggaacggctacctgaccctccccttgtgaaaaagtgctacctttatattggtcttgcttgtttcaggcattaacccagataaatgccatgcaaattttataattattatgattgtttcaatttctggaagaaagttaatgaaacaaaaaatgtagtaaaatgccaaaggaacagtgacatttcagaaagaatgagggctttcatgttaattgtaagtcttggaatttctcttccttggagtaacaaatccctttgtgcctaatttcctaatttccaaaataaagttcttttactta

SEQ ID NO: 30852 - DNA, 411 bp, Homo sapiens
  source 1..411: mol_type = unassigned DNA
taaaggaattcattagccatggatgtattcatgaaaggactttcaaaggccaaggagggagttgtggctgctgctgagaaaaccaaacagggtgtggcagaagcagcaggaaagacaaaagagggtgttctctatgtagtggctgagaagaccaaagagcaagtgacaaatgttggaggagcagtggtgacgggtgtgacagcagtagcccagaagacagtggagggagcagggagcattgcagcagccactggctttgtcaaaaaggaccagttgggcaagaatgaagaaggagccccacaggaaggaattctggaagatatgcctgtggatcctgacaatgaggcttatgaaatgccttctgaggaagggtatcaagactacgaacctgaagcctaagaaatatctttg

SEQ ID NO: 30853 - DNA, 570 bp, Homo sapiens
  source 1..570: mol_type = unassigned DNA
ggaggacggcgacgaccagaaggggcccaagagagggggcgagcgaccgagcgccgcgacgcggaagtgagtgtggtgtaaaggaattcattagccatggatgtattcatgaaaggactttcaaaggccaaggagggagttgtggctgctgctgagaaaaccaaacagggtgtggcagaagcagcaggaaagacaaaagagggtgttctctatgtaggctccaaaaccaaggagggagtggtgcatggtgtggcaacagtggctgagaagaccaaagagcaagtgacaaatgttggaggagcagtggtgacgggtgtgacagcagtagcccagaagacagtggagggagcagggagcattgcagcagccactggctttgtcaaaaaggaccagttgggcaagaatgaagaaggagccccacaggaaggaattctggaagatatgcctgtggatcctgacaatgaggcttatgaaatgccttctgaggaagggtatcaagactacgaacctgaagcctaagaaatatctttgctcccagtttcttgagatctgctgacagatgttccatcc

SEQ ID NO: 30854 - DNA, 387 bp, Homo sapiens
  source 1..387: mol_type = unassigned DNA
gaccccggcccggcccctccgagagcgtcctgggcgctccctcacgccttgccttcaagccttctgcctttccaccctcgtgagcggagaactgggagtggccattcgacgacagagagaggcggggaggagtcggagttgtggagaagcagagggactcagtgtggtgtaaaggaattcattagccatggatgtattcatgaaaggactttcaaaggccaaggagggagttgtggctgctgctgagaaaaccaaacagggtgtggcagaagcagcaggaaagacaaaagagggtgttctctatgtaggctccaaaaccaaggagggagtggtgcatggtgtggcaacagtggctgagaagaccaaagagcaagtgacaaatgttgg

SEQ ID NO: 30855 - DNA, 905 bp, Homo sapiens
  source 1..905: mol_type = unassigned DNA
gatagctgagggcgggggtggatgttggatggattagaaccatcacacttgggcctgctgtttgcctgagtttgaaccacaccccgatgtggtgtaaaggaattcattagccatggatgtattcatgaaaggactttcaaaggccaaggagggagttgtggctgctgctgagaaaaccaaacagggtgtggcagaagcagcaggaaagacaaaagagggtgttctctatgtaggctccaaaaccaaggagggagtggtgcatggtgtggcaacagtggctgagaagaccaaagagcaagtgacaaatgttggaggagcagtggtgacgggtgtgacagcagtagcccagaagacagtggagggagcagggagcattgcagcagccactggctttgtcaaaaaggaccagttgggcaagaatgaagaaggagccccacaggaaggaattctggaagatatgcctgtggatcctgacaatgaggcttatgaaatgccttctgaggaagggtatcaagactacgaacctgaagcctaagaaatatctttgctcccagtttcttgagatctgctgacagatgttccatcctgtacaagtgctcagttccaatgtgcccagtcatgacatttctcaaagtttttacagtgtatctcgaagtcttccatcagcagtgattgaagtatctgtacctgcccccactcagcatttcggtgcttccctttcactgaagtgaatacatggtagcagggtctttgtgtgctgtggattttgtggcttcaatctacgatgttaaaacaaattaaaaacacctaagtgactaccacttatttctaaatcctcactatttttttgttgctgttgttcagaagttgttagtgatttgctatcatatattataagattttta

SEQ ID NO: 30856 - DNA, 3745 bp, Homo sapiens
  source 1..3745: mol_type = unassigned DNA
gcggccgcccaggctgcccccgcccgcgcgcgcccgttggggggcccggggagcggcgcccgcggccgggccgcattgtgacgtagcggggccgcggcagcgcctccaccgcccgcctacttcggctgaggctgttctgctcctgccgctgcggtccgtcggtcggtcagtcagtcccttcgcgctcctgagccgccggcgcgccgggcgccccgggaatttataagtatttgaccgtactcaaaatgtgcaaggaagaataatggaagcccctgaataccttgatttggatgaaattgactttagtgatgacatatcttattcagtcacatcactcaagacgatcccagaactgtgccgaagatgtgatacgcaaaacgaagacagatcagtttctagctctagctggaattgtggcatctcaactcttattacaaacacgcaaaagcccacaggaatcgctgatgtgtacagtaagttccgcccagtgaagcgggtttcgccactgaaacatcagccagagactctggagaacaatgaaagtgatgaccaaaagaaccagaaagtggttgagtaccagaaagggggtgagtctgacctgggcccccagcctcaggagcttggccctggagatggagtgggcggcccaccaggtaagagctctgagcccagcacatcgctgggtgaactggagcactacgacctcgacatggatgagattctggatgtgccttatattaaatccagtcagcagcttgcctcttttaccaaggtgacttcagaaaaaagaattttgggcttatgcacaaccatcaatggcctttctggcaaagcctgctctacaggaagttctgagagctcatcatccaacatggcaccattttgtgttctttctcccgtgaaaagccctcacttgagaaaagcatcagctgtcatccacgaccagcacaagctgtccactgaagaaaccgagatctcacctcctctggttaaatgtggctctgcatatgagcctgaaaaccagagtaaagacttcctaaacaagacatttagtgatcctcatggtcgaaaagttgagaagacaacaccagactgccagctcagggccttccacctacaatcctcagcagcagaatccaaaccagaagagcaggtcagtggcctaaaccggaccagctcccaaggcccagaagaaaggagtgagtatctgaaaaaagtgaaaagcatcttgaacattgttaaagaaggacagatctctctcctgccacacctagctgcagacaatctagacaaaattcacgacgaaaatggaaacaatctattacatattgcggcgtcacagggacacgcagagtgtctacagcacctcacttctttgatgggagaagactgcctcaatgagcgcaacactgagaagttgactccagcaggcctggccattaagaatggtcagttggagtgcgtacgctggatggtgagcgaaacagaagccattgcagaactgagttgttctaaggattttccaagccttattcattacgcaggttgctatggccaggaaaagattcttctgtggcttcttcagtttatgcaagaacagggcatctcgttggatgaagtagaccaggatggcaacagtgccgttcacgtagcctcacagcatggctaccttggatgcatacagaccttggttgaatatggagcaaatgtcaccatgcagaaccacgctggggaaaagccctcccagagcgccgagcggcaggggcacaccctgtgctccaggtacctggtggtggtggagacctgcatgtcgctggcctctcaagtggtgaagttaaccaagcagctaaaggaacaaacagtagaacgtgtcacgctgcagaaccaactccaacaatttctagaagcccagaaatcagagggcaagtcactcccttcttcacccagttcaccatcctcacctgcctccagaaagtcccagtggaaatctccagatgcagatgatgattctgtagccaaaagcaagccaggagtccaagaggggattcaggttcttggaagcctgtcagcctccagccgggctagacccaaagcaaaagatgaagattctgataaaatcttacgccagttattgggaaaggaaatctcagaaaatgtctgcacccaggaaaaactgtccttggaattccaggatgctcaggcttcctctagaaattctaaaaagatcccactggagaagagggaactgaagttagccaggctgagacagctgatgcagaggtcactgagtgagtctgacacagactccaacaactctgaggaccccaagactaccccagtgaggaaggctgaccgaccaaggccgcagcccattgtagaaagcgtagagagtatggacagcgcagaaagcctgcacctgatgattaagaaacacaccttggcatcagggggacgcaggtttcctttcagcatcaaggcctccaaatccctggatggccacagcccatctcccacctcagagagcagcgaaccagacttagaatcccagtatccaggctcagggagtattcctccaaaccagccctctggtgaccctcagcagcccagccctgacagtactgctgcccagaaagttgccacaagtcccaagagtgccctcaagtctccatcttccaagcgtaggacatctcagaacttaaaactgagagttacctttgaggagcctgtggtgcagatggagcagcctagccttgaactgaatggagaaaaagacaaagataagggcaggactctccagcggacctccacaagtaacgaatcgggggatcaactgaaaaggccttttggagcctttcgatctatcatggagacactaagtggcaaccaaaacaataataataactaccaggcagccaaccagctgaaaacctctacattgcccttgacctcacttgggaggaagacagatgccaagggaaaccctgccagctccgctagcaaaggaaagaataaggcagcataatgacatcaatagaaaaatgaagaaatcctacagcataaagcacattgctgagccagagtcaaaagaactcttcttgtaaatcactttttaaattttctctcactgatgccctttggaaattattggaaatttctggactatcctctttggaaagagaaccatgaaaacaatgcctcaccagcagaagaacagaatatcaggatgccttaaatttatagtagtagactgtaaaagattcattttggggtgatatctgtatatataacttgtttttttaaaagatgccgtttaaaagcatgattgggaaaatgtatgttttttaagagtagattgattcaccctacccacaggacattcaccaagccactgataccattttatatttcatcaattgcatgagtatttgctaatgttgattgaacctccctttccccataatgtgggcagatttggctcagctccttcatgagatcaggtcagtggtattgtttctgtcaagagtgttttttctgtcatttctactttttgtataaaggaaataaaacaatgttaacagccacctataagcttggggcacctactttctaacaaatctgtgatgttctgatttctaagggactttgcaagtattttgattgctgatatttgatttcaggaacaaactgctcagtttagcagttttcccataggcgtcaaataaaacattctatatttcattaagta

SEQ ID NO: 30857 - DNA, 3781 bp, Homo sapiens
  source 1..3781: mol_type = unassigned DNA
cgcccgcggccgggccgcattgtgacgtagcggggccgcggcagcgcctccaccgcccgcctacttcggctgaggctgttctgctcctgccgctgcggtccgtcggtcggtcagtcagtcccttcgcgctcctgagccgccggcgcgccgggcgccccgggaatttataagtatttgaccgtactcaaaatgtgcaaggaagaataatggaagcccctgaataccttgatttggatgaaattgactttagtgatgacatatctgacaataggagtcaagggaacaggctacaaaagcttggattggaggacacagacagggaagatgcaatgggctttggttcccatagggccaaactgacagtagttgctgccctgggagcttgccattgtcctgagaatgagtattcagtcacatcactcaagacgatcccagaactgtgccgaagatgtgatacgcaaaacgaagacagatcagtttctagctctagctggaattgtggcatctcaactcttattacaaacacgcaaaagcccacaggaatcgctgatgtgtacagtaagttccgcccagtgaagcgggtttcgccactgaaacatcagccagagactctggagaacaatgaaagtgatgaccaaaagaaccagaaagtggttgagtaccagaaagggggtgagtctgacctgggcccccagcctcaggagcttggccctggagatggagtgggcggcccaccaggtaagagctctgagcccagcacatcgctgggtgaactggagcactacgacctcgacatggatgagattctggatgtgccttatattaaatccagtcagcagcttgcctcttttaccaaggtgacttcagaaaaaagaattttgggcttatgcacaaccatcaatggcctttctggcaaagcctgctctacaggaagttctgagagctcatcatccaacatggcaccattttgtgttctttctcccgtgaaaagccctcacttgagaaaagcatcagctgtcatccacgaccagcacaagctgtccactgaagaaaccgagatctcacctcctctggttaaatgtggctctgcatatgagcctgaaaaccagagtaaagacttcctaaacaagacatttagtgatcctcatggtcgaaaagttgagaagacaacaccagactgccagctcagggccttccacctacaatcctcagcagcagaatccaaaccagaagagcaggtcagtggcctaaaccggaccagctcccaaggcccagaagaaaggagtgagtatctgaaaaaagtgaaaagcatcttgaacattgttaaagaaggacagatctctctcctgccacacctagctgcagacaatctagacaaaattcacgacgaaaatggaaacaatctattacatattgcggcgtcacagggacacgcagagtgtctacagcacctcacttctttgatgggagaagactgcctcaatgagcgcaacactgagaagttgactccagcaggcctggccattaagaatggtcagttggagtgcgtacgctggatggtgagcgaaacagaagccattgcagaactgagttgttctaaggattttccaagccttattcattacgcaggttgctatggccaggaaaagattcttctgtggcttcttcagtttatgcaagaacagggcatctcgttggatgaagtagaccaggatggcaacagtgccgttcacgtagcctcacagcatggctaccttggatgcatacagaccttggttgaatatggagcaaatgtcaccatgcagaaccacgctggggaaaagccctcccagagcgccgagcggcaggggcacaccctgtgctccaggtacctggtggtggtggagacctgcatgtcgctggcctctcaagtggtgaagttaaccaagcagctaaaggaacaaacagtagaacgtgtcacgctgcagaaccaactccaacaatttctagaagcccagaaatcagagggcaagtcactcccttcttcacccagttcaccatcctcacctgcctccagaaagtcccagtggaaatctccagatgcagatgatgattctgtagccaaaagcaagccaggagtccaagaggggattcaggttcttggaagcctgtcagcctccagccgggctagacccaaagcaaaagatgaagattctgataaaatcttacgccagttattgggaaaggaaatctcagaaaatgtctgcacccaggaaaaactgtccttggaattccaggatgctcaggcttcctctagaaattctaaaaagatcccactggagaagagggaactgaagttagccaggctgagacagctgatgcagaggtcactgagtgagtctgacacagactccaacaactctgaggaccccaagactaccccagtgaggaaggctgaccgaccaaggccgcagcccattgtagaaagcgtagagagtatggacagcgcagaaagcctgcacctgatgattaagaaacacaccttggcatcagggggacgcaggtttcctttcagcatcaaggcctccaaatccctggatggccacagcccatctcccacctcagagagcagcgaaccagacttagaatcccagtatccaggctcagggagtattcctccaaaccagccctctggtgaccctcagcagcccagccctgacagtactgctgcccagaaagttgccacaagtcccaagagtgccctcaagtctccatcttccaagcgtaggacatctcagaacttaaaactgagagttacctttgaggagcctgtggtgcagatggagcagcctagccttgaactgaatggagaaaaagacaaagataagggcaggactctccagcggacctccacaagtaacgaatcgggggatcaactgaaaaggccttttggagcctttcgatctatcatggagacactaagtggcaaccaaaacaataataataactaccaggcagccaaccagctgaaaacctctacattgcccttgacctcacttgggaggaagacagatgccaagggaaaccctgccagctccgctagcaaaggaaagaataaggcagaaatgtacagcagctgcatcaatctttcctctaacatgctgattgaagagcatctgtgtaacgacacacggcataatgacatcaatagaaaaatgaagaaatcctacagcataaagcacattgctgagccagagtcaaaagaactcttcttgtaaatcactttttaaattttctctcactgatgccctttggaaattattggaaatttctggactatcctctttggaaagagaaccatgaaaacaatgcctcaccagcagaagaacagaatatcaggatgccttaaatttatagtagtagactgtaaaagattcattttggggtgatatctgtatatataacttgtttttttaaaagatgccgtttaaaagcatgattgggaaaatgtatgttttttaagagtagattgattcaccctacccacaggacattcaccaagccactgataccattttatatttcatcaattgcatgagtatttgctaatgttgattgaacctccctttccccataatgtgggcagatttggctcagctccttcatgagatcaggtcagtggtattgtttctgtcaagagtgttttttctgtcatttctactttttgtataaaggaaataaaacaatgttaacagccacctataagcttggggcacctactttctaacaaatctgtgatgtt

SEQ ID NO: 30858 - DNA, 3389 bp, Homo sapiens
  source 1..3389: mol_type = unassigned DNA
cgcccgcggccgggccgcattgtgacgtagcggggccgcggcagcgcctccaccgcccgcctacttcggctgaggctgttctgctcctgccgctgcggtccgtcggtcggtcagtcagtcccttcgcgctcctgagccgccggcgcgccgggcgccccgggaatttataagtatttgaccgtactcaaaatgtgcaaggaagaataatggaagcccctgaataccttgatttggatgaaattgactttagtgatgacatatcttattcagtcacatcactcaagacgatcccagaactgtgccgaagatgtgatacgcaaaacgaagacagatcagtttctagctctagctggaattgtggcatctcaactcttattacaaacacgcaaaagcccacaggaatcgctgatgtgtacagtaagttccgcccagtgaagcgggtttcgccactgaaacatcagccagagactctggagaacaatgaaagtgatgaccaaaagaaccagaaagtggttgagtaccagaaagggggtgagtctgacctgggcccccagcctcaggagcttggccctggagatggagtgggcggcccaccaggtaagagctctgagcccagcacatcgctgggtgaactggagcactacgacctcgacatggatgagattctggatgtgccttatattaaatccagtcagcagcttgcctcttttaccaaggtgacttcagaaaaaagaattttgggcttatgcacaaccatcaatggcctttctggcaaagcctgctctacaggaagttctgagagctcatcatccaacatggcaccattttgtgttctttctcccgtgaaaagccctcacttgagaaaagcatcagctgtcatccacgaccagcacaagctgtccactgaagaaaccgagatctcacctcctctggttaaatgtggctctgcatatgagcctgaaaaccagagtaaagacttcctaaacaagacatttagtgatcctcatggtcgaaaagttgagaagacaacaccagactgccagctcagggccttccacctacaatcctcagcagcagaatccaaaccagaagagcaggtcagtggcctaaaccggaccagctcccaaggcccagaagaaaggagtgagtatctgaaaaaagtgaaaagcatcttgaacattgttaaagaaggacagatctctctcctgaatggtcagttggagtgcgtacgctggatggtgagcgaaacagaagccattgcagaactgagttgttctaaggattttccaagccttattcattacgcaggttgctatggccaggaaaagattcttctgtggcttcttcagtttatgcaagaacagggcatctcgttggatgaagtagaccaggatggcaacagtgccgttcacgtagcctcacagcatggctaccttggatgcatacagaccttggttgaatatggagcaaatgtcaccatgcagaaccacgctggggaaaagccctcccagagcgccgagcggcaggggcacaccctgtgctccaggtacctggtggtggtggagacctgcatgtcgctggcctctcaagtggtgaagttaaccaagcagctaaaggaacaaacagtagaacgtgtcacgctgcagaaccaactccaacaatttctagaagcccagaaatcagagggcaagtcactcccttcttcacccagttcaccatcctcacctgcctccagaaagtcccagtggaaatctccagatgcagatgatgattctgtagccaaaagcaagccaggagtccaagaggggattcaggttcttggaagcctgtcagcctccagccgggctagacccaaagcaaaagatgaagattctgataaaatcttacgccagttattgggaaaggaaatctcagaaaatgtctgcacccaggaaaaactgtccttggaattccaggatgctcaggcttcctctagaaattctaaaaagatcccactggagaagagggaactgaagttagccaggctgagacagctgatgcagaggtcactgagtgagtctgacacagactccaacaactctgaggaccccaagactaccccagtgaggaaggctgaccgaccaaggccgcagcccattgtagaaagcgtagagagtatggacagcgcagaaagcctgcacctgatgattaagaaacacaccttggcatcagggggacgcaggtttcctttcagcatcaaggcctccaaatccctggatggccacagcccatctcccacctcagagagcagcgaaccagacttagaatcccagtatccaggctcagggagtattcctccaaaccagccctctggtgaccctcagcagcccagccctgacagtactgctgcccagaaagttgccacaagtcccaagagtgccctcaagtctccatcttccaagcgtaggacatctcagaacttaaaactgagagttacctttgaggagcctgtggtgcagatggagcagcctagccttgaactgaatggagaaaaagacaaagataagggcaggactctccagcggacctccacaagtaacgaatcgggggatcaactgaaaaggccttttggagcctttcgatctatcatggagacactaagtggcaaccaaaacaataataataactaccaggcagccaaccagctgaaaacctctacattgcccttgacctcacttgggaggaagacagatgccaagggaaaccctgccagctccgctagcaaaggaaagaataaggcagcataatgacatcaatagaaaaatgaagaaatcctacagcataaagcacattgctgagccagagtcaaaagaactcttcttgtaaatcactttttaaattttctctcactgatgccctttggaaattattggaaatttctggactatcctctttggaaagagaaccatgaaaacaatgcctcaccagcagaagaacagaatatcaggatgccttaaatttatagtagtagactgtaaaagattcattttggggtgatatctgtatatataacttgtttttttaaaagatgccgtttaaaagcatgattgggaaaatgtatgttttttaagagtagattgattcaccctacccacaggacattcaccaagccactgataccattttatatttcatcaattgcatgagtatttgctaatgttgattgaacctccctttccccataatgtgggcagatttggctcagctccttcatgagatcaggtcagtggtattgtttctgtcaagagtgttttttctgtcatttctactttttgtataaaggaaataaaacaatgttaacagccacctataagcttggggcacctactttctaacaaatctgtgatgtt

SEQ ID NO: 30859 - DNA, 2588 bp, Homo sapiens
  source 1..2588: mol_type = unassigned DNA
cgcccgcggccgggccgcattgtgacgtagcggggccgcggcagcgcctccaccgcccgcctacttcggctgaggctgttctgctcctgccgctgcggtccgtcggtcggtcagtcagtcccttcgcgctcctgagccgccggcgcgccgggcgccccgggaatttataagtatttgaccgtactcaaaatgtgcaaggaagaataatggaagcccctgaataccttgatttggatgaaattgactttagtgatgacatatcttattcagtcacatcactcaagacgatcccagaactgtgccgaagatgtgatacgcaaaacgaagacagatcagaatggtcagttggagtgcgtacgctggatggtgagcgaaacagaagccattgcagaactgagttgttctaaggattttccaagccttattcattacgcaggttgctatggccaggaaaagattcttctgtggcttcttcagtttatgcaagaacagggcatctcgttggatgaagtagaccaggatggcaacagtgccgttcacgtagcctcacagcatggctaccttggatgcatacagaccttggttgaatatggagcaaatgtcaccatgcagaaccacgctggggaaaagccctcccagagcgccgagcggcaggggcacaccctgtgctccaggtacctggtggtggtggagacctgcatgtcgctggcctctcaagtggtgaagttaaccaagcagctaaaggaacaaacagtagaacgtgtcacgctgcagaaccaactccaacaatttctagaagcccagaaatcagagggcaagtcactcccttcttcacccagttcaccatcctcacctgcctccagaaagtcccagtggaaatctccagatgcagatgatgattctgtagccaaaagcaagccaggagtccaagaggggattcaggttcttggaagcctgtcagcctccagccgggctagacccaaagcaaaagatgaagattctgataaaatcttacgccagttattgggaaaggaaatctcagaaaatgtctgcacccaggaaaaactgtccttggaattccaggatgctcaggcttcctctagaaattctaaaaagatcccactggagaagagggaactgaagttagccaggctgagacagctgatgcagaggtcactgagtgagtctgacacagactccaacaactctgaggaccccaagactaccccagtgaggaaggctgaccgaccaaggccgcagcccattgtagaaagcgtagagagtatggacagcgcagaaagcctgcacctgatgattaagaaacacaccttggcatcagggggacgcaggtttcctttcagcatcaaggcctccaaatccctggatggccacagcccatctcccacctcagagagcagcgaaccagacttagaatcccagtatccaggctcagggagtattcctccaaaccagccctctggtgaccctcagcagcccagccctgacagtactgctgcccagaaagttgccacaagtcccaagagtgccctcaagtctccatcttccaagcgtaggacatctcagaacttaaaactgagagttacctttgaggagcctgtggtgcagatggagcagcctagccttgaactgaatggagaaaaagacaaagataagggcaggactctccagcggacctccacaagtaacgaatcgggggatcaactgaaaaggccttttggagcctttcgatctatcatggagacactaagtggcaaccaaaacaataataataactaccaggcagccaaccagctgaaaacctctacattgcccttgacctcacttgggaggaagacagatgccaagggaaaccctgccagctccgctagcaaaggaaagaataaggcagaaatgtacagcagctgcatcaatctttcctctaacatgctgattgaagagcatctgtgtaacgacacacggcataatgacatcaatagaaaaatgaagaaatcctacagcataaagcacattgctgagccagagtcaaaagaactcttcttgtaaatcactttttaaattttctctcactgatgccctttggaaattattggaaatttctggactatcctctttggaaagagaaccatgaaaacaatgcctcaccagcagaagaacagaatatcaggatgccttaaatttatagtagtagactgtaaaagattcattttggggtgatatctgtatatataacttgtttttttaaaagatgccgtttaaaagcatgattgggaaaatgtatgttttttaagagtagattgattcaccctacccacaggacattcaccaagccactgataccattttatatttcatcaattgcatgagtatttgctaatgttgattgaacctccctttccccataatgtgggcagatttggctcagctccttcatgagatcaggtcagtggtattgtttctgtcaagagtgttttttctgtcatttctactttttgtataaaggaaataaaacaatgttaacagccacctataagcttggggcacctactttctaacaaatctgtgatgtt

SEQ ID NO: 30860 - DNA, 1972 bp, Homo sapiens
  source 1..1972: mol_type = unassigned DNA
agtcagtcccttcgcgctcctgagccgccggcgcgccgggcgccccgggaatttataagtatttgaccgtactcaaaatgtgcaaggaagaataatggaagcccctgaataccttgatttggatgaaattgactttagtgatgacatatcttattcagtcacatcactcaagacgatcccagaactgtgccgaagatgtgatacgcaaaacgaagacagatcaggaaaagattcttctgtggcttcttcagtttatgcaagaacagggcatctcgttggatgaagtagaccaggatggcaacagtgccgttcacgtagcctcacagcatggctaccttggatgcatacagaccttggttgaatatggagcaaatgtcaccatgcagaaccacgctggggaaaagccctcccagagcgccgagcggcaggggcacaccctgtgctccaggtacctggtggtggtggagacctgcatgtcgctggcctctcaagtggtgaagttaaccaagcagctaaaggaacaaacagtagaacgtgtcacgctgcagaaccaactccaacaatttctagaagcccagaaatcagagggcaagtcactcccttcttcacccagttcaccatcctcacctgcctccagaaagtcccagtggaaatctccagatgcagatgatgattctgtagccaaaagcaagccaggagtccaagaggggattcaggttcttggaagcctgtcagcctccagccgggctagacccaaagcaaaagatgaagattctgataaaatcttacgccagttattgggaaaggaaatctcagaaaatgtctgcacccaggaaaaactgtccttggaattccaggatgctcaggcttcctctagaaattctaaaaagatcccactggagaagagggaactgaagttagccaggctgagacagctgatgcagaggtcactgagtgagtctgacacagactccaacaactctgaggaccccaagactaccccagtgaggaaggctgaccgaccaaggccgcagcccattgtagaaagcgtagagagtatggacagcgcagaaagcctgcacctgatgattaagaaacacaccttggcatcagggggacgcaggtttcctttcagcatcaaggcctccaaatccctggatggccacagcccatctcccacctcagagagcagcgaaccagacttagaatcccagtatccaggctcagggagtattcctccaaaccagccctctggtgaccctcagcagcccagccctgacagtactgctgcccagaaagttgccacaagtcccaagagtgccctcaagtctccatcttccaagcgtaggacatctcagaacttaaaactgagagttacctttgaggagcctgtggtgcagatggagcagcctagccttgaactgaatggagaaaaagacaaagataagggcaggactctccagcggacctccacaagtaacgaatcgggggatcaactgaaaaggccttttggagcctttcgatctatcatggagacactaagtggcaaccaaaacaataataataactaccaggcagccaaccagctgaaaacctctacattgcccttgacctcacttgggaggaagacagatgccaagggaaaccctgccagctccgctagcaaaggaaagaataaggcagcataatgacatcaatagaaaaatgaagaaatcctacagcataaagcacattgctgagccagagtcaaaagaactcttcttgtaaatcactttttaaattttctctcactgatgccctttggaaattattggaaatttctggactatcctctttggaaagagaaccatgaaaacaatgcctcaccagcagaagaacagaatatcaggatgccttaaatttatagtagtagactgtaaaagattcattttggggtgatatctgtatatataacttgtttttttaaaagatg

SEQ ID NO: 30861 - DNA, 1474 bp, Homo sapiens
  source 1..1474: mol_type = unassigned DNA
agtgctgttctgcgtcccaggctggtccgcgtggatttcagaggggaatgtttctctcttggccttgtctcttggcgatgactttcatctgcaggtggaatttataagtatttgaccgtactcaaaatgtgcaaggaagaataatggaagcccctgaataccttgatttggatgaaattgactttagtgatgacatatcttattcagtcacatcactcaagacgatcccagaactgtgccgaagatgtgatacgcaaaacgaagacagatcagaatggtcagttggagtgcgtacgctggatggtgagcgaaacagaagccattgcagaactgagttgttctaaggattttccaagccttattcattacgcaggttgctatggccaggaaaagattcttctgtggcttcttcagtttatgcaagaacagggcatctcgttggatgaagtagaccaggatggcaacagtgccgttcacgtagcctcacagcatggctaccttggatgcatacagaccttggttgaatatggagcaaatgtcaccatgcagaaccacgctggggaaaagccctcccagagcgccgagcggcaggggcacaccctgtgctccaggtacctggtggtggtggagacctgcatgtcgctggcctctcaagtggtgaagttaaccaagcagctaaaggaacaaacagtagaacgtgtcacgctgcagaaccaactccaacaatttctagaagcccagaaatcagagggcaagtcactcccttcttcacccagttcaccatcctcacctgcctccagaaagtcccagtggaaatctccagatgcagatgatgattctgtagccaaaagcaagccaggagtccaagaggggattcaggttcttggaagcctgtcagcctccagccgggctagacccaaagcaaaagatgaagattctgataaaatcttacgccagttattgggaaaggaaatctcagaaaatgtctgcacccaggaaaaactgtccttggaattccaggatgctcaggcttcctctagaaattctaaaaagatcccactggagaagagggaactgaagttagccaggctgagacagctgatgcagaggtcactgagtgagtctgacacagactccaacaactctgaggaccccaagactaccccagtgaggaaggctgaccgaccaaggccgcagcccattgtagaaagcgtagagagtatggacagcgcaggtttcctttcagcatcaaggcctccaaatccctggatggccacagcccatctcccacctcagagagcagcgaaccagacttagaatcccagtatccaggctcagggagtattcctccaaaccagccctctggtgaccctcagcagcccagccctgacagtactgctgcccagaaagttgccacaagtcccaagagtgccctcaagtctccatcttccaagcgtaggacatctcagaactt

SEQ ID NO: 30862 - DNA, 3123 bp, Homo sapiens
  source 1..3123: mol_type = unassigned DNA
atggaagcccctgaataccttgatttggatgaaattgactttagtgatgacatatctgacaataggagtcaagggaacaggctacaaaagcttggattggaggacacagacagggaagatgcaatgggctttggttcccatagggccaaactgacagtagttgctgccctgggagcttgccattgtcctgagaatgagtattcagtcacatcactcaagacgatcccagaactgtgccgaagatgtgatacgcaaaacgaagacagatcagtttctagctctagctggaattgtggcatctcaactcttattacaaacacgcaaaagcccacaggaatcgctgatgtgtacagtaagttccgcccagtgaagcgggtttcgccactgaaacatcagccagagactctggagaacaatgaaagtgatgaccaaaagaaccagaaagtggttgagtaccagaaagggggtgagtctgacctgggcccccagcctcaggagcttggccctggagatggagtgggcggcccaccaggtaagagctctgagcccagcacatcgctgggtgaactggagcactacgacctcgacatggatgagattctggatgtgccttatattaaatccagtcagcagcttgcctcttttaccaaggtgacttcagaaaaaagaattttgggcttatgcacaaccatcaatggcctttctggcaaagcctgctctacaggaagttctgagagctcatcatccaacatggcaccattttgtgttctttctcccgtgaaaagccctcacttgagaaaagcatcagctgtcatccacgaccagcacaagctgtccactgaagaaaccgagatctcacctcctctggttaaatgtggctctgcatatgagcctgaaaaccagagtaaagacttcctaaacaagacatttagtgatcctcatggtcgaaaagttgagaagacaacaccagactgccagctcagggccttccacctacaatcctcagcagcagaatccaaaccagaagagcaggtcagtggcctaaaccggaccagctcccaaggcccagaagaaaggagtgagtatctgaaaaaagtgaaaagcatcttgaacattgttaaagaaggacagatctctctcctgccacacctagctgcagacaatctagacaaaattcacgacgaaaatggaaacaatctattacatattgcggcgtcacagggacacgcagagtgtctacagcacctcacttctttgatgggagaagactgcctcaatgagcgcaacactgagaagttgactccagcaggcctggccattaagaatggtcagttggagtgcgtacgctggatggtgagcgaaacagaagccattgcagaactgagttgttctaaggattttccaagccttattcattacgcaggttgctatggccaggaaaagattcttctgtggcttcttcagtttatgcaagaacagggcatctcgttggatgaagtagaccaggatggcaacagtgccgttcacgtagcctcacagcatggctaccttggatgcatacagactagactcaagattcaagggacttggaatgggagtgagacatgcctttttacacaccactttagctcctatccccctatctcttctgggctgcagtgtcaaggacaagaaggagttctttttattcctgatcaggttggcgcagcaacaaataaacaggtgttatttcaaaaccaattaccagagaccaaatccagttactagagcccaagcaaatgagaacagaccttggttgaatatggagcaaatgtcaccatgcagaaccacgctggggaaaagccctcccagagcgccgagcggcaggggcacaccctgtgctccaggtacctggtggtggtggagacctgcatgtcgctggcctctcaagtggtgaagttaaccaagcagctaaaggaacaaacagtagaacgtgtcacgctgcagaaccaactccaacaatttctagaagcccagaaatcagagggcaagtcactcccttcttcacccagttcaccatcctcacctgcctccagaaagtcccagtggaaatctccagatgcagatgatgattctgtagccaaaagcaagccaggagtccaagaggggattcaggttcttggaagcctgtcagcctccagccgggctagacccaaagcaaaagatgaagattctgataaaatcttacgccagttattgggaaaggaaatctcagaaaatgtctgcacccaggaaaaactgtccttggaattccaggatgctcaggcttcctctagaaattctaaaaagatcccactggagaagagggaactgaagttagccaggctgagacagctgatgcagaggtcactgagtgagtctgacacagactccaacaactctgaggaccccaagactaccccagtgaggaaggctgaccgaccaaggccgcagcccattgtagaaagcgtagagagtatggacagcgcagaaagcctgcacctgatgattaagaaacacaccttggcatcagggggacgcaggtttcctttcagcatcaaggcctccaaatccctggatggccacagcccatctcccacctcagagagcagcgaaccagacttagaatcccagtatccaggctcagggagtattcctccaaaccagccctctggtgaccctcagcagcccagccctgacagtactgctgcccagaaagttgccacaagtcccaagagtgccctcaagtctccatcttccaagcgtaggacatctcagaacttaaaactgagagttacctttgaggagcctgtggtgcagatggagcagcctagccttgaactgaatggagaaaaagacaaagataagggcaggactctccagcggacctccacaagtaacgaatcgggggatcaactgaaaaggccttttggagcctttcgatctatcatggagacactaagtggcaaccaaaacaataataataactaccaggcagccaaccagctgaaaacctctacattgcccttgacctcacttgggaggaagacagatgccaagggaaaccctgccagctccgctagcaaaggaaagaataaggcagta

SEQ ID NO: 30863 - DNA, 1885 bp, Homo sapiens
  source 1..1885: mol_type = unassigned DNA
atggaagcccctgaataccttgatttggatgaaattgactttagtgatgacatatcttattcagtcacatcactcaagacgatcccagaactgtgccgaagatgtgatacgcaaaacgaagacagatcagccacacctagctgcagacaatctagacaaaattcacgacgaaaatggaaacaatctattacatattgcggcgtcacagggacacgcagagtgtctacagcacctcacttctttgatgggagaagactgcctcaatgagcgcaacactgagaagttgactccagcaggcctggccattaagaatggtcagttggagtgcgtacgctggatggtgagcgaaacagaagccattgcagaactgagttgttctaaggattttccaagccttattcattacgcaggttgctatggccaggaaaagattcttctgtggcttcttcagtttatgcaagaacagggcatctcgttggatgaagtagaccaggatggcaacagtgccgttcacgtagcctcacagcatggctaccttggatgcatacagaccttggttgaatatggagcaaatgtcaccatgcagaaccacgctggggaaaagccctcccagagcgccgagcggcaggggcacaccctgtgctccaggtacctggtggtggtggagacctgcatgtcgctggcctctcaagtggtgaagttaaccaagcagctaaaggaacaaacagtagaacgtgtcacgctgcagaaccaactccaacaatttctagaagcccagaaatcagagggcaagtcactcccttcttcacccagttcaccatcctcacctgcctccagaaagtcccagtggaaatctccagatgcagatgatgattctgtagccaaaagcaagccaggagtccaagaggggattcaggttcttggaagcctgtcagcctccagccgggctagacccaaagcaaaagatgaagattctgataaaatcttacgccagttattgggaaaggaaatctcagaaaatgtctgcacccaggaaaaactgtccttggaattccaggatgctcaggcttcctctagaaattctaaaaagatcccactggagaagagggaactgaagttagccaggctgagacagctgatgcagaggtcactgagtgagtctgacacagactccaacaactctgaggaccccaagactaccccagtgaggaaggctgaccgaccaaggccgcagcccattgtagaaagcgtagagagtatggacagcgcagaaagcctgcacctgatgattaagaaacacaccttggcatcagggggacgcaggtttcctttcagcatcaaggcctccaaatccctggatggccacagcccatctcccacctcagagagcagcgaaccagacttagaatcccagtatccaggctcagggagtattcctccaaaccagccctctggtgaccctcagcagcccagccctgacagtactgctgcccagaaagttgccacaagtcccaagagtgccctcaagtctccatcttccaagcgtaggacatctcagaacttaaaactgagagttacctttgaggagcctgtggtgcagatggagcagcctagccttgaactgaatggagaaaaagacaaagataagggcaggactctccagcggacctccacaagtaacgaatcgggggatcaactgaaaaggccttttggagcctttcgatctatcatggagacactaagtggcaaccaaaacaataataataactaccaggcagccaaccagctgaaaacctctacattgcccttgacctcacttgggaggaagacagatgccaagggaaaccctgccagctccgctagcaaaggaaagaataaggcagta

SEQ ID NO: 30864 - DNA, 420 bp, Homo sapiens
  source 1..420: mol_type = unassigned DNA
agtcgaggtaaaaagagcgaaaggtaaagaaagagcaggttcgtggacaggagccggcgggcaggccgggggatccctggaatttataagtatttgaccgtactcaaaatgtgcaaggaagaataatggaagcccctgaataccttgatttggatgaaattgactttagtgatgacatatcttattcagtcacatcactcaagacgatcccagaactgtgccgaagatgtgatacgcaaaacgaagacagatcagtttctagctctagctggaattgtggcatctcaactcttattacaaacacgcaaaagcccacaggaatcgctgatgtgtacagtaagttccgcccagtgaagcgggtttcgccactgaaacatcagccagagactctggagaacaatgaaagtgatgaccaaaaga

SEQ ID NO: 30865 - DNA, 559 bp, Homo sapiens
  source 1..559: mol_type = unassigned DNA
attgttcttttcatttgcccgcctcatgtggttcttattcttgctgtcacccgggatcttatcgcaggcagggatgggcagttccgcggctcggaaaagctgagataaggaggggcgaagtaatagtaatagcgacagtactaacaacggtaataatagctgtagaaaagggacgtctggtgttgctgccgcccctcgctcatcagcaccagctccccgactgccctgtccagcccgggctccgccagcctccctctagtgctgttctgcgtcccaggctggtccgcgtggatttcagaggggaatgtttctctcttggccttgtctcttggcgatgactttcatctgcaggtgagacagggtttcaccatgttgcccaggctggtctcgaactcctggactcaagcagtctgtccatctcagcctcccaaagtgctgggattacaggtgtgagccaccacactggccaaggaatttataagtatttgaccgtactcaaaatgtgcaaggaagaataatggaagcccctgaataccttgatttggatgaaattgacttt

SEQ ID NO: 30866 - DNA, 723 bp, Homo sapiens
  source 1..723: mol_type = unassigned DNA
gagcacagaacattccaggcaggcaaagccacccttgccctcctctccttggccacgtcctcaggggtgggcgagcttcggggggaggggtgggggtgaagactccgtgccaacgcaaaatactctgccaaaaggcttctcagacatgagtttcccagggcaatgcccaccttccgttccccgccttcccgagtctcttctcccagtttatgctggaaccctggaatggtctggggaccaatgagatggcagcggttaacgcttggatcacggaatttataagtatttgaccgtactcaaaatgtgcaaggaagaataatggaagcccctgaataccttgatttggatgaaattgactttagtgatgacatatcttattcagtcacatcactcaagacgatcccagaactgtgccgaagatgtgatacgcaaaacgaagacagatcagtttctagctctagctggaattgtggcatctcaactcttattacaaacacgcaaaagcccacaggaatcgctgatgtgtacagtaagttccgcccagtgaagcgggtttcgccactgaaacatcagccagagactctggagaacaatgaaagtgatgaccaaaagaaccagaaagtggttgagtaccagaaagggggtgagtctgacctgggcccccagcctcaggagcttggccctggagatggagtgggcggcccaccaggtaagagctctgag

SEQ ID NO: 30867 - DNA, 2359 bp, Homo sapiens
  source 1..2359: mol_type = unassigned DNA
aaagtgggaagcgcggacaaaaagtaggcggggaggagaggagagccccagctggggaaaagcaacggcagtcgaggtaaaaagagcgaaaggaatttataagtatttgaccgtactcaaaatgtgcaaggaagaataatggaagcccctgaataccttgatttggatgaaattgactttagtgatgacatatcttattcagtcacatcactcaagacgatcccagaactgtgccgaagatgtgatacgcaaaacgaagacagatcagaatggtcagttggagtgcgtacgctggatggtgagcgaaacagaagccattgcagaactgagttgttctaaggattttccaagccttattcattacgcaggttgctatggccagtcagagattcaaggattttcaattcacatctgaatgagaattttctcttgctacggaaaagattcttctgtggcttcttcagtttatgcaagaacagggcatctcgttggatgaagtagaccaggatggcaacagtgccgttcacgtagcctcacagcatggctaccttggatgcatacagaccttggttgaatatggagcaaatgtcaccatgcagaaccacgctggggaaaagccctcccagagcgccgagcggcaggggcacaccctgtgctccaggtacctggtggtggtggagacctgcatgtcgctggcctctcaagtggtgaagttaaccaagcagctaaaggaacaaacagtagaacgtgtcacgctgcagaaccaactccaacaatttctagaagcccagaaatcagagggcaagtcactcccttcttcacccagttcaccatcctcacctgcctccagaaagtcccagtggaaatctccagatgcagatgatgattctgtagccaaaagcaagccaggagtccaagaggggattcaggttcttggaagcctgtcagcctccagccgggctagacccaaagcaaaagatgaagattctgataaaatcttacgccagttattgggaaaggaaatctcagaaaatgtctgcacccaggaaaaactgtccttggaattccaggatgctcaggcttcctctagaaattctaaaaagatcccactggagaagagggaactgaagttagccaggctgagacagctgatgcagaggtcactgagtgagtctgacacagactccaacaactctgaggaccccaagactaccccagtgaggaaggctgaccgaccaaggccgcagcccattgtagaaagcgtagagagtatggacagcgcagaaagcctgcacctgatgattaagaaacacaccttggcatcagggggacgcaggtttcctttcagcatcaaggcctccaaatccctggatggccacagcccatctcccacctcagagagcagcgaaccagacttagaatcccagtatccaggctcagggagtattcctccaaaccagccctctggtgaccctcagcagcccagccctgacagtactgctgcccagaaagttgccacaagtcccaagagtgccctcaagtctccatcttccaagcgtaggacatctcagaacttaaaactgagagttacctttgaggagcctgtggtgcagatggagcagcctagccttgaactgaatggagaaaaagacaaagataagggcaggactctccagcggacctccacaagtaacgaatcgggggatcaactgaaaaggccttttggagcctttcgatctatcatggagacactaagtggcaaccaaaacaataataataactaccaggcagccaaccagctgaaaacctctacattgcccttgacctcacttgggaggaagacagatgccaagggaaaccctgccagctccgctagcaaaggaaagaataaggcagcataatgacatcaatagaaaaatgaagaaatcctacagcataaagcacattgctgagccagagtcaaaagaactcttcttgtaaatcactttttaaattttctctcactgatgccctttggaaattattggaaatttctggactatcctctttggaaagagaaccatgaaaacaatgcctcaccagcagaagaacagaatatcaggatgccttaaatttatagtagtagactgtaaaagattcattttggggtgatatctgtatatataacttgtttttttaaaagatgccgtttaaaagcatgattgggaaaatgtatgttttttaagagtagattgattcaccctacccacaggacattcaccaagccactgataccattttatatttcatcaattgcatgagtatttgctaatgttgattgaacctccctttccccataatgtgggcagatttggctcag

SEQ ID NO: 30868 - DNA, 1383 bp, Homo sapiens
  source 1..1383: mol_type = unassigned DNA
ggtccaccccggcctggcctagcggagcccccgcgtccgcccgccgcagccgccgctccatccccagccccggccccgcatccaggcgggtcctggatattcgcgccgaacccagcactccggttcgacggggctgcagtttgcagggcccggataaccgaggcagtggcccctcccgcgtccccaggtttcaaggacgctaggactctccgcggccctgaggcttcgcactggggagtggggccgccaggatggacgtgttcatgaagggcctgtccatggccaaggagggcgttgtggcagccgcggagaaaaccaagcagggggtcaccgaggcggcggagaagaccaaggagggcgtcctctacgtcggaagcaagacccgagaaggtgtggtacaaggtgtggcttcagtggctgaaaaaaccaaggaacaggcctcacatctgggaggagctgtgttctctggggcagggaacatcgcagcagccacaggactggtgaagagggaggaattccctactgatctgaagccagaggaagtggcccaggaagctgctgaagaaccactgattgagcccctgatggagccagaaggggagagttatgaggacccaccccaggaggaatatcaggagtatgagccagaggcgtaggggcccaggagagcccccaccagcagcacaattctgtccctgtccctgccccgccccccagagccagggctgtccttagactccttctccccaatcacgagatcttccttccgctctgaggcaaccccctcggagcctgtgttagtgtctgtccatctgtctgtcctacccgcccgcgtccaaccccggggcatggacagggccagggttgcggtcgcggctgggagcctcgcccctccagtgttgcctcctcccatccagcgtctgcgcggatgtagcatgttctatgtgtttttaaacgaagatccgagcgacggctcctccccgatccccgacagtggctctccaagcggcccccgggcagccccagagcaccccgcccgactcccattaacctcgagaacctttttttttttaaccaaaaccaggagccaggctgtgccatgtcccccgccccccatcccagccggcccggtccgaacgcgggcgtcgtgtgttgtgattgtggcatggagagtccccatcccccccatgtgagcgtgtcccgggcgggtgggcccggccgcccccgagagtccatgaataaagctaatctgtctgtagccagagccgcaccggcagggctgggctgggcgccgggtgggggcgacacgtggcggcgagtcttccaggtcccagcctacccctctgtgctctttggggtctggcacacacagcccaggtacaa

SEQ ID NO: 30869 - DNA, 1234 bp, Homo sapiens
  source 1..1234: mol_type = unassigned DNA
tgccgcagcgccggagccggagccggagccggagcgcgcgagctcgcagggcgcgaggaacgagcggtggctggctacgcacccgagacccgggcactgctgcgctcctgctcaggacccgcgacccgagcgcctgatcccggccctatcccccctccggcccctggtccaccccggcctggcctagcggagcccccgcgtccgcccgccgcagccgccgctccatccccagccccggccccgcatccaggccgccaggatggacgtgttcatgaagggcctgtccatggccaaggagggcgttgtggcagccgcggagaaaaccaagcagggggtcaccgaggcggcggagaagaccaaggagggcgtcctctacgtcggaagcaagacccgagaaggtgtggtacaaggtgtggcttcagtggctgaaaaaaccaaggaacaggcctcacatctgggaggagctgtgttctctggggcagggaacatcgcagcagccacaggactggtgaagagggaggaattccctactgatctgaagccagaggaagtggcccaggaagctgctgaagaaccactgattgagcccctgatggagccagaaggggagagttatgaggacccaccccaggaggaatatcaggagtatgagccagaggcgtaggggcccaggagagcccccaccagcagcacaattctgtccctgtccctgccccgccccccagagccagggctgtccttagactccttctccccaatcacgagatcttccttccgctctgaggcaaccccctcggagcctgtgttagtgtctgtccatctgtctgtcctacccgcccgcgtccaaccccggggcatggacagggccagggttgcggtcgcggctgggagcctcgcccctccagtgttgcctcctcccatccagcgtctgcgcggatgtagcatgttctatgtgtttttaaacgaagatccgagcgacggctcctccccgatccccgacagtggctctccaagcggcccccgggcagccccagagcaccccgcccgactcccattaacctcgagaacctttttttttttaaccaaaaccaggagccaggctgtgccatgtcccccgccccccatcccagccggcccggtccgaacgcgggcgtcgtgtgttgtgattgtggcatggagagtccccatcccccccatgtgagcgtgtcccgggcgggtgggcccggccgccccc

SEQ ID NO: 30870 - DNA, 552 bp, Homo sapiens
  source 1..552: mol_type = unassigned DNA
gtgcatgaccgtgtgactgtgccgtgcgtgtacaggcgggtcctggatattcgcgccgaacccagcactccggttcgacggggctgcagtttgcagggcccggataaccgaggccgccaggatggacgtgttcatgaagggcctgtccatggccaaggagggcgttgtggcagccgcggagaaaaccaagcagggggtcaccgaggcggcggagaagaccaaggagggcgtcctctacgtcggaagcaagacccgagaaggtgtggtacaaggtgtggcttcagtggctgaaaaaaccaaggaacaggcctcacatctgggaggagctgtgttctctggggcagggaacatcgcagcagccacaggactggtgaagagggaggaattccctactgatctgaagccagaggaagtggcccaggaagctgctgaagaaccactgattgagcccctgatggagccagaaggggagagttatgaggacccaccccaggaggaatatcaggagtatgagccagaggcgtaggggcccaggagagcccccaccagcag

SEQ ID NO: 30871 - DNA, 730 bp, Homo sapiens
  source 1..730: mol_type = unassigned DNA
gaccgtgtgactgtgccgtgcgtgtacaggcgggtcctggatattcgcgccgaacccagcactccggttcgacggggctgcagtttgcagggcccggataaccgaggcagtggcccctcccgcgtccccaggtttcaaggacgctaggactctccgcggccctgaggcttcgcactggggagtggggccgccaggatggacgtgttcatgaagggcctgtccatggccaaggagggcgttgtggcagccgcggagaaaaccaagcagggggtcaccgaggcggcggagaagaccaaggagggcgtcctctacgtcggaagcaagacccgagaaggtgtggtacaaggtgtggcttcagtggctgaaaaaaccaaggaacaggcctcacatctgggaggagctgtgttctctggggcagggaacatcgcagcagccacaggactggtgaagagggaggaattccctactgatctgaagccagaggaagtggcccaggaagctgctgaagaaccactgattgagcccctgatggagccagaaggggagagttatgaggacccaccccaggaggaatatcaggagtatgagccagaggcgtaggggcccaggagagcccccaccagcagcacaattctgtccctgtccctgccccgccccccagagccagggctgtccttagactccttctccccaatcacgagatcttccttccgctctgaggcaaccccct

SEQ ID NO: 30872 - DNA, 684 bp, Homo sapiens
  source 1..684: mol_type = unassigned DNA
caagcccgcagctcgcagggagatccagctccgtcctgcctgcagcagcacaaccctgcacacccaccatggatgtcttcaagaagggcttctccatcgccaaggagggcgtggtgggtgcggtggaaaagaccaagcagggggtgacggaagcagctgagaagaccaaggagggggtcatgtatgtgggagccaagaccaaggagaatgttgtacagagcgtgacctcaggcctgccttggggctggggctggggtggaggccagccagtgtcctcccatagtggccgagaagaccaaggagcaggccaacgccgtgagcgaggctgtggtgagcagcgtcaacactgtggccaccaagaccgtggaggaggcggagaacatcgcggtcacctccggggtggtgcgcaaggaggacttgaggccatctgccccccaacaggagggtgaggcatccaaagagaaagaggaagtggcagaggaggcccagagtgggggagactagagggctacaggccagcgtggatgacctgaagagcgctcctctgccttggacaccatcccctcctagcacaaggagtgcccgccttgagtgacatgcggctgcccacgctcctgccctcgtctccctggccacccttggcctgtccacctgtgctgctgcaccaacctcactgccctccct

SEQ ID NO: 30873 - DNA, 701 bp, Homo sapiens
  source 1..701: mol_type = unassigned DNA
agctccgtcctgcctgcagcagcacaaccctgcacacccaccatggatgtcttcaagaagggcttctccatcgccaaggagggcgtggtgggtgcggtggaaaagaccaagcagggggtgacggaagcagctgagaagaccaaggagggggtcatgtatgtgggagccaagaccaaggagaatgttgtacagagcgtgacctcagtggccgagaagaccaaggagcaggccaacgccgtgagcgaggctgtggtgagcagcgtcaacactgtggccaccaagaccgtggaggaggcggagaacatcgcggtcacctccggggtggtgcgcaaggaggacttgaggccatctgccccccaacaggagggtgaggcatccaaagagaaagaggaagtggcagaggaggcccagagtgggggagactagagggctacaggccagcgtggatgacctgaagagcgctcctctgccttggacaccatcccctcctagcacaaggagtgcccgccttgagtgacatgcggctgcccacgctcctgccctcgtctccctggccacccttggcctgtccacctgtgctgctgcaccaacctcactgccctccctcggccccacccaccctctggtccttctgaccccacttatgctgctgtgaattttttttttaaatgattccaaataaaacttgagcccactcctgc

SEQ ID NO: 30874 - DNA, 2862 bp, Homo sapiens
  source 1..2862: mol_type = unassigned DNA
ttctgcgcatgtgctcagttcgctatccggctgcttgtacctggttcaggaggttcaggcagaggttgcacccactacgcctgcgcaacctcagccccgcccctccgctgctttccccggaaacgtttctttcctacgcagccgctcctgccgccgtggtcgctggagctttgcctctctaggccggcagcgcctctcctccatggtcctgtctgtcagcgctgttttgggagcccgccggtgaggccgggccacgctcagacacttcgatcgtcgagtctgtcactgggcatggcgggtcagttccgcagctacgtgtgggacccgctgctgatcctgtcgcagatcgtcctcatgcagaccgtgtattacggctcgctgggcctgtggctggcgctggtggacgggctagtgcgaagcagcccctcgctggaccagatgttcgacgccgagatcctgggcttttccacccctccaggccggctctccatgatgtccttcatcctcaacgccctcacctgtgccctgggcttgctgtacttcatccggcgaggaaagcagtgtctggatttcactgtcactgtccatttctttcacctcctgggctgctggttctacagctcccgtttcccctcggcgctgacctggtggctggtccaagccgtgtgcattgcactcatggctgtcatcggggagtacctgtgcatgcggacggagctcaaggagatacccctcaactcagcccctaaatccaatgtctagaatcaggccctttggacatcctgctgacacttgggccccttaacaccttgggctgctcagaccctccagatgaggtccagcccagatctgagaggaaccctggaaatgtgaagtctctgttggtttgggagagatagtgagggcctgtcaaagaaggcaggtagcagtcagcatgacagctgcaagaatgacctctgtctgttgaagccttggtatctgagaggtcaggaaggggacctctttgagggtaataacagaattggaaccatgccactcttgagccacaatacctgtcaccagcctgttgttttaagagagaaaaaaaatcaaggatatctgattggagcaaaccacttctttagtcatctgtcttacccccctgggacagctgttacctttgcagtgttgccgaatcacagcagttacctttgcagtgttgccgaatcacagcagttctgttggagaaacgcttggtttccggatccagagccacagaaagaaatgtaggtgtgaagtattaggctgctgtcagggagaggatggcagatggaggcatcaagcacaaggaaaatgcacaacctgtgccctgttatacacacgttcatgtgcacccaagaacctatgactttcttccagttccttctaccaggtccccatcctgctgccagctctcaacatagcaggccataggacccagagaagaatcccagcgttgctcaaagtctaaccatcataaagacactgcctgtcttctaggaatgaccaggcacccagctcccactggactccaattttttttcctgccttatttagaattctttggcgggaagggtatgatgggttcccagagacaagaagcccaaccttctggcctgggctgtgctgatagtgctgagggagataggaatttgctgctaagatttttctttggggtggagtttcctctgtgaggggcttgcagctatccttcctgtgtatacaaatacagtattttccatggttctgcctgcacttactttgtaatgccacggttgagattgagagagatcagcgcagccaggcaagggaactttaaagaattattaggccaccttctccctttcctggaccccagagtcattcctccatttggttaaaatactcagtgcagggaactcttacatcctgtctccttcacttgcagcgtcccctgctatgcctcaggtgaaccacataattcttgggtttccgttcctacttgctagtgatttctgaacatgttcaatggagcggcacacagtctagacccacttccgcattgaaaccttcactgttcctctttggtttcttcagagctttcccaagagagctgtcagttttcagctgtcagtaacacaaatgagtttatggtaacacaaatgagttttgctatctctctgagaagctcatctgacctcctgactctcagccctacagagtagggagttgatgctgacaggatgaagatttaggaataaatatgcctgggaagagactgggaaggttctagggtgaggcacctcagtaactcatggtaccttggccaagttggaaggaagcagtttgttaatgaggcacagtaatcctggctgcagggtctaggaggtaagaccagctgggatgaccttccctgggttaatcaatttccctctagacaacacaaactgcaggcatgtgactaactttgaaagaacacccatcatgtggctgctgtcacccttgaccagccgtggtggtggttactccatctgtggttggagcgcctctttgggattcacttcaaggtcttgtgcctatttttctgcatatcttctgtgatgacaaatctctgtcccctgagtgttaatttgatttttagaaatggccaaaagtcacgtgatccaaactttttttcagtaatatggagactgagctgcatggtagttggggatcaaaaatatgtgaccttaatgagatttttatgatttctaaagtaacaataaaagcagtttttagagttgagttccagagagggcagggcaatggcagtgacatgtttgtcattttaataataaataacatctattgagtgcttaagaggtg

SEQ ID NO: 30875 - DNA, 813 bp, Homo sapiens
  source 1..813: mol_type = unassigned DNA
ctggaacaacttacttcccgtctttccacttcagagagggggaacctaggatcaatgaagttgatgggttttcgtctgctggagtaggaataaccgctcctgccgccgtggtcgctggagctttgcctctctaggccggcagcgcctctcctccatggtcctgtctgtcagcgctgttttgggagcccgccggtgaggccgggccacgctcagacacttcgatcgtcgagtctgtcactgggcatggcgggtcagttccgcagctacgtgtgggacccgctgctgatcctgtcgcagatcgtcctcatgcagaccgtgtattacggctcgctgggcctgtggctggcgctggtggacgggctagtgcgaagcagcccctcgctggaccagatgttcgacgccgagatcctgggcttttccacccctccaggccggctctccatgatgtccttcatcctcaacgccctcacctgtgccctgggcttgctgtacttcatccggcgaggaaagcagtgtctggatttcactgtcactgtccatttctttcacctcctgggctgctggttctacagctcccgtttcccctcggcgctgacctggtggctggtccaagccgtgtgcattgcactcatggctgtcatcggggagtacctgtgcatgcggacggagctcaaggagatacccctcaactcagcccctaaatccaatgtctagaatcaggccctttggacatcctgctgacacttgggccccttaacaccttgggctgctcagaccctccagatgaggtccagcccagatctgagaggaacc

SEQ ID NO: 30876 - DNA, 433 bp, Homo sapiens
  source 1..433: mol_type = unassigned DNA
agtccctcctcccgggcggggcgacgttgccatggagacaggccgctggctgaggcccggctcgtgtccctgcagggcatggcgggtcagttccgcagctacgtgtgggacccgctgctgatcctgtcgcagatcgtcctcatgcagaccgtgtattacggctcgctgggcctgtggctggcgctggtggacgggctagtgcgaagcagcccctcgctggaccagatgttcgacgccgagatcctgggcttttccacccctccaggccggctctccatgatgtccttcatcctcaacgccctcacctgtgccctgggcttgctgtacttcatccggcgaggaaagcagtgtctggatttcactgtcactgtccatttctttcacctcctgggctgctggttctacagctcccgtttcccctcggcgctgacct

SEQ ID NO: 30877 - DNA, 2915 bp, Homo sapiens
  source 1..2915: mol_type = unassigned DNA
tttccccggaaacgtttctttcctacgcagccgctcctgccgccgtggtcgctggagctttgcctctctaggccggcagcgcctctcctccatggtcctgtctgtcagcgctgttttgggagcccgccggtgaggccgggccacgctcagacacttcgatcgtcgagtctgtcactgggcatggcgggtcagttccgcagctacgtgtgggacccgctgctgatcctgtcgcagatcgtcctcatgcagaccgtgtattacggctcgctgggcctgtggctggcgctggtggacgggctagtgcgaagcagcccctcgctggaccagatgttcgacgccgagatcctgggcttttccacccctccaggccggctctccatgatgtccttcatcctcaacgccctcacctgacagggtcttgctctcttgcccaggctggagtgcagtggcgaagtcacagctcactgcagcctcgactcctgggcttaagcgatcctccgacctcagcctcctgagtagctgatactacaagcgcaaggcaccacatctggctaatttttaaattttttgtagagacagtgtctcattatgttgcccaggatggtcttgaactcctggcctcaagcagtcttcctgcctcgacctcccaaggtgctgggattacaggcgtgagccaccatgcctagcctgttcagagtaaatcttatttgaggcatgaatcaatcaaacataaatagagagttgaattgatcttagagggaatgggatgcagcaaagccctacttgaccatctcccccctcccacatttggaaatccttaaacccacttatgtaggcctctgactgtgagattcagagccacagcagtttccacctctgctaaggccttcaggcagtgagatggctcacttcagtgcccctccttccacacatctcctagctgtatcctgagacgcctcaacctagtcactacccttctgtatgatgttggtctaaggcttccccctctctggacatgaaggcggagcctcccagcactaccagccacacaccactcaagactccagatcctgaaccctgactctggggcccagctctgggcctggcttggggcttgcatctcacctagcctggcagtgttgttgtcacacccaccttgtatggatgccacataggcatttcaagtgatgcggagcagaagcgggtgcagcggcgcttgacccaacgcagggtggaggatctgcacatcaccctgggcgccgggaggtggattcgtgtgggcagcccctcaaaccagatccactggtcggctacatccagctgcttcatgtgccccatgggagttctattgcggtagggcttaatgaagatgactcgggggccctcggtgagtggttgcctcccctggactccagggttcaagctatcatccctcgatgtccttggaacctcaggctctatatgcttttctttccgtggcattgccgccaatgacgttttctccttgttcctcatccctgactgcacctgggacttccactccttgtactcttttttcttagggtcccctgtggactctaatttcttggacttgagttccttctcggagcacccgatctcctggaactcttcattattttgttttgttttattgcaggcactgttttccctggcagggagaggaaaggcagtcagcacagcaggaccgaggccctggttcccgagacagttgctatgtagccagctcaggggagcctgttaagaaaggctagaggggcctgcaaagaaacttctctactgcccagaggccttgtgctggtgtgaggaggtgtgatgagcactagcagagggatgtgagagattgggaaggtgaaagccatgactagtagttaaggcccctaagaatgaatattgtctacatcatctgccactagattagggttctgtctctctggacttcagctgggagggtgaacagtccagtagtttttctaaattgtgctccaagaaccttagggttctgaggaggtgtctcaatgtcacctcccctgacccactggggcaggatacctctccccagctcataacaacacaattggggcttggaaatagatatttgaacagaggtttcactgctttaataaagttggaaaactgttcaagaccagcctgggcaacatggtgagactctgtctccatacaaaaaaaaaatttttaagttggaaaatgatggggctagatgatcctgatccttctagctctatgtttcctgattgcctgcgactagaggccaaatcagaaagaggagcccagaaaggtggccttgacagaaatattaaatgctgagactttcccaaagggtgtctgtaacagactgggccccctgcaaacccccagtggcaacaccatcctagccaagggcgtggagagagatgaggccttgggctgcagataatggcaatactgtgatgataataatggctcccgctgattgagtcctcgctctatgccagactcgggacccttacaacttgggatccttactatttctgtgaagtagaaggcagtgaaacagagtggcttacagagcacaggtgttggattcagacaaacgggctcagattctgcttctgcctcttaccacctgtgtgatttgggcaagatatttaacctctcagagccttagcttccttatctgtaaaactaggataattctgtctacctaacaggattgttgtgaagaataaactaaatgggaaaattcttaagtgcttaacactgtaggatggtacttagcaggcaccaatcaatgttagctttcttaatactgtcatgtgacttatgaggaaacggtttgaacttgtctcggaggcatggtaaaaaaaaataaaaataaaaataaattaataaagaaa

SEQ ID NO: 30878 - DNA, 2250 bp, Homo sapiens
  source 1..2250: mol_type = unassigned DNA
ggcaacaagtcctgtttttataagagagcgaggaggacacttctcagaaggggttgttttgcttttgcttatttccgtccatttccctctctgcgcgcggaccttccttttccagatggtgagagccgcggggacacccgacgccggggcaggctgatccacgatcctgggtgtgcgtaacgccgcctggggctccgtgggcgagggacgtgtggggacaggtgcaccggaaactgccagactggagagttgaggcatcggaggcgcgagaacagcactactactgcggcgagacgagcgcggcgcatcccaaagcccggccaaatgcgctcgtccctgggaggggagggaggcgcgcctggagcggggacagggcggcggccaagagcagggaaggtggatctcaggtagcgagtctgggcttcggggacggcggggaggggagccggacgggaggatgagctcccctggcaccgagagcgcgggaaagagcctgcagtaccgagtggaccacctgctgagcgccgtggagaatgagctgcaggcgggcagcgagaagggcgaccccacagagcgcgaactgcgcgtgggcctggaggagagcgagctgtggctgcgcttcaaggagctcaccaatgagatgatcgtgaccaagaacggcaggaggatgtttccggtgctgaaggtgaacgtgtctggcctggaccccaacgccatgtactccttcctgctggacttcgtggcggcggacaaccaccgctggaagtacgtgaacggggaatgggtgccggggggcaagccggagccgcaggcgcccagctgcgtctacatccaccccgactcgcccaacttcggggcccactggatgaaggctcccgtctccttcagcaaagtcaagctcaccaacaagctcaacggagggggccagatcatgctgaactccttgcataagtatgagcctcgaatccacatagtgagagttgggggtccacagcgcatgatcaccagccactgcttccctgagacccagttcatagcggtgactgcttatcagaacgaggagatcacagctcttaaaattaagtacaatccatttgcaaaagctttccttgatgcaaaggaaagaagtgatcacaaagagatgatggaggaacccggagacagccagcaacctgggtactcccaatcctattctgacaactcacctgcatgtttatccatgctgcaatcccatgacaattggtccagccttggaatgcctgcccatcccagcatgctccccgtgagccacaatgccagcccacctaccagctccagtcagtaccccagcctgtggtctgtgagcaacggcgccgtcaccccgggctcccaggcagcagccgtgtccaacgggctgggggcccagttcttccggggctcccccgcgcactacacacccctcacccatccggtctcggcgccctcttcctcgggatccccactgtacgaaggggcggccgcggccacagacatcgtggacagccagtacgacgccgcagcccaaggccgcctcatagcctcatggacacctgtgtcgccaccttccatgtgaagcagcaaggcccaggtcccgaaagatgcagtgactttttgtcgtggcagccagtggtgactggattgacctactaggtacccagtggcagtctcaggttaagaaggaaatgcagcctcagtaacttccttttcaaagcagtggaggagcacacggcacctttccccagagccccagcatcccttgctcacacctgcagtagcggtgctgtcccaggtggcttacagatgaacccaactgtggagatgatgcagttggcccaacctcactgacggtgaaaaaatgtttgccagggtccagaaactttttttggtttatttctcatacagtgtattggcaactttggcacaccagaatttgtaaactccaccagtcctactttagtgagataaaaagcacactcttaatcttcttccttgttgctttcaagtagttagagttgagctgttaaggacagaataaaatcatagttgaggacagcaggttttagttgaattgaaaatttgactgctctgccccctagaatgtgtgtattttaagcatatgtagctaatctcttgtgttgttaaactataactgtttcatatttttcttttgacaaagtagccaaagacaatcagcagaaagcattttctgcaaaataaacgcaatatgcaaaa

SEQ ID NO: 30879 - DNA, 2967 bp, Homo sapiens
  source 1..2967: mol_type = unassigned DNA
cgtcctatctgcagtcggctactttcagtggcagaagaggccacatctgcttcctgtaggccctctgggcagaagcatgcgctggtgtctcctcctgatctgggcccaggggctgaggcaggctcccctcgcctcaggaatgatgacaggcacaatagaaacaacggggaacatttctgcagagaaaggtggctctatcatcttacaatgtcacctctcctccaccacggcacaagtgacccaggtcaactgggagcagcaggaccagcttctggccatttgtaatgctgacttggggtggcacatctccccatccttcaaggatcgagtggccccaggtcccggcctgggcctcaccctccagtcgctgaccgtgaacgatacaggggagtacttctgcatctatcacacctaccctgatgggacgtacactgggagaatcttcctggaggtcctagaaagctcagtggctgagcacggtgccaggttccagattccattgcttggagccatggccgcgacgctggtggtcatctgcacagcagtcatcgtggtggtcgcgttgactagaaagaagaaagccctcagaatccattctgtggaaggtgacctcaggagaaaatcagctggacaggaggaatggagccccagtgctccctcacccccaggaagctgtgtccaggcagaagctgcacctgctgggctctgtggagagcagcggggagaggactgtgccgagctgcatgactacttcaatgtcctgagttacagaagcctgggtaactgcagcttcttcacagagactggttagcaaccagaggcatcttctggaagatacacttttgtctttgctattatagatgaatatataagcagctgtactctccatcagtgctgcgtgtgtgtgtgtgtgtgtatgtgtgtgtgtgttcagttgagtgaataaatgtcatcctcttctccatcttcatttccttggccttttcgttctattccattttgcattatggcaggcctagggtgagtaacgtggatcttgatcataaatgcaaaattaaaaaatatcttgacctggttttaaatctggcagtttgagcagatcctatgtctctgagagacacattcctcataatggccagcattttgggctacaaggttttgtggttgatgatgaggatggcatgactgcagagccatcctcatctcattttttcacgtcattttcagtaactttcactcattcaaaggcaggttataagtaagtcctggtagcagcctctatggggagatttgagagtgactaaatcttggtatctgccctcaagaacttacagttaaatggggagacaatgttgtcatgaaaaggtattatagtaaggagagaaggagacatacacaggccttcaggaagagacgacagtttggggtgaggtagttggcataggcttatctgtgatgaagtggcctgggagcaccaaggggatgttgaggctagtctgggaggagcaggagttttgtctagggaacttgtaggaaattcttggagctgaaagtcccacaaagaaggccctggcaccaagggagtcagcaaacttcagattttattctctgggcaggcatttcaagtttccttttgctgtgacatactcatccattagacagcctgatacaggcctgtagcctcttccggccgtgtgtgctggggaagccccaggaaacgcacatgcccacacagggagccaagtcgtagcatttgggccttgatctaccttttctgcatcaatacactcttgagcctttgaaaaaagaacgtttcccactaaaaagaaaatgtggatttttaaaatagggactcttcctaggggaaaaaggggggctgggagtgatagagggtttaaaaaataaacaccttcaaactaacttcttcgaacccttttattcactccctgacgactttgtgctggggttggggtaactgaaccgcttatttctgtttaattgcattcaggctggatcttagaagacttttatccttccaccatctctctcagaggaatgagcggggaggttggatttactggtgactgattttctttcatgggccaaggaactgaaagagaatgtgaagcaaggttgtgtcttgcgcatggttaaaaataaagcattgtcctgcttcctaagacttagactggggttgacaattgttttagcaacaagacaattcaactatttctcctaggatttttattattattattttttcacttttctaccaaatgggttacataggaagaatgaactgaaatctgtccagagctccaagtcctttggaagaaagattagatgaacgtaaaaatgttgttgtttgctgtggcagtttacagcatttttcttgcaaaattagtgcaaatctgttggaaatagaacacaattcacaaattggaagtgaactaaaatgtaatgacgaaaagggagtagtgttttgatttggaggaggtgtatattcggcagaggttggactgagagttgggtgttatttaacataattatggtaattgggaaacatttataaacactattgggatggtgataaaatacaaaagggcctatagatgttagaaatgggtcaggttactgaaatgggattcaatttgaaaaaaatttttttaaatagaactcactgaactagattctcctctgagaaccagagaagaccatttcatagttggattcctggagacatgcgctatccaccacgtagccactttccacatgtggccatcaaccacttaagatggggttagtttaaatcaagatgtgctgttataattggtataagcataaaatcacactagattctggagatttaatatgaataataagaatactatttcagtagttttggtatattgtgtgtcaaaaatgataatattttggatgtattgggtgaaataaaatattaacatt

SEQ ID NO: 30880 - DNA, 3710 bp, Homo sapiens
  source 1..3710: mol_type = unassigned DNA
ggagcttggaggagagagcacgaccccctgctgctgccgcaggatgttgcccttgattctaggcagagacaggaggcatcagacagctgtgacagccatggagctcccctaccacttctgagccagagggaagactttggagaagcagaagcccaaagacactgctgggagattggtctgtgctctgggagaaccctaggttgtgtttcccgtgtacaagccaccgatcttgtggaaggtaccaccactcccagccccgcttggctgagggctgcgggccacaggttttcaggaccgtgcttgtggttggaggctgtggactcaagtgcggctggcccgggactttcacagggcgcagggcgggctaggggaaggcccagctgtgaactgataagggggttttacagtctaggccagcacttcttcccctttcacgggcaaacgtgacattctttttcagcacctgtactcacccagctgcatcaaggcggaccagacttgtccaactcacagccccaaaagtcagggcagaataaagcacagtggctgattttagcatttttaaaatagaaatgtgagtcagcacctgatggacctcacagatccctgctatgccacgagggctgctgactggccttaaaagctcagggtggcccggggagctctcagagcaggcctgcttctcacagctgagccgctcagtgctgggggctggtgttgagtgggtgggaaccagccaggttccccgtggagtctgtgcaggaggctctggagggtctggggtagattccctggggagagacttctgtcatttgctttcctccaaggcagcctcagggtctagctggcaagtggtcactttcctgcagaaacatgctatcctcctgttctatcagataaggagggcagaatgaagaggttgggtggaaccctggccttggagtctggagactaggattttactcttgacaaagcacattatatagatagggatattgtcctccaattttcctttcacttccttaattaatattgttatcaatactactgttgatgtattgaactcctgccatcttccaggcactgtgctgaacacttcaccaaacactagagaattaaatcctcacaaccctatgaaagaggtactcttattcctatatgcacatggggaaactgagccttcaggaggttgagaaagttttccaaggtcaccaaacaggatgactttggacccagtctgttaatcatccccctctagagcaccattgatcaaaatggacttgaccatattcctctttggactggttacttagcaaaaaacagaaaaattatttaacaattgtttaaaaccacctctaagtttctctggatatctcattatataagagaggtctcacctctttggctcccacccagctcaactatggaaacacaggctgtaaatttttatagcccaaatcctagtgtccaccactttctgtgctctagtcccactagctgctcttggccctgccactcctggctccccggccttagtgagtttgggaaacatccctccagttcaaccttggcaccttcccttggacacacattaggtattatttctccttcagctgaaggctttgtagctattgaaaggcaaggcatctcttgatgtgagccttgaaggacaggttgctttgggtaggcagagagaagctggtaaggcgtatattgtctaagggtctggaggtggggtataaggggtatacaagtcatagagttggggataggcagaacccagagaggggagaaaactggcctgagatagaagaccttgcaagggagaaggagggtaggagcctggatggtgtgaaatgctagaggtgcatggctggaatggagggggtggggcaccaggcttcagatgcttctgggtgcagatgcagattttcaggatgtacaacatggagcatccccaaggcaactgtgttgagagcctgcgaggcaggtgaatgtggatcttctaccccctctcctgactgagttcaccaaggaacaagctttgtaaactatttgaggctcccaggggctcacccttctttgcatttccagctctcatgaggtcattgtgcacaggaaagctctctcctctaatctcctctgatcctactgcaccagagaaatcaagccagaattcaataaagtctcagtccagataaacaagacaaaagaaataagattcgagtagaagatctccttcaagggaaagttgctgtgtttgtccaagacctttgtcccatccatgtatcatcccccaagtaaacacttcttgttcacctgttcattagatttcaagtgcagtccctggcctgtaagtccctacaatgataagcttctcttatcattgcacattcttcatcaggaggatgccagaggagctcagccaacagttcctcatcagtagcagattcttcagaatcttgggcactacacagatgcccttgagctctttgaataaaggctgatttttagaaaaaacattaagacagaacttaaaaacaatagattgactataatccaaagacgagtgtacctctaaccacaattttcatttatttttaaatgtttccttcatggcctttcttgtggctcaccctatgcagtttgtgtatttgttgacaactttatgtgtttttaatatggtttttgccaaacttggtttttccgagaccgtcttttctcagaggctcagttttaccgtcctatctgcagtcggctactttcagtggcagaagaggccacatctgcttcctgtaggccctctgggcagaagcatgcgctggtgtctcctcctgatctgggcccaggggctgaggcaggctcccctcgcctcaggaatgatgacaggcacaatagaaacaacggggaacatttctgcagagaaaggtggctctatcatcttacaatgtcacctctcctccaccacggcacaagtgacccaggtcaactgggagcagcaggaccagcttctggccatttgtaatgctgacttggggtggcacatctccccatccttcaaggatcgagtggccccaggtcccggcctgggcctcaccctccagtcgctgaccgtgaacgatacaggggagtacttctgcatctatcacacctaccctgatgggacgtacactgggagaatcttcctggaggtcctagaaagctcagtggctgagcacggtgccaggttccagattccattgcttggagccatggccgcgacgctggtggtcatctgcacagcagtcatcgtggtggtcgcgttgactagaaagaagaaagccctcagaatccattctgtggaaggtgacctcaggagaaaatcagctggacaggaggaatggagccccagtgctccctcacccccaggaagctgtgtccaggcagaagctgcacctgctgggctctgtggagagcagcggggagaggactgtgccgagctgcatgactacttcaatgtcctgagttacagaagcctgggtaactgcagcttcttcacagagactggttagcaaccagaggcatcttctggaagatacacttttgtctttgctattatagatgaatatataagcagctgtactctccatcagtgctgcgtgtgtgtgtgtgtgtgtatgtgtgtgtgtgttcagttgagtgaataaatgtcatcctcttctccatcttca

SEQ ID NO: 30881 - DNA, 3149 bp, Homo sapiens
  source 1..3149: mol_type = unassigned DNA
atgttgcccttgattctaggcagagacaggaggcatcagacagctgtgacagccatggagctcccctaccacttctgagccagagggaagactttggagaagcagaagcccaaagacactgctgggagattggtctgtgctctgggagaaccctaggttgtgtttcccgtgtacaagccaccgatcttgtggaagtcggctactttcagtggcagaagaggccacatctgcttcctgtaggccctctgggcagaagcatgcgctggtgtctcctcctgatctgggcccaggggctgaggcaggctcccctcgcctcaggaatgatgacaggcacaatagaaacaacggggaacatttctgcagagaaaggtggctctatcatcttacaatgtcacctctcctccaccacggcacaagtgacccaggtcaactgggagcagcaggaccagcttctggccatttgtaatgctgacttggggtggcacatctccccatccttcaaggatcgagtggccccaggtcccggcctgggcctcaccctccagtcgctgaccgtgaacgatacaggggagtacttctgcatctatcacacctaccctgatgggacgtacactgggagaatcttcctggaggtcctagaaagctcagtggctgagcacggtgccaggttccagattccattgcttggagccatggccgcgacgctggtggtcatctgcacagcagtcatcgtggtggtcgcgttgactagaaagaagaaagccctcagaatccattctgtggaaggtgacctcaggagaaaatcagctggacaggaggaatggagccccagtgctccctcacccccaggaagctgtgtccaggcagaagctgcacctgctgggctctgtggagagcagcggggagaggactgtgccgagctgcatgactacttcaatgtcctgagttacagaagcctgggtaactgcagcttcttcacagagactggttagcaaccagaggcatcttctggaagatacacttttgtctttgctattatagatgaatatataagcagctgtactctccatcagtgctgcgtgtgtgtgtgtgtgtgtatgtgtgtgtgtgttcagttgagtgaataaatgtcatcctcttctccatcttcatttccttggccttttcgttctattccattttgcattatggcaggcctagggtgagtaacgtggatcttgatcataaatgcaaaattaaaaaatatcttgacctggttttaaatctggcagtttgagcagatcctatgtctctgagagacacattcctcataatggccagcattttgggctacaaggttttgtggttgatgatgaggatggcatgactgcagagccatcctcatctcattttttcacgtcattttcagtaactttcactcattcaaaggcaggttataagtaagtcctggtagcagcctctatggggagatttgagagtgactaaatcttggtatctgccctcaagaacttacagttaaatggggagacaatgttgtcatgaaaaggtattatagtaaggagagaaggagacatacacaggccttcaggaagagacgacagtttggggtgaggtagttggcataggcttatctgtgatgaagtggcctgggagcaccaaggggatgttgaggctagtctgggaggagcaggagttttgtctagggaacttgtaggaaattcttggagctgaaagtcccacaaagaaggccctggcaccaagggagtcagcaaacttcagattttattctctgggcaggcatttcaagtttccttttgctgtgacatactcatccattagacagcctgatacaggcctgtagcctcttccggccgtgtgtgctggggaagccccaggaaacgcacatgcccacacagggagccaagtcgtagcatttgggccttgatctaccttttctgcatcaatacactcttgagcctttgaaaaaagaacgtttcccactaaaaagaaaatgtggatttttaaaatagggactcttcctaggggaaaaaggggggctgggagtgatagagggtttaaaaaataaacaccttcaaactaacttcttcgaacccttttattcactccctgacgactttgtgctggggttggggtaactgaaccgcttatttctgtttaattgcattcaggctggatcttagaagacttttatccttccaccatctctctcagaggaatgagcggggaggttggatttactggtgactgattttctttcatgggccaaggaactgaaagagaatgtgaagcaaggttgtgtcttgcgcatggttaaaaataaagcattgtcctgcttcctaagacttagactggggttgacaattgttttagcaacaagacaattcaactatttctcctaggatttttattattattattttttcacttttctaccaaatgggttacataggaagaatgaactgaaatctgtccagagctccaagtcctttggaagaaagattagatgaacgtaaaaatgttgttgtttgctgtggcagtttacagcatttttcttgcaaaattagtgcaaatctgttggaaatagaacacaattcacaaattggaagtgaactaaaatgtaatgacgaaaagggagtagtgttttgatttggaggaggtgtatattcggcagaggttggactgagagttgggtgttatttaacataattatggtaattgggaaacatttataaacactattgggatggtgataaaatacaaaagggcctatagatgttagaaatgggtcaggttactgaaatgggattcaatttgaaaaaaatttttttaaatagaactcactgaactagattctcctctgagaaccagagaagaccatttcatagttggattcctggagacatgcgctatccaccacgtagccactttccacatgtggccatcaaccacttaagatggggttagtttaaatcaagatgtgctgttataattggtataagcataaaatcacactagattctggagatttaatatgaataataagaatactatttcagtagttttggtatattgtgtgtcaaaaatgataatattttggatgtattgggtgaaataaaatattaacatta

SEQ ID NO: 30882 - DNA, 1919 bp, Homo sapiens
  source 1..1919: mol_type = unassigned DNA
aagacaactccttcaccacatttcctgtttgtaactgaaacaaagtacacacaaaagattttaagaaacagaagagaaaagaatccgaggcacagataaagataagttttactgtcatgctgcttttaacataacagagcaacatcacctaggaaaaaagtttgtaggaggatttttaatccatatatttgtcttatggctagataaagatttctctgaaaaaaagaagcatgtcaggaatctctgggtgcccctttttcctctggggacttctagcattgttgggcttggctttggttatatcactgatcttcaatatttcccactatgtggaaaagcaacgacaagataaaatgtacagctactccagtgaccacaccagggttgatgagtattatattgaagacacaccaatttatggtaacttagatgatatgatttcagaaccaatggatgaaaattgctatgaacaaatgaaagcccgaccagagaaatctgtaaataagatgcaggaagccaccccatctgcacaggcaaccaatgaaacacagatgtgctacgcctcacttgatcacagcgttaaggggaagcgtagaaagcccaggaaacagaatactcatttctcagacaaggatggagatgagcaactacatgcaatagatgccagcgtttctaagaccaccttagtagacagtttctccccagaaagccaggcagtagaggaaaacattcatgatgatcccatcagactgtttggattgatccgtgctaagagagaacctataaactagctggaccatgatctagttcaatgatttggctcctattgaagatggcttctaagaaaacaagatgcacagaggacacagaaggacttggcagcagggtgatgacctgatcatttgttgatgggatggtggcttacctcttattcacagcttacacttatgcatgccaaatgtaaggccatgaaaatcagtatttcaaataacttaaaaaatgctttactactaaaatgtaaaaaattaatgtgctcacctcggcagcacatatactaaaaattaataagacccagcttgaaaattgagcctgataacaagattacaaattcacaatacctaatacttagggaaatataaaaatttaagcatgaatgtgttctggaacacgttagaagaaaaataaaagccaatgagtttttttttaattctcctttctcaccaatgggcaatagcccataattgaaataaatttctgattgaaaggtataggaaacattaaaatgcattactaagagaagtaatataattttcttacaaagtatttttcccaaagatagctttactatttcaaaaattgtcaaattaatgcatgctccttacaacaaacaaatatcaaaaagagtttaggaattctactagccagagatagtcacttggagaaactttctatatatccttctaaatatttttctgggcatgcttatgtatgtacatcagttgtttctttttattttgaaccaaaaatgtggtttcttttgtacacattacttaaactttctttccagtcaacaatatattgtggatttattttcactgttatatttaactatatataaatacgcatatattgtaattttaatgtctgcttagcaccccactgataaccaaatcacagtttatttaaataattttaatgacttttcaaaaacaatttattgatgcaaaaagcaaggttgagatgacaatgtttctttcaataattaaaaaatactgcttcactgtcttctctctgtttcatcagaaacacatactataatacttgtctctgtccttaagtgtgatacacgctatttttctgattgttaagactttccttattactggttctaatttgattataatatgccaaggtatggt

SEQ ID NO: 30883 - DNA, 2436 bp, Homo sapiens
  source 1..2436: mol_type = unassigned DNA
tttccctctctgcgcgcggaccttccttttccagatggtgagagccgcggggacacccgacgccggggcaggctgatccacgatcctgggtgtgcgtaacgccgcctggggctccgtgggcgagggacgtgtggggacaggtgcaccggaaactgccagactggagagttgaggcatcggaggcgcgagaacagcactactactgcggcgagacgagcgcggcgcatcccaaagcccggccaaatgcgctcgtccctgggaggggagggaggcgcgcctggagcggggacagtcttggtccgcgccctcctcccgggtctgtgccgggacccgggacccgggagccgtcgcaggtctcggtccaaggggccccttttctcggaagggcggcggccaagagcagggaaggtggatctcaggtagcgagtctgggcttcggggacggcggggaggggagccggacgggaggatgagctcccctggcaccgagagcgcgggaaagagcctgcagtaccgagtggaccacctgctgagcgccgtggagaatgagctgcaggcgggcagcgagaagggcgaccccacagagcgcgaactgcgcgtgggcctggaggagagcgagctgtggctgcgcttcaaggagctcaccaatgagatgatcgtgaccaagaacggcaggaggatgtttccggtgctgaaggtgaacgtgtctggcctggaccccaacgccatgtactccttcctgctggacttcgtggcggcggacaaccaccgctggaagtacgtgaacggggaatgggtgccggggggcaagccggagccgcaggcgcccagctgcgtctacatccaccccgactcgcccaacttcggggcccactggatgaaggctcccgtctccttcagcaaagtcaagctcaccaacaagctcaacggagggggccagatcatgctgaactccttgcataagtatgagcctcgaatccacatagtgagagttgggggtccacagcgcatgatcaccagccactgcttccctgagacccagttcatagcggtgactgcttatcagaacgaggagatcacagctcttaaaattaagtacaatccatttgcaaaagctttccttgatgcaaaggaaagaagtgatcacaaagagatgatggaggaacccggagacagccagcaacctgggtactcccaatgggggtggcttcttcctggaaccagcaccctgtgtccacctgcaaatcctcatcctcagtttggaggtgccctctccctcccctccacgcacagctgtgacaggtacccaaccctgaggagccaccggtcctcaccctaccccagcccctatgctcatcggaacaattctccaacctattctgacaactcacctgcatgtttatccatgctgcaatcccatgacaattggtccagccttggaatgcctgcccatcccagcatgctccccgtgagccacaatgccagcccacctaccagctccagtcagtaccccagcctgtggtctgtgagcaacggcgccgtcaccccgggctcccaggcagcagccgtgtccaacgggctgggggcccagttcttccggggctcccccgcgcactacacacccctcacccatccggtctcggcgccctcttcctcgggatccccactgtacgaaggggcggccgcggccacagacatcgtggacagccagtacgacgccgcagcccaaggccgcctcatagcctcatggacacctgtgtcgccaccttccatgtgaagcagcaaggcccaggtcccgaaagatgcagtgactttttgtcgtggcagccagtggtgactggattgacctactaggtacccagtggcagtctcaggttaagaaggaaatgcagcctcagtaacttccttttcaaagcagtggaggagcacacggcacctttccccagagccccagcatcccttgctcacacctgcagtagcggtgctgtcccaggtggcttacagatgaacccaactgtggagatgatgcagttggcccaacctcactgacggtgaaaaaatgtttgccagggtccagaaactttttttggtttatttctcatacagtgtattggcaactttggcacaccagaatttgtaaactccaccagtcctactttagtgagataaaaagcacactcttaatcttcttccttgttgctttcaagtagttagagttgagctgttaaggacagaataaaatcatagttgaggacagcaggttttagttgaattgaaaatttgactgctctgccccctagaatgtgtgtattttaagcatatgtagctaatctcttgtgttgttaaactataactgtttcatatttttcttttgacaaagtagccaaagacaatcagcagaaagcattttctgcaaaataaacgcaatatgcaaaa

SEQ ID NO: 30884 - DNA, 902 bp, Homo sapiens
  source 1..902: mol_type = unassigned DNA
gaggaggacacttctcagaaggggttgttttgcttttgcttatttccgtccatttccctctctgcgcgcggaccttccttttccagatgggcggcggccaagagcagggaaggtggatctcaggtagcgagtctgggcttcggggacggcggggaggggagccggacgggaggatgagctcccctggcaccgagagcgcgggaaagagcctgcagtaccgagtggaccacctgctgagcgccgtggagaatgagctgcaggcgggcagcgagaagggcgaccccacagagcgcgaactgcgcgtgggcctggaggagagcgagctgtggctgcgcttcaaggagctcaccaatgagatgatcgtgaccaagaacggcaggaggatgtttccggtgctgaaggtgaacgtgtctggcctggaccccaacgccatgtactccttcctgctggacttcgtggcggcggacaaccaccgctggaagtacgtgaacggggaatgggtgccggggggcaagccggagccgcaggcgcccagctgcgtctacatccaccccgactcgcccaacttcggggcccactggatgaaggctcccgtctccttcagcaaagtcaagctcaccaacaagctcaacggagggggccagatcatgctgaactccttgcataagtatgagcctcgaatccacatagtgagagttgggggtccacagcgcatgatcaccagccactgcttccctgagacccagttcatagcggtgactgcttatcagaacgaggagatcacagctcttaaaattaagtacaatccatttgcaaaagctttccttgatgcaaaggaaagaagtgatcacaaagagatgatggaggaacccggagacagccagcaacctgggtactcccaa

SEQ ID NO: 30885 - DNA, 1120 bp, Homo sapiens
  source 1..1120: mol_type = unassigned DNA
agatcccctccactcggtttctctctttgcaggagcaccggcagcaccagtgtgtgaggggagcaggcagcggtcctagccagttccttgatcctgccagaccacccagcccccggcacagagctgctccacaggcaccatgaggatcatgctgctattcacagccatcctggccttcagcctagctcagagctttggggctgtctgtaaggagccacaggaggaggtggttcctggcgggggccgcagcaagagggatccagatctctaccagctgctccagagactcttcaaaagccactcatctctggagggattgctcaaagccctgagccaggctagcacagatcctaaggaatcaacatctcccgagaaacgtgacatgcatgacttctttgtgggacttatgggcaagaggagcgtccagccagactctcctacggatgtgaatcaagagaacgtccccagctttggcatcctcaagtatcccccgagagcagaatagggtattaaagctcatagatttgccctgaaatacactgccaatgcccagcacactgtcggccaaacacaaagacacttagaggcacgtgtgtttgtacacatcccccgtctttcatctctttcctctggatcatggacggcagctgactattgagcaggactctttcagagggacccataattgcagctttcataatcttaccattgagggagcattcccaacctgttaggtgtcaggcagaataggacataaggtttctgggagctggcatttaaagattagatgagatggatcaacacagatcattgtgtcatctgatttcattcatgtgaaacttactccacttccggactcctggactgcattaggaagacctctttccctgtcccaatccccaggtgcgcacgctcctgttaccctttctcttccctgttcttgtaacattcttgtgctttgactccttctccatcttttctacctgaccctggtgtggaaactgcatagtgaatatccccaaccccaatgggcattgactgtagaataccctagagttcctgtagtgtcctacattaaaaatataatgtctctctctattcctcaacaataaaggatttt

SEQ ID NO: 30886 - DNA, 588 bp, Homo sapiens
  source 1..588: mol_type = unassigned DNA
aggttctcagtgaggttcaaggagaacagtgtggctgtcaaggtcgtccagggccctgcaggtggtgacaacagcaagctacgctacaaaaaaaaggggagtcattgcttggaggagcaccggcagcaccagtgtgtgaggggagcaggcagcggtcctagccagttccttgatcctgccagaccacccagcccccggcacagagctgctccacaggcaccatgaggatcatgctgctattcacagccatcctggccttcagcctagctcagagctttggggctgtctgtaaggagccacaggaggaggtggttcctggcgggggccgcagcaagagggatccagatctctaccagctgctccagagactcttcaaaagccactcatctctggagggattgctcaaagccctgagccaggctagcacagatcctaaggaatcaacatctcccgagaaacgtgacatgcatgacttctttgtgggacttatgggcaagaggagcgtccagccagactctcctacggatgtgaatcaagagaacgtccccagctttggcatcctcaagtatcccccgagagcagaatagg

SEQ ID NO: 30887 - DNA, 731 bp, Homo sapiens
  source 1..731: mol_type = unassigned DNA
agatcccctccactcggtttctctctttgcaggagcaccggcagcaccagtgtgtgaggggagcaggcagcggtcctagccagttccttgatcctgccagaccacccagcccccggcacagagctgctccacaggcaccatgaggatcatgctgctattcacagccatcctggccttcagcctagctcagagctttggggctgtctgtaaggagccacaggaggaggtggttcctggcgggggccgcagcaagagggatccagatctctaccagctgctccagagactcttcaaaagccactcatctctggagggattgctcaaagccctgagccaggctagcacagatcctaaggaatcaacatctcccgagaaacactctcctacggatgtgaatcaagagaacgtccccagctttggcatcctcaagtatcccccgagagcagaataggtactccacttccggactcctggactgcattaggaagacctctttccctgtcccaatccccaggtgcgcacgctcctgttaccctttctcttccctgttcttgtaacattcttgtgctttgactccttctccatcttttctacctgaccctggtgtggaaactgcatagtgaatatccccaaccccaatgggcattgactgtagaataccctagagttcctgtagtgtcctacattaaaaatataatgtctctctctattcctcaacaataaaggatttt

SEQ ID NO: 30888 - DNA, 816 bp, Homo sapiens
  source 1..816: mol_type = unassigned DNA
ctgagtgactgcagccttcctagatcccctccactcggtttctctctttgcaggagcaccggcagcaccagtgtgtgaggggagcaggcagcggtcctagccagttccttgatcctgccagaccacccagcccccggcacagagctgctccacaggcaccatgaggatcatgctgctattcacagccatcctggccttcagcctagctcagagctttggggctgtctgtaaggagccacaggaggaggtggttcctggcgggggccgcagcaagagggatccagatctctaccagctgctccagagactcttcaaaagccactcatctctggagggattgctcaaagccctgagccaggctagcacagatcctaaggaatcaacatctcccgagaaacgtgacatgcatgacttctttgtgggacttatgggcaagaggagcgtccagccagactctcctacggatgtgaatcaagagaacgtccccagctttggcatcctcaagtatcccccgagagcagaataggtactccacttccggactcctggactgcattaggaagacctctttccctgtcccaatccccaggtgcgcacgctcctgttaccctttctcttccctgttcttgtaacattcttgtgctttgactccttctccatcttttctacctgaccctggtgtggaaactgcatagtgaatatccccaaccccaatgggcattgactgtagaataccctagagttcctgtagtgtcctacattaaaaatataatgtctctctctattcctcaacaataaaggatttttgcatatgaa

SEQ ID NO: 30889 - DNA, 2318 bp, Homo sapiens
  source 1..2318: mol_type = unassigned DNA
acggcaagtagcaagcagcaaaaggcgtggtagctgcggcggtggaatgagacagttgtcaacagctggcgcagctgccgcgctgcgcaccgggactggcgagtacgcagcccaggtactgccccttcccagtgacgtctctgcagggggttataaaagcctcgtgcgcagctaactcgcgagctgagcaacccgaaccgagaggtgcccgcgaaactgcaggcggcggcagcggcagcaaaagagaaggaaaaatctccagctggatacgaagctccagaatcctggccataggctcagaacttttacaggtcgcgctgcaatgggcccccacttcgctcctaagtcctcacgcagcacagggctttgcctttccctgcggaggaaggagaaataggagttgcaggcagcagcaggtgcataaatgcgggggatctcttgcttcctagaactgtgaccggtggaatttctttccctttttcagtttaccgcaagagagatgctgtctccagacttctgaactcaaacgtctcctgaagcttgaaagtggaggaattcagagccaccgcgggcaggcgggcagtgcatccagaagcgtttatattctgagcgccagttcagctttcaaaaagagtgctgcccagaaaaagccttccaccctcctgtctggctttagaaggaccctgagccccaggcgccagccacaggactctgctgcagaggggggttgtgtacagatagtagggctttaccgcctagcttcgaaatggataacgtcctcccggtggactcagacctctccccaaacatctccactaacacctcggaacccaatcagttcgtgcaaccagcctggcaaattgtcctttgggcagctgcctacacggtcattgtggtgacctctgtggtgggcaacgtggtagtgatgtggatcatcttagcccacaaaagaatgaggacagtgacgaactattttctggtgaacctggccttcgcggaggcctccatggctgcattcaatacagtggtgaacttcacctatgctgtccacaacgaatggtactacggcctgttctactgcaagttccacaacttctttcccatcgccgctgtcttcgccagtatctactccatgacggctgtggcctttgataggtacatggccatcatacatcccctccagccccggctgtcagccacagccaccaaagtggtcatctgtgtcatctgggtcctggctctcctgctggccttcccccagggctactactcaaccacagagaccatgcccagcagagtcgtgtgcatgatcgaatggccagagcatccgaacaagatttatgagaaagtgtaccacatctgtgtgactgtgctgatctacttcctccccctgctggtgattggctatgcatacaccgtagtgggaatcacactatgggccagtgagatccccggggactcctctgaccgctaccacgagcaagtctctgccaagcgcaaggtggtcaaaatgatgattgtcgtggtgtgcaccttcgccatctgctggctgcccttccacatcttcttcctcctgccctacatcaacccagatctctacctgaagaagtttatccagcaggtctacctggccatcatgtggctggccatgagctccaccatgtacaaccccatcatctactgctgcctcaatgacaggttccgtctgggcttcaagcatgccttccggtgctgccccttcatcagcgccggcgactatgaggggctggaaatgaaatccacccggtatctccagacccagggcagtgtgtacaaagtcagccgcctggagaccaccatctccacagtggtgggggcccacgaggaggagccagaggacggccccaaggccacaccctcgtccctggacctgacctccaactgctcttcacgaagtgactccaagaccatgacagagagcttcagcttctcctccaatgtgctctcctaggccacagggcctttggcaggtgcagcccccactgcctttgacctgcctcccttcatgcatggaaattcccttcatctggaaccatcagaaacaccctcacactgggacttgcaaaaagggtcagtatgggttagggaaaacattccatccttgagtcaaaaaatctcaattcttccctatctttgccaccctcatgctgtgtgactcaaaccaaatcactgaactttgctgagcctgtaaaataaaaggtcggaccagcttttcccaaaagcccattcattccattctggaagtgactttggctgcatgcgagtgctcatttcaggat

SEQ ID NO: 30890 - DNA, 1270 bp, Homo sapiens
  source 1..1270: mol_type = unassigned DNA
gaaaaagccttccaccctcctgtctggctttagaaggaccctgagccccaggcgccagccacaggactctgctgcagaggggggttgtgtacagatagtagggctttaccgcctagcttcgaaatggataacgtcctcccggtggactcagacctctccccaaacatctccactaacacctcggaacccaatcagttcgtgcaaccagcctggcaaattgtcctttgggcagctgcctacacggtcattgtggtgacctctgtggtgggcaacgtggtagtgatgtggatcatcttagcccacaaaagaatgaggacagtgacgaactattttctggtgaacctggccttcgcggaggcctccatggctgcattcaatacagtggtgaacttcacctatgctgtccacaacgaatggtactacggcctgttctactgcaagttccacaacttctttcccatcgccgctgtcttcgccagtatctactccatgacggctgtggcctttgataggtacatggccatcatacatcccctccagccccggctgtcagccacagccaccaaagtggtcatctgtgtcatctgggtcctggctctcctgctggccttcccccagggctactactcaaccacagagaccatgcccagcagagtcgtgtgcatgatcgaatggccagagcatccgaacaagatttatgagaaagtgtaccacatctgtgtgactgtgctgatctacttcctccccctgctggtgattggctatgcatacaccgtagtgggaatcacactatgggccagtgagatccccggggactcctctgaccgctaccacgagcaagtctctgccaagcgcaaggtggtcaaaatgatgattgtcgtggtgtgcaccttcgccatctgctggctgcccttccacatcttcttcctcctgccctacatcaacccagatctctacctgaagaagtttatccagcaggtctacctggccatcatgtggctggccatgagctccaccatgtacaaccccatcatctactgctgcctcaatgacaggtgaggatcccaaccccatgagctctccaggggccacaagaccatctacatacacagtggccaagcggccatcctaaatgagtaaacccagctgtgagacaagagggacaagtggggactgcagctaacttatcatcacacaactcagcctggctgattatcaccatccaggaatgggagcccggagtggactgattttctttttttcttttcca

SEQ ID NO: 30891 - DNA, 2083 bp, Homo sapiens
  source 1..2083: mol_type = unassigned DNA
gcacccagcacccagcccggcttgcagcccaaagcctggagagaggctgctgcgccattgacctgtggactccagagactcccgctgtgcattcctctgatctggaaggtttcctgaattacgtgacgagaaacctgggttcgagtcctaacttgtcaccaacttcctgagtgacctgggctggtcccgtcccctcttggaatctctgtcttccatctcttcagcgaaggggttgatttataagggtgttttctgctctgacactgtgatttgaattctgtgtttccacatgatattcgagaagtctggccggaaggatggaatctgaaatgacaatggttctggactgggctttgtgctcagcccagctcatctttgcctgagacctaggagtggccccaggctctcctgatgtgccaccacgcttggcatctgctcctctccctgcccccatattcccatgctctgaaggggagttctctttcatagcaaatccgagaggagccgaggagccaggtcctttgttccagacccagaagcagccatggggacctgtgacattgtgactgaagccaatatctcatctggccctgagagcaacaccacgggcatcacagccttctccatgcccagctggcaactggcactgtgggccacagcctacctggccctggtgctggtggccgtgacgggtaatgccatcgtcatctggatcatcctggcccatcggaggatgcgcacagtcaccaactacttcatcgtcaatctggcgctggctgacctctgcatggctgccttcaatgccgccttcaactttgtctatgccagccacaacatctggtactttggccgtgccttctgctacttccagaacctcttccccatcacagccatgtttgtcagcatctactccatgaccgccattgctgccgacaggtacatggccatcgtccaccccttccagcctcggctttcagctcccagcaccaaggcggttattgctggcatctggctggtggctctcgccctggcctcccctcagtgcttctactccaccgtcaccatggaccagggtgccaccaagtgcgtggtggcctggcccgaagacagcgggggcaagacgctcctcctgtaccacctcgtggtgatcgccctcatctacttcctgccgctcgcggtgatgtttgtagcctacagcgtcatcggcctcacgctctggaggcgcgcagtgcccggacatcaggcgcacggtgccaacctgcgccacctgcaggccatgaagaagtttgtgaagaccatggtgctggtggtgctgacgtttgccatctgctggctgccctaccacctctacttcatcctgggcagcttccaggaggacatctactgccacaagttcatccagcaagtctacctggcactcttctggttggccatgagctctaccatgtacaatcccatcatctactgctgtctcaaccacaggtttcgctctggattccggcttgccttccgctgctgcccatgggtcacacccaccaaggaagataagctcgagctgactcccacgacctccctctccacgagagtcaacaggtgtcacactaaggagactttgttcatggctggggacacagccccctccgaggctaccagtggggaggcggggcgtccccaggatggatcagggctatggtttgggtatggtttgcttgcccccaccaaaactcatgttgaaatttgatcccaatgtggcagtgttgggaggtaggggttagtgggaggtgtttgggtattggggatggatcccttatgaatagattaatgccttccagttgaagtgaatcatcactcttgtgggaatggactagttcccaaaataacaagttgttagaaagagtgtggtgtcctcagtttccctgtcttgcttcctctctcaccatgtgatctctttgcacacaacacttcccttccactttccaccatgacaagaagcagcctgaggccttcaccagatgcagctgcccaatcttggatattccagccaccagaatcatgagccaaataaacctcttttctttataaa

SEQ ID NO: 30892 - DNA, 1740 bp, Homo sapiens
  source 1..1740: mol_type = unassigned DNA
ccttttgcagggaagccgtctcctggcacacaggctacccaatgccacctttatttttgtttaaatcaaaccaagtccctgggaggcgcccagggtgggcccgcaggggcggctccacagtgcccgcggggtcccaggaccaggcgctggcagacttcggagtcgcccccgggccctccgctgcccaggcctcggctctccctgcaggtaccacctcgtggtgatcgccctcatctacttcctgccgctcgcggtgatgtttgtagcctacagcgtcatcggcctcacgctctggaggcgcgcagtgcccggacatcaggcgcacggtgccaacctgcgccacctgcaggccatgaagaagtttgtgaagaccatggtgctggtggtgctgacgtttgccatctgctggctgccctaccacctctacttcatcctgggcagcttccaggaggacatctactgccacaagttcatccagcaagtctacctggcactcttctggttggccatgagctctaccatgtacaatcccatcatctactgctgtctcaaccacaggtttcgctctggattccggcttgccttccgctgctgcccatgggtcacacccaccaaggaagataagctcgagctgactcccacgacctccctctccacgagagtcaacaggtgtcacactaaggagactttgttcatggctggggacacagccccctccgaggctaccagtggggaggcggggcgtccccaggatggatcagggctatggtttgggtatggtttgcttgcccccaccaaaactcatgttgaaatttgatcccaatgtggcagtgttgggaggtaggggttagtgggaggtgtttgggtattggggatggatcccttatgaatagattaatgccttccagttgaagtgaatcatcactcttgtgggaatggactagttcccaaaataacaagttgttagaaagagtgtggtgtcctcagtttccctgtcttgcttcctctctcaccatgtgatctctttgcacacaacacttcccttccactttccaccatgacaagaagcagcctgaggccttcaccagatgcagctgcccaatcttggatattccagccaccagaatcatgagccaaataaacctcttttctttataaattacctagtctcaggtattccatgaaagcaacacaaatggactgagataggtgcctattgaaccctgaagccttgtgcctggctgcagaatgaggtgtagcaccctttgagaagtagccaatcgagaagaccacatctgaaagttcagctcatgccccatccttcagtataccaatacaaagacaacatggggccagaactccagaaaggatgctgactttaagaggactcagccacccatctcagagagcacttcagaggatccagtaagggtcagaaaagacagtgtaagctgatatttatctaatttaagagatgcaagctcaaatgccttcctggggcatacaagaatatgtataaaagaaaaactgcaaatgtgatgataaaaggcaactgacttccaccctcagtttgagctaatagggaatggtgggggccatggcaacctggagaggacaggcattcaaaggggacaagaactactcagctctggacaaacgttgccacatgataatgggagcccactgttgctagatcttctaaatctttcaagagaagctataaatccacatttgtatgtg

SEQ ID NO: 30893 - DNA, 5190 bp, Homo sapiens
  source 1..5190: mol_type = unassigned DNA
attgcagtatctttcagcttccagtcttatctgaagactccggcaccaaagtgaccaggaggcagagaagaacttcagaggagtctcgtcttgggctgcccgtgggtgagtgggagggtccgggactgcagaccggtggcgatggccactctcccagcagcagaaacctggatagacgggggtggaggcgtgggtgcagacgccgtgaacctgaccgcctcgctagctgccggggcggccacgggggcagttgagactgggtggctgcaactgctggaccaagctggcaacctctcctcctccccttccgcgctgggactgcctgtggcttcccccgcgccctcccagccctgggccaacctcaccaaccagttcgtgcagccgtcctggcgcatcgcgctctggtccctggcgtatggtgtggtggtggcagtggcagttttgggaaatctcatcgtcatctggatcatcctggcccacaagcgcatgaggactgtcaccaactacttccttgtgaacctggctttctccgacgcctccatggccgccttcaacacgttggtcaatttcatctacgcgcttcatagcgagtggtactttggcgccaactactgccgcttccagaacttctttcctatcacagctgtgttcgccagcatctactccatgacggccattgcggtggacaggtatatggctattattgatcccttgaaacccagactgtctgctacagcaaccaagattgtcattggaagtatttggattctagcatttctacttgccttccctcagtgtctttattccaaaaccaaagtcatgccaggccgtactctctgctttgtgcaatggccagaaggtcccaaacaacatttcacttaccatattatcgtcattatactggtgtactgtttcccattgctcatcatgggtattacatacaccattgttggaattactctctggggaggagaaatcccaggagatacctgtgacaagtatcatgagcagctaaaggccaaaagaaaggttgtcaaaatgatgattattgttgtcatgacatttgctatctgctggctgccctatcatatttacttcattctcactgcaatctatcaacaactaaatagatggaaatacatccagcaggtctacctggctagcttttggctggcaatgagctcaaccatgtacaatcccatcatctactgctgtctgaataaaagatttcgagctggcttcaagagagcatttcgctggtgtcctttcatcaaagtttccagctatgatgagctagagctcaagaccaccaggtttcatccaaaccggcaaagcagtatgtacaccgtgaccagaatggagtccatgacagtcgtgtttgaccccaacgatgcagacaccaccaggtccagtcggaagaaaagagcaacgccaagagacccaagtttcaatggctgctctcgcaggaattccaaatctgcctccgccacttcaagtttcataagctcaccctatacctctgtggatgaatattcttaattccatttcctgaggtaaaagattagtgtgagaccatcatggtgccagtctaggaccccattctcctatttaccagtcctgtcctatataccctctagaaacagaaagcaatttttaggcagctatggtcaaattgagaaaggtagtgtataaatgtgacaaagacactaataacatgttagcctccacccaaaataaaatgggctttaaatttattctttgaaaactctaaattattatatgcaatgaacaaaaatatgtcaggaaaatacttgtaaactcgccagtctatctcatttacaaattgcaatatacatttgtgacattaaaatgatatatagtttttccaagagattaaagaatctttaaaacataatattgtaagtgaagggaaacaaaatctgtataaaatctgtataaaataggcttttttgcctagagatataaaatgggaaaaaaagttaaatgattcattttcccactagagtaatggaaaattaacctcaagaagtaggaactgaaaatctttgctcaagaaaactcattttgtagaatgtaaagatttaaagatttaaagatttcttccatggcatttaactgaaaaggaaatctagttaaatcattaggcaaatgtatatttcattctcttgattttttttctgagaaagtgaaattttaaaaaattatatactttttgaccattacttatttttgaataccaagctaaaaagtagtcagttaagaccctaaaaatatgaagaaaattcctatcattttttatttttcacagattttttaaatagctagattataaaacagtaaaggtacattccaataaatagaggaagaatactatttatgttctcttcctctcccctcactgaaaatagaataaggactaggagaaaatatcttcaaaggcaactccttagggaaaaaaagtcacaagtgtgacaaaagactatatggttgaaaaataccaatatatgttacatatgagtaaactaggcaaggtgtagacaagtgaattacctcttagaaaacgaatctgcacaatagtttggatacatgtaaactaataacagctgagcaagagggtgagtttaacacacatccttccacagaaagaccttttctttcatttgcttagattattcagaagtcttaccagaaagaaatgagataatagtcctaagaaagcatcacatttactacaagaagatatatactagcacatttctgagactcataacataacaagaaatacttttaagtgtaaaaagtaacatccaggcctcagtgcttacagatcatctttccttgaattagggatactgttaatcctgctcaagaaagcagaaactttttgagaatgtgaatgtgtagtacaaacttctcctttaaactcttcagtttgatttttaaagatatttgtctaaaataatactctctaacaaacactttactgttgtgcctccaccgatattaaaacaaaatatttttgaagaacagaataaaagcaaatattcaatggcaaatcatggtctatttctcaaatctcttccctattttgaagccaaaaccagaaatatccaattgttacaaaaagttcggagtctaaacaagctaaacatatgtgttccagctgaatttcttctgatgataccaataaacaaagagacacacacacacacacacacacatacaaatgtgcctacacattcaatcatttaatgaatgcaacaacttcaaagaattaaaatcaaatactgaaatgataagtggtcattacagcattgccatatgctcaataaagtctgtgaagcttgtgtgcatgttttaaataagcaaatttaatatatagtatctaattgtttgaatataatgtttttgaatgttcattcttaaaacatatatttatcatacaatgttaaagtgtcaagaaaaagcctaatatgtaaaaagttattattttcttaaatttatgaatgatatggtactagcattaattaatgttttagacatatggaaccatattcagctgtaaaatatgaatatgaagtttagccctcaaatttaatgtcatcagccactaccaaagtatcatacatttgaaaaatataactcctggccctcacatattagagaaattcagtagaattttctaagacatttatttctaaggaaaaatactggcctcgtcagttggattgttggtttgctttggcttctgtgaacatacatattgttgtgttgcttaccgagcacctcccttctagtgtgacagaaatacccagacagtattttttcaatgctttccagaaaaaaactggcatcattcactcactactcatggcccttaaactgagacctataggcagaattttttaagttcaaaaatttaaacgacaataataaaacaagagtgaaatataaaagagaagatttttcactcttttgtctgcattttgacaataagaattacagaataatgcacaaaatcaaattcagtgagattcatttttaaataaagtcatcccagtgttttcatatttgctaagcttggaaagaatctgccttcaaaatttactctaccctctgtttctaaagttcagtatgaatctttccattgtttgaaggcaaacactggctcagactactaggcagatggttaaaacagcccaggtttttttacttagatcagtatcagaaaaattcaaaatatttttaaacaaatatgaaagaatcaaaaaggcttacatcattgtaagtattctcttttaaacaaaatacattaaatcaaaaataaacattgcttactattttgcatctggacaaagtacaagatattgaaattacctgtatgggaaaatattaaagcggacataattgttacagaattcactctcacacttttttattttttaccaagtacagcacactgttgcattattccatcttctaacttcatgatggtgacatttctgacccagcagctgaattcatgtccttttccaaatcctgccaatgtcttagaaacagtgaactgagcaatttcagagtgaaccccgcccttacaaagcacataaagaataccaagaagcttggtatcaagcctatgaaatacaaaataaatgtgaaaaataaatgctggccagctcaacatttgaatttagtttttgcaaatgcaaaatttcctctaaaaatttatgattagtacctggtaaactatttcatcaaatagaaaagcaggagacttacaaacatttctcacacttctaacagtaacaatttcctacttatcattgataatatgtcaaaagctaaggaaatccagaatgacatggaccatgtagaacaataaggttggaataatttcccttagggccaagcaggaatagagaataaagttcagaagggctgtacaaggtcattagttttgtgttttcatacatatatatatatatatgaaaaatctgtttatataagaagtaaatgtatataaagtttgtagtgaataaagtattttcaagttgtggtaattatattgaatatgtttaatgtatttacaccctttgcatatgtgataatgtgacagatttaatttctattttttctttaaaaacattaaaactaatattaaaagtaaaa

SEQ ID NO: 30894 - DNA, 5692 bp, Homo sapiens
  source 1..5692: mol_type = unassigned DNA
tttccggtctatgggacccggctgcgatttgctgctgcggacagcagctaccatcactgctgccgccatcatgtcagacacggacagcgacgaagattccgctggaggcggcccattttctttagcgggtttccttttcggcaacatcaatggagccgggcagctggagggggaaagcgtcttggatgatgaatgtaagaagcacttggcaggcttgggggctttggggctgggcagcctgatcactgaactcacggcaaatgaagaattgaccgggactgacggtgccttggtaaatgatgaagggtgggttaggagtacagaagatgctgtggactattcagacatcaatgaggtggcagaagatgaaagccgaagataccagcagacgatggggagcttgcagcccctttgccactcagattatgatgaagatgactatgatgctgattgtgaagacattgattgcaagttgatgcctcctccacctccacccccgggaccaatgaagaaggataaggaccaggattctattactggtgtgtctgaaaatggagaaggcatcatcttgccctccatcattgccccttcctctttggcctcagagaaagtggacttcagtagttcctctgactcagaatctgagatgggacctcaggaagcaacacaggcagaatctgaagatggaaagctgacccttccattggctgggattatgcagcatgatgccaccaagctgttgccaagtgtcacagaactttttccagaatttcgacctggaaaggtgttacgttttctacgtctttttggaccagggaagaatgtcccatctgtttggcggagtgctcggagaaagaggaagaagaagcaccgtgagctgatacaggaagagcagatccaggaggtggagtgctcagtagaatcagaagtcagccagaagtctttgtggaactacgactacgctccaccaccacctccagagcagtgtctctctgatgatgaaatcacgatgatggctcctgtggagtccaaattttcccaatcaactggagatatagataaagtgacagataccaaaccaagagtggctgagtggcgttatgggcctgcccgactgtggtatgatatgctgggtgtccctgaagatggcagtgggtttgactatggcttcaaactgagaaagacagaacatgaacctgtgataaaatctagaatgatagaggaatttaggaaacttgaggaaaacaatggcactgatcttctggctgatgaaaacttcctgatggtgacacagctgcattgggaggatgatatcatctgggatggggaggatgtcaaacacaaagggacaaaacctcagcgtgcaagcctggcaggctggcttccttctagcatgactaggaatgcgatggcttacaatgttcagcaaggttttgcagccactcttgatgatgacaaaccttggtactccatttttcccattgacaatgaggatctggtatatggacgctgggaggacaatatcatttgggatgctcaggccatgccccggctgttggaacctcctgttttgacacttgatcccaatgatgagaacctcattttggaaattcctgatgagaaggaagaggccacctctaactccccctccaaggagagtaagaaggaatcatctctgaagaagagtcgaattctcttagggaaaacaggagtcatcaaggaggaaccacagcagaacatgtctcagccagaagtgaaagatccatggaatctctccaatgatgagtattattatcccaagcaacagggtcttcgaggcacctttggagggaatattatccagcattcaattcctgctgtggaattacggcagcccttctttcccacccacatggggcccatcaaactccggcagttccatcgcccacctctgaaaaagtactcatttggtgcactttctcagccaggtccccactcagtccaacctttgctaaagcacatcaaaaaaaaggccaagatgagagaacaagagaggcaagcttcaggtggtggagagatgttttttatgcgcacacctcaggacctcacaggcaaagatggtgatcttattcttgcagaatatagtgaggaaaatggacccttaatgatgcaggttggcatggcaaccaagataaagaactattataaacggaaacctggaaaagatcctggagcaccagattgtaaatatggggaaactgtttactgccatacatctcctttcctgggttctctccatcctggccaattgctgcaagcatttgagaacaacctttttcgtgctccaatttatcttcataagatgccagaaactgatttcttgatcattcggacaagacagggttactatattcgggaattagtggatatttttgtggttggccagcagtgtcccttgtttgaagttcctgggcctaactccaaaagggccaatacgcatattcgagactttctacaggtttttatttaccgccttttctggaaaagtaaagatcggccacggaggatacgaatggaagatataaaaaaagcctttccttcccattcagaaagcagcatccggaagaggctaaagctctgcgctgacttcaaacgcacagggatggactcaaactggtgggtgcttaagtctgattttcgtttaccaacggaagaagagatcagagctatggtgtcaccagagcagtgctgtgcttattatagcatgatagctgcagagcaacgactgaaggatgctggctatggtgagaaatccttttttgctccagaagaagaaaatgaggaagatttccagatgaagattgatgatgaagttcgcactgccccttggaacaccacaagggccttcattgctgccatgaagggcaagtgtctgctagaggtgactggggtggcagatcccacggggtgtggtgaaggattctcctatgtgaagattccaaacaaaccaacacagcagaaggatgataaagaaccgcagccagtgaagaagacagtgacaggaacagatgcagaccttcgtcgcctttccctgaaaaatgccaagcaacttctacgtaaatttggtgtgcctgaggaagagattaaaaagttgtcccgctgggaagtgattgatgtggtgcgcacaatgtcaacagaacaggctcgttctggagaggggcccatgagtaaatttgcccgtggatcaaggttttctgtggctgagcatcaagagcgttacaaagaggaatgtcagcgcatctttgacctacagaacaaggttctgtcatcaactgaagtcttatcaactgacacagacagcagctcagctgaagatagtgactttgaagaaatgggaaagaacattgagaacatgttgcagaacaagaaaaccagctctcagctttcacgtgaacgggaggaacaggagcggaaggaactacagcgaatgctactggcagcaggctcagcagcatccggaaacaatcacagagatgatgacacagcttccgtgactagccttaactcttctgccactggacgctgtctcaagatttatcgcacgtttcgagatgaagaggggaaagagtatgttcgctgtgagacagtccgaaaaccagctgtcattgatgcctatgtgcgcatacggactacaaaagatgaggaattcattcgaaaatttgccctttttgatgaacaacatcgggaagagatgcgaaaagaacggcggaggattcaagagcaactgaggcggcttaagaggaaccaggaaaaggagaagcttaagggtcctcctgagaagaagcccaagaaaatgaaggagcgtcctgacctaaaactgaaatgtggggcatgtggtgccattggacacatgaggactaacaaattctgccccctctattatcaaacaaatgcgccaccttccaaccctgttgccatgacagaagaacaggaggaggagttggaaaagacagtcattcataatgataatgaagaacttatcaaggttgaagggaccaaaattgtcttggggaaacagctaattgagagtgcggatgaggttcgcagaaaatctctggttctcaagtttcctaaacagcagcttcctccaaagaagaaacggcgagttggaaccactgttcactgtgactatttgaatagacctcataagtccatccaccggcgccgcacagaccctatggtgacgctgtcgtccatcttggagtctatcatcaatgacatgagagatcttccaaatacataccctttccacactccagtcaatgcaaaggttgtaaaggactactacaaaatcatcactcggccaatggacctacaaacactccgcgaaaacgtgcgtaaacgcctctacccatctcgggaagagttcagagagcatctggagctaattgtgaaaaatagtgcaacctacaatgggccaaaacactcattgactcagatctctcaatccatgctggatctctgtgatgaaaaactcaaagagaaagaagacaaattagctcgcttagagaaagctatcaaccccttgctggatgatgatgaccaagtggcgttttctttcattctggacaacattgtcacccagaaaatgatggcagttccagattcttggccatttcatcacccagttaataagaaatttgttccagattattacaaagtgattgtcaatccaatggatttagagaccatacgtaagaacatctccaagcacaagtatcagagtcgggagagctttctggatgatgtaaaccttattctggccaacagtgttaagtataatggacctgagagtcagtatactaagactgcccaggagattgtgaacgtctgttaccagacattgactgagtatgatgaacatttgactcaacttgagaaggatatttgtactgctaaagaagcagctttggaggaagcagaattagaaagcctggacccaatgaccccagggccctacacgcctcagcctcctgatttgtatgataccaacacatccctcagtatgtctcgagatgcctctgtatttcaagatgagagcaatatgtctgtcttggatattcccagtgccactccagaaaagcaggtaacacaggaaggtgaagatggagatggtgatcttgcagatgaagaggaaggaactgtacaacagcctcaagccagtgtcctgtatgaggatttgcttatgtctgaaggagaagatgatgaggaagatgctgggagtgatgaagaaggagacaatcctttctctgctatccagctgagtgaaagtggaagtgactctgatgtgggatctggtggaataagacccaaacaaccccgcatgcttcaggagaacacaaggatggacatggaaaatgaagaaagcatgatgtcctatgagggagacggtggggaggcttcccatggtttggaggatagcaacatcagttatgggagctatgaggagcctgatcccaagtcgaacacccaagacacaagcttcagcagcatcggtgggtatgaggtatcagaggaggaagaagatgaggaggaggaagagcagcgctctgggccgagcgtactaagccaggtccacctgtcagaggacgaggaggacagtgaggatttccactccattgctggggacagtgacttggactctgatgaatga

SEQ ID NO: 30895 - DNA, 7629 bp, Homo sapiens
  source 1..7629: mol_type = unassigned DNA
aagggagctcagtaagtcacttctgggcgactgttgttttatttccggtctatgggacccggctgcgatttgctgctgcggacagcagctaccatcactgctgccgccatcatgtcagacacggacagcgacgaagattccgctggaggcggcccattttctttagcgggtttccttttcggcaacatcaatggagccgggcagctggagggggaaagcgtcttggatgatgaatgtaagaagcacttggcaggcttgggggctttggggctgggcagcctgatcactgaactcacggcaaatgaagaattgaccgggactgacggtgccttggtaaatgatgaagggtgggttaggagtacagaagatgctgtggactattcagacatcaatgaggtggcagaagatgaaagccgaagataccagcagacgatggggagcttgcagcccctttgccactcagattatgatgaagatgactatgatgctgattgtgaagacattgattgcaagttgatgcctcctccacctccacccccgggaccaatgaagaaggataaggaccaggattctattactggtgagaaagtggacttcagtagttcctctgactcagaatctgagatgggacctcaggaagcaacacaggcagaatctgaagatggaaagctgacccttccattggctgggattatgcagcatgatgccaccaagctgttgccaagtgtcacagaactttttccagaatttcgacctggaaaggtgttacgttttctacgtctttttggaccagggaagaatgtcccatctgtttggcggagtgctcggagaaagaggaagaagaagcaccgtgagctgatacaggaagagcagatccaggaggtggagtgctcagtagaatcagaagtcagccagaagtctttgtggaactacgactacgctccaccaccacctccagagcagtgtctctctgatgatgaaatcacgatgatggctcctgtggagtccaaattttcccaatcaactggagatatagataaagtgacagataccaaaccaagagtggctgagtggcgttatgggcctgcccgactgtggtatgatatgctgggtgtccctgaagatggcagtgggtttgactatggcttcaaactgagaaagacagaacatgaacctgtgataaaatctagaatgatagaggaatttaggaaacttgaggaaaacaatggcactgatcttctggctgatgaaaacttcctgatggtgacacagctgcattgggaggatgatatcatctgggatggggaggatgtcaaacacaaagggacaaaacctcagcgtgcaagcctggcaggctggcttccttctagcatgactaggaatgcgatggcttacaatgttcagcaaggttttgcagccactcttgatgatgacaaaccttggtactccatttttcccattgacaatgaggatctggtatatggacgctgggaggacaatatcatttgggatgctcaggccatgccccggctgttggaacctcctgttttgacacttgatcccaatgatgagaacctcattttggaaattcctgatgagaaggaagaggccacctctaactccccctccaaggagagtaagaaggaatcatctctgaagaagagtcgaattctcttagggaaaacaggagtcatcaaggaggaaccacagcagaacatgtctcagccagaagtgaaagatccatggaatctctccaatgatgagtattattatcccaagcaacagggtcttcgaggcacctttggagggaatattatccagcattcaattcctgctgtggaattacggcagcccttctttcccacccacatggggcccatcaaactccggcagttccatcgcccacctctgaaaaagtactcatttggtgcactttctcagccaggtccccactcagtccaacctttgctaaagcacatcaaaaaaaaggccaagatgagagaacaagagaggcaagcttcaggtggtggagagatgttttttatgcgcacacctcaggacctcacaggcaaagatggtgatcttattcttgcagaatatagtgaggaaaatggacccttaatgatgcaggttggcatggcaaccaagataaagaactattataaacggaaacctggaaaagatcctggagcaccagattgtaaatatggggaaactgtttactgccatacatctcctttcctgggttctctccatcctggccaattgctgcaagcatttgagaacaacctttttcgtgctccaatttatcttcataagatgccagaaactgatttcttgatcattcggacaagacagggttactatattcgggaattagtggatatttttgtggttggccagcagtgtcccttgtttgaagttcctgggcctaactccaaaagggccaatacgcatattcgagactttctacaggtttttatttaccgccttttctggaaaagtaaagatcggccacggaggatacgaatggaagatataaaaaaagcctttccttcccattcagaaagcagcatccggaagaggctaaagctctgcgctgacttcaaacgcacagggatggactcaaactggtgggtgcttaagtctgattttcgtttaccaacggaagaagagatcagagctatggtgtcaccagagcagtgctgtgcttattatagcatgatagctgcagagcaacgactgaaggatgctggctatggtgagaaatccttttttgctccagaagaagaaaatgaggaagatttccagatgaagattgatgatgaagttcgcactgccccttggaacaccacaagggccttcattgctgccatgaagggcaagtgtctgctagaggtgactggggtggcagatcccacggggtgtggtgaaggattctcctatgtgaagattccaaacaaaccaacacagcagaaggatgataaagaaccgcagccagtgaagaagacagtgacaggaacagatgcagaccttcgtcgcctttccctgaaaaatgccaagcaacttctacgtaaatttggtgtgcctgaggaagagattaaaaagttgtcccgctgggaagtgattgatgtggtgcgcacaatgtcaacagaacaggctcgttctggagaggggcccatgagtaaatttgcccgtggatcaaggttttctgtggctgagcatcaagagcgttacaaagaggaatgtcagcgcatctttgacctacagaacaaggttctgtcatcaactgaagtcttatcaactgacacagacagcagctcagctgaagatagtgactttgaagaaatgggaaagaacattgagaacatgttgcagaacaagaaaaccagctctcagctttcacgtgaacgggaggaacaggagcggaaggaactacagcgaatgctactggcagcaggctcagcagcatccggaaacaatcacagagatgatgacacagcttccgtgactagccttaactcttctgccactggacgctgtctcaagatttatcgcacgtttcgagatgaagaggggaaagagtatgttcgctgtgagacagtccgaaaaccagctgtcattgatgcctatgtgcgcatacggactacaaaagatgaggaattcattcgaaaatttgccctttttgatgaacaacatcgggaagagatgcgaaaagaacggcggaggattcaagagcaactgaggcggcttaagaggaaccaggaaaaggagaagcttaagggtcctcctgagaagaagcccaagaaaatgaaggagcgtcctgacctaaaactgaaatgtggggcatgtggtgccattggacacatgaggactaacaaattctgccccctctattatcaaacaaatgcgccaccttccaaccctgttgccatgacagaagaacaggaggaggagttggaaaagacagtcattcataatgataatgaagaacttatcaaggttgaagggaccaaaattgtcttggggaaacagctaattgagagtgcggatgaggttcgcagaaaatctctggttctcaagtttcctaaacagcagcttcctccaaagaagaaacggcgagttggaaccactgttcactgtgactatttgaatagacctcataagtccatccaccggcgccgcacagaccctatggtgacgctgtcgtccatcttggagtctatcatcaatgacatgagagatcttccaaatacataccctttccacactccagtcaatgcaaaggttgtaaaggactactacaaaatcatcactcggccaatggacctacaaacactccgcgaaaacgtgcgtaaacgcctctacccatctcgggaagagttcagagagcatctggagctaattgtgaaaaatagtgcaacctacaatgggccaaaacactcattgactcagatctctcaatccatgctggatctctgtgatgaaaaactcaaagagaaagaagacaaattagctcgcttagagaaagctatcaaccccttgctggatgatgatgaccaagtggcgttttctttcattctggacaacattgtcacccagaaaatgatggcagttccagattcttggccatttcatcacccagttaataagaaatttgttccagattattacaaagtgattgtcaatccaatggatttagagaccatacgtaagaacatctccaagcacaagtatcagagtcgggagagctttctggatgatgtaaaccttattctggccaacagtgttaagtataatggacctgagagtcagtatactaagactgcccaggagattgtgaacgtctgttaccagacattgactgagtatgatgaacatttgactcaacttgagaaggatatttgtactgctaaagaagcagctttggaggaagcagaattagaaagcctggacccaatgaccccagggccctacacgcctcagcctcctgatttgtatgataccaacacatccctcagtatgtctcgagatgcctctgtatttcaagatgagagcaatatgtctgtcttggatattcccagtgccactccagaaaagcaggtaacacaggaaggtgaagatggagatggtgatcttgcagatgaagaggaaggaactgtacaacagcctcaagccagtgtcctgtatgaggatttgcttatgtctgaaggagaagatgatgaggaagatgctgggagtgatgaagaaggagacaatcctttctctgctatccagctgagtgaaagtggaagtgactctgatgtgggatctggtggaataagacccaaacaaccccgcatgcttcaggagaacacaaggatggacatggaaaatgaagaaagcatgatgtcctatgagggagacggtggggaggcttcccatggtttggaggatagcaacatcagttatgggagctatgaggagcctgatcccaagtcgaacacccaagacacaagcttcagcagcatcggtgggtatgaggtatcagaggaggaagaagatgaggaggaggaagagcagcgctctgggccgagcgtactaagccaggtccacctgtcagaggacgaggaggacagtgaggatttccactccattgctggggacagtgacttggactctgatgaatgaggcttcctttgggcctccttggtcagccttccctgttctccagcctaggtggttcacctttccccaatttgttcatatttgtacagtatctgatcctgaaatcatgaaattaactaacaccttagcctttttaaaagtagtaagtaaatgataataaatcacctctcctaatcttcctggggcaatgtcaccctttgatttaaaacaaagcaaccccctttcccctaccactacggaaaagagcaagctcatttttccgtgtcctcctttatttaactccatttattgcttttggtataatttttccctggggaaggaggggaaattatgaaagaactagtaactttatgtcctcttgatgtattaggaaatttccggccaggcgtggtggctcacacctgtaatctcagcactctgggaggccgaggcgggcagatcacctgaggtcagaagttcgagaccagcttggccaacatggcgaaaccgcatctctactaaaaatacaaaaattagccaggtgtggtggcgtatgcctgttaatcctagctactcgggaggctgaggcaggagaattacttgaacccgggaggcagaggttgcagtgagtggaggtcacgccactgcactccagcctgggcgaaagagtgagattcagtctcaaaaaaaaaaaaatttccaagcatggtatcatctcacttttctaatttacaggctggagcagatgagagccctcctgctgggacagagaattgggttctagtggactctgtgctacacttaaacctgtgagacaaaccgcccattattttattatttaattatgcaatgcctagttcctaaatggattggaggcaaattaccgtaaattttgaaacagcctatatgtcagaaatgataatgttgccacctaaatgttttctgtcccccccaccctccccaggggaaatggtaggaaaatggtaagtttcttagggcaaagactgtgtcttctgtttcttttcatgcttaggatatggttctgtgcatagtaggtactcagtaaatgttcctagaatcataaaatcctcaacagatatgttactgagcatctgcttttcatgataagcactctatcagatccttgggatgcaaaggtaaataagacaaatcccttttacccaaagagctcaccatcaagttgggggagggaaagtggaattcaaaacatgttaataaatcatcatagtactgtgagataagtgcaattaagaagctagttataaagtataggggaaatagaggagtaatcatgtctgaaaagtcaggaaagtcttcctagaggtaatttttaagctgattgttttagaattagtagaagcttgccagatggaaaagtccaggcaaagtgtaacatgaatgggaaaggccacagtctagaaatggcagagtgtgttcctagtttgtttgtttgtttgtttgtacctgccttgttccaggaaggatttaatgtggtttatattccagtcctttaatgctggaagggctgagatgagactgaaagatgggcaggaagtatatcatcacaagctttgtgtttgatgttaatgtgtatgatttttatattatgggaaataagctcttagaggagtgatataatcaggtttgtgttttagaaatctgtgtaatgaatgaatgaagaaagaaattgaagaatcatgtaacatatgtgatcgcatttttgtaaaagaaccatgtgtgtttatatgtgtttatatatatacttgtgtatgcaaaggtaaaagtctgaaaggatatatgctaactgttcacaatgataaccccccaggaatgggattggaggggagggggcttctgtgtttgttatgtatgctgggtgggatattgtgcttttatttctatattgtttgaatttttttacagtatgtattatttttgtaataaaaattttaaaaaattcca

SEQ ID NO: 30896 - DNA, 5625 bp, Homo sapiens
  source 1..5625: mol_type = unassigned DNA
aagggagctcagtaagtcacttctgggcgactgttgttttatttccggtctatgggacccggctgcgatttgctgctgcggacagcagctaccatcactgctgccgccatcatgtcagacacggacagcgacgaagattccgctggaggcggcccattttctttagcgggtttccttttcggcaacatcaatggagccgggcagctggagggggaaagcgtcttggatgatgaatgtaagaagcacttggcaggcttgggggctttggggctgggcagcctgatcactgaactcacggcaaatgaagaattgaccgggactgacggtgccttggtaaatgatgaagggtgggttaggagtacagaagatgctgtggactattcagacatcaatgaggtggcagaagatgaaagccgaagataccagcagacgatggggagcttgcagcccctttgccactcagattatgatgaagatgactatgatgctgattgtgaagacattgattgcaagttgatgcctcctccacctccacccccgggaccaatgaagaaggataaggaccaggattctattactggtgtgtctgaaaatggagaaggcatcatcttgccctccatcattgccccttcctctttggcctcagagaaagtggacttcagtagttcctctgactcagaatctgagatgggacctcaggaagcaacacaggcagaatctgaagatggaaagctgacccttccattggctgggattatgcagcatgatgccaccaagctgttgccaagtgtcacagaactttttccagaatttcgacctggaaaggtgttacgttttctacgtctttttggaccagggaagaatgtcccatctgtttggcggagtgctcggagaaagaggaagaagaagcaccgtgagctgatacaggaagagcagatccaggaggtggagtgctcagtagaatcagaagtcagccagaagtctttgtggaactacgactacgctccaccaccacctccagagcagtgtctctctgatgatgaaatcacgatgatggctcctgtggagtccaaattttcccaatcaactggagatatagataaagtgacagataccaaaccaagagtggctgagtggcgttatgggcctgcccgactgtggtatgatatgctgggtgtccctgaagatggcagtgggtttgactatggcttcaaactgagaaagacagaacatgaacctgtgataaaatctagaatgatagaggaatttaggaaacttgaggaaaacaatggcactgatcttctggctgatgaaaacttcctgatggtgacacagctgcattgggaggatgatatcatctgggatggggaggatgtcaaacacaaagggacaaaacctcagcgtgcaagcctggcaggctggcttccttctagcatgactaggaatgcgatggcttacaatgttcagcaaggttttgcagccactcttgatgatgacaaaccttggtactccatttttcccattgacaatgaggatctggtatatggacgctgggaggacaatatcatttgggatgctcaggccatgccccggctgttggaacctcctgttttgacacttgatcccaatgatgagaacctcattttggaaattcctgatgagaaggaagaggccacctctaactccccctccaaggagagtaagaaggaatcatctctgaagaagagtcgaattctcttagggaaaacaggagtcatcaaggaggaaccacagcagaacatgtctcagccagaagtgaaagatccatggaatctctccaatgatgagtattattatcccaagcaacagggtcttcgaggcacctttggagggaatattatccagcattcaattcctgctgtggaattacggcagcccttctttcccacccacatggggcccatcaaactccggcagttccatcgcccacctctgaaaaagtactcatttggtgcactttctcagccaggtccccactcagtccaacctttgctaaagcacatcaaaaaaaaggccaagatgagagaacaagagaggcaagcttcaggtggtggagagatgttttttatgcgcacacctcaggacctcacaggcaaagatggtgatcttattcttgcagaatatagtgaggaaaatggacccttaatgatgcaggttggcatggcaaccaagataaagaactattataaacggaaacctggaaaagatcctggagcaccagattgtaaatatggggaaactgtttactgccatacatctcctttcctgggttctctccatcctggccaattgctgcaagcatttgagaacaacctttttcgtgctccaatttatcttcataagatgccagaaactgatttcttgatcattcggacaagacagggttactatattcgggaattagtggatatttttgtggttggccagcagtgtcccttgtttgaagttcctgggcctaactccaaaagggccaatacgcatattcgagactttctacaggtttttatttaccgccttttctggaaaagtaaagatcggccacggaggatacgaatggaagatataaaaaaagcctttccttcccattcagaaagcagcatccggaagaggctaaagctctgcgctgacttcaaacgcacagggatggactcaaactggtgggtgcttaagtctgattttcgtttaccaacggaagaagagatcagagctatggtgtcaccagagcagtgctgtgcttattatagcatgatagctgcagagcaacgactgaaggatgctggctatggtgagaaatccttttttgctccagaagaagaaaatgaggaagatttccagatgaagattgatgatgaagttcgcactgccccttggaacaccacaagggccttcattgctgccatgaagggcaagtgtctgctagaggtgactggggtggcagatcccacggggtgtggtgaaggattctcctatgtgaagattccaaacaaaccaacacagcagaaggatgataaagaaccgcagccagtgaagaagacagtgacaggaacagatgcagaccttcgtcgcctttccctgaaaaatgccaagcaacttctacgtaaatttggtgtgcctgaggaagagattaaaaagttgtcccgctgggaagtgattgatgtggtgcgcacaatgtcaacagaacaggctcgttctggagaggggcccatgagtaaatttgcccgtggatcaaggttttctgtggctgagcatcaagagcgttacaaagaggaatgtcagcgcatctttgacctacagaacaaggttctgtcatcaactgaagtcttatcaactgacacagacagcagctcagctgaagatagtgactttgaagaaatgggaaagaacattgagaacatgttgcagaacaagaaaaccagctctcagctttcacgtgaacgggaggaacaggagcggaaggaactacagcgaatgctactggcagcaggctcagcagcatccggaaacaatcacagagatgatgacacagcttccgtgactagccttaactcttctgccactggacgctgtctcaagatttatcgcacgtttcgagatgaagaggggaaagagtatgttcgctgtgagacagtccgaaaaccagctgtcattgatgcctatgtgcgcatacggactacaaaagatgaggaattcattcgaaaatttgccctttttgatgaacaacatcgggaagagatgcgaaaagaacggcggaggattcaagagcaactgaggcggcttaagaggaaccaggaaaaggagaagcttaagggtcctcctgagaagaagcccaagaaaatgaaggagcgtcctgacctaaaactgaaatgtggggcatgtggtgccattggacacatgaggactaacaaattctgccccctctattatcaaacaaatgcgccaccttccaaccctgttgccatgacagaagaacaggaggaggagttggaaaagacagtcattcataatgataatgaagaacttatcaaggttgaagggaccaaaattgtcttggggaaacagctaattgagagtgcggatgaggttcgcagaaaatctctggttctcaagtttcctaaacagcagcttcctccaaagaagaaacggcgagttggaaccactgttcactgtgactatttgaatagacctcataagtccatccaccggcgccgcacagaccctatggtgacgctgtcgtccatcttggagtctatcatcaatgacatgagagatcttccaaatacataccctttccacactccagtcaatgcaaaggttgtaaaggactactacaaaatcatcactcggccaatggacctacaaacactccgcgaaaacgtgcgtaaacgcctctacccatctcgggaagagttcagagagcatctggagctaattgtgaaaaatagtgcaacctacaatgggccaaaacactcattgactcagatctctcaatccatgctggatctctgtgatgaaaaactcaaagagaaagaagacaaattagctcgcttagagaaagctatcaaccccttgctggatgatgatgaccaagtggcgttttctttcattctggacaacattgtcacccagaaaatgatggcagttccagattcttggccatttcatcacccagttaataagaaatttgttccagattattacaaagtgattgtcaatccaatggatttagagaccatacgtaagaacatctccaagcacaagtatcagagtcgggagagctttctggatgatgtaaaccttattctggccaacagtgttaagtataatggacctgagagtcagtatactaagactgcccaggagattgtgaacgtctgttaccagacattgactgagtatgatgaacatttgactcaacttgagaaggatatttgtactgctaaagaagcagctttggaggaagcagaattagaaagcctggacccaatgaccccagggccctacacgcctcaggctaagcctcctgatttgtatgataccaacacatccctcagtatgtctcgagatgcctctgtatttcaagatgagagcaatatgtctgtcttggatattcccagtgccactccagaaaagcaggtaacacagatgcgccagggccgaggtaggctgggcgaggaagactctgatgtagatattgaagggtatgatgatgaggaggaggatgggaaacctaagactccagccccagaaggtgaagatggagatggtgatcttgcagatgaagaggaaggaactgtacaacagcctcaagccagtgtcctgtatgaggatttgcttatgtctgaaggagaagatgatgaggaagatgctgggagtgatgaagaaggagacaatcctttctctgctatccagctgagtgaaagtggaagtgactctgatgtgggatctggtggaataagacccaaacaaccccgcatgcttcaggagaacacaaggatggacatggaaaatgaagaaagcatgatgtcctatgagggagacggtggggaggcttcccatggtttggaggatagcaacatcagccatcaa

SEQ ID NO: 30897 - DNA, 7675 bp, Homo sapiens
  source 1..7675: mol_type = unassigned DNA
aagggagctcagtaagtcacttctgggcgactgttgttttatttccggtctatgggacccggctgcgatttgctgctgcggacagcagctaccatcactgctgccgccatcatgtcagacacggacagcgacgaagattccgctggaggcggcccattttctttagcgggtttccttttcggcaacatcaatggagccgggcagctggagggggaaagcgtcttggatgatgaatgtaagaagcacttggcaggcttgggggctttggggctgggcagcctgatcactgaactcacggcaaatgaagaattgaccgggactgacggtgccttggtaaatgatgaagggtgggttaggagtacagaagatgctgtggactattcagacatcaatgaggtggcagaagatgaaagccgaagataccagcagacgatggggagcttgcagcccctttgccactcagattatgatgaagatgactatgatgctgattgtgaagacattgattgcaagttgatgcctcctccacctccacccccgggaccaatgaagaaggataaggaccaggattctattactggtgtgtctgaaaatggagaaggcatcatcttgccctccatcattgccccttcctctttggcctcagagaaagtggacttcagtagttcctctgactcagaatctgagatgggacctcaggaagcaacacaggcagaatctgaagatggaaagctgacccttccattggctgggattatgcagcatgatgccaccaagctgttgccaagtgtcacagaactttttccagaatttcgacctggaaaggtgttacgttttctacgtctttttggaccagggaagaatgtcccatctgtttggcggagtgctcggagaaagaggaagaagaagcaccgtgagctgatacaggaagagcagatccaggaggtggagtgctcagtagaatcagaagtcagccagaagtctttgtggaactacgactacgctccaccaccacctccagagcagtgtctctctgatgatgaaatcacgatgatggctcctgtggagtccaaattttcccaatcaactggagatatagataaagtgacagataccaaaccaagagtggctgagtggcgttatgggcctgcccgactgtggtatgatatgctgggtgtccctgaagatggcagtgggtttgactatggcttcaaactgagaaagacagaacatgaacctgtgataaaatctagaatgatagaggaatttaggaaacttgaggaaaacaatggcactgatcttctggctgatgaaaacttcctgatggtgacacagctgcattgggaggatgatatcatctgggatggggaggatgtcaaacacaaagggacaaaacctcagcgtgcaagcctggcaggctggcttccttctagcatgactaggaatgcgatggcttacaatgttcagcaaggttttgcagccactcttgatgatgacaaaccttggtactccatttttcccattgacaatgaggatctggtatatggacgctgggaggacaatatcatttgggatgctcaggccatgccccggctgttggaacctcctgttttgacacttgatcccaatgatgagaacctcattttggaaattcctgatgagaaggaagaggccacctctaactccccctccaaggagagtaagaaggaatcatctctgaagaagagtcgaattctcttagggaaaacaggagtcatcaaggaggaaccacagcagaacatgtctcagccagaagtgaaagatccatggaatctctccaatgatgagtattattatcccaagcaacagggtcttcgaggcacctttggagggaatattatccagcattcaattcctgctgtggaattacggcagcccttctttcccacccacatggggcccatcaaactccggcagttccatcgcccacctctgaaaaagtactcatttggtgcactttctcagccaggtccccactcagtccaacctttgctaaagcacatcaaaaaaaaggccaagatgagagaacaagagaggcaagcttcaggtggtggagagatgttttttatgcgcacacctcaggacctcacaggcaaagatggtgatcttattcttgcagaatatagtgaggaaaatggacccttaatgatgcaggttggcatggcaaccaagataaagaactattataaacggaaacctggaaaagatcctggagcaccagattgtaaatatggggaaactgtttactgccatacatctcctttcctgggttctctccatcctggccaattgctgcaagcatttgagaacaacctttttcgtgctccaatttatcttcataagatgccagaaactgatttcttgatcattcggacaagacagggttactatattcgggaattagtggatatttttgtggttggccagcagtgtcccttgtttgaagttcctgggcctaactccaaaagggccaatacgcatattcgagactttctacaggtttttatttaccgccttttctggaaaagtaaagatcggccacggaggatacgaatggaagatataaaaaaagcctttccttcccattcagaaagcagcatccggaagaggctaaagctctgcgctgacttcaaacgcacagggatggactcaaactggtgggtgcttaagtctgattttcgtttaccaacggaagaagagatcagagctatggtgtcaccagagcagtgctgtgcttattatagcatgatagctgcagagcaacgactgaaggatgctggctatggtgagaaatccttttttgctccagaagaagaaaatgaggaagatttccagatgaagattgatgatgaagttcgcactgccccttggaacaccacaagggccttcattgctgccatgaagggcaagtgtctgctagaggtgactggggtggcagatcccacggggtgtggtgaaggattctcctatgtgaagattccaaacaaaccaacacagcagaaggatgataaagaaccgcagccagtgaagaagacagtgacaggaacagatgcagaccttcgtcgcctttccctgaaaaatgccaagcaacttctacgtaaatttggtgtgcctgaggaagagattaaaaagttgtcccgctgggaagtgattgatgtggtgcgcacaatgtcaacagaacaggctcgttctggagaggggcccatgagtaaatttgcccgtggatcaaggttttctgtggctgagcatcaagagcgttacaaagaggaatgtcagcgcatctttgacctacagaacaaggttctgtcatcaactgaagtcttatcaactgacacagacagcagctcagctgaagatagtgactttgaagaaatgggaaagaacattgagaacatgttgcagaacaagaaaaccagctctcagctttcacgtgaacgggaggaacaggagcggaaggaactacagcgaatgctactggcagcaggctcagcagcatccggaaacaatcacagagatgatgacacagcttccgtgactagccttaactcttctgccactggacgctgtctcaagatttatcgcacgtttcgagatgaagaggggaaagagtatgttcgctgtgagacagtccgaaaaccagctgtcattgatgcctatgtgcgcatacggactacaaaagatgaggaattcattcgaaaatttgccctttttgatgaacaacatcgggaagagatgcgaaaagaacggcggaggattcaagagcaactgaggcggcttaagaggaaccaggaaaaggagaagcttaagggtcctcctgagaagaagcccaagaaaatgaaggagcgtcctgacctaaaactgaaatgtggggcatgtggtgccattggacacatgaggactaacaaattctgccccctctattatcaaacaaatgcgccaccttccaaccctgttgccatgacagaagaacaggaggaggagttggaaaagacagtcattcataatgataatgaagaacttatcaaggttgaagggaccaaaattgtcttggggaaacagctaattgagagtgcggatgaggttcgcagaaaatctctggttctcaagtttcctaaacagcagcttcctccaaagaagaaacggcgagttggaaccactgttcactgtgactatttgaatagacctcataagtccatccaccggcgccgcacagaccctatggtgacgctgtcgtccatcttggagtctatcatcaatgacatgagagatcttccaaatacataccctttccacactccagtcaatgcaaaggttgtaaaggactactacaaaatcatcactcggccaatggacctacaaacactccgcgaaaacgtgcgtaaacgcctctacccatctcgggaagagttcagagagcatctggagctaattgtgaaaaatagtgcaacctacaatgggccaaaacactcattgactcagatctctcaatccatgctggatctctgtgatgaaaaactcaaagagaaagaagacaaattagctcgcttagagaaagctatcaaccccttgctggatgatgatgaccaagtggcgttttctttcattctggacaacattgtcacccagaaaatgatggcagttccagattcttggccatttcatcacccagttaataagaaatttgttccagattattacaaagtgattgtcaatccaatggatttagagaccatacgtaagaacatctccaagcacaagtatcagagtcgggagagctttctggatgatgtaaaccttattctggccaacagtgttaagtataatggacctgagagtcagtatactaagactgcccaggagattgtgaacgtctgttaccagacattgactgagtatgatgaacatttgactcaacttgagaaggatatttgtactgctaaagaagcagctttggaggaagcagaattagaaagcctggacccaatgaccccagggccctacacgcctcaggctaagcctcctgatttgtatgataccaacacatccctcagtatgtctcgagatgcctctgtatttcaagatgagagcaatatgtctgtcttggatattcccagtgccactccagaaaagcaggtaacacaggaaggtgaagatggagatggtgatcttgcagatgaagaggaaggaactgtacaacagcctcaagccagtgtcctgtatgaggatttgcttatgtctgaaggagaagatgatgaggaagatgctgggagtgatgaagaaggagacaatcctttctctgctatccagctgagtgaaagtggaagtgactctgatgtgggatctggtggaataagacccaaacaaccccgcatgcttcaggagaacacaaggatggacatggaaaatgaagaaagcatgatgtcctatgagggagacggtggggaggcttcccatggtttggaggatagcaacatcagttatgggagctatgaggagcctgatcccaagtcgaacacccaagacacaagcttcagcagcatcggtgggtatgaggtatcagaggaggaagaagatgaggaggaggaagagcagcgctctgggccgagcgtactaagccaggtccacctgtcagaggacgaggaggacagtgaggatttccactccattgctggggacagtgacttggactctgatgaatgaggcttcctttgggcctccttggtcagccttccctgttctccagcctaggtggttcacctttccccaatttgttcatatttgtacagtatctgatcctgaaatcatgaaattaactaacaccttagcctttttaaaagtagtaagtaaatgataataaatcacctctcctaatcttcctggggcaatgtcaccctttgatttaaaacaaagcaaccccctttcccctaccactacggaaaagagcaagctcatttttccgtgtcctcctttatttaactccatttattgcttttggtataatttttccctggggaaggaggggaaattatgaaagaactagtaactttatgtcctcttgatgtattaggaaatttccggccaggcgtggtggctcacacctgtaatctcagcactctgggaggccgaggcgggcagatcacctgaggtcagaagttcgagaccagcttggccaacatggcgaaaccgcatctctactaaaaatacaaaaattagccaggtgtggtggcgtatgcctgttaatcctagctactcgggaggctgaggcaggagaattacttgaacccgggaggcagaggttgcagtgagtggaggtcacgccactgcactccagcctgggcgaaagagtgagattcagtctcaaaaaaaaaaaaatttccaagcatggtatcatctcacttttctaatttacaggctggagcagatgagagccctcctgctgggacagagaattgggttctagtggactctgtgctacacttaaacctgtgagacaaaccgcccattattttattatttaattatgcaatgcctagttcctaaatggattggaggcaaattaccgtaaattttgaaacagcctatatgtcagaaatgataatgttgccacctaaatgttttctgtcccccccaccctccccaggggaaatggtaggaaaatggtaagtttcttagggcaaagactgtgtcttctgtttcttttcatgcttaggatatggttctgtgcatagtaggtactcagtaaatgttcctagaatcataaaatcctcaacagatatgttactgagcatctgcttttcatgataagcactctatcagatccttgggatgcaaaggtaaataagacaaatcccttttacccaaagagctcaccatcaagttgggggagggaaagtggaattcaaaacatgttaataaatcatcatagtactgtgagataagtgcaattaagaagctagttataaagtataggggaaatagaggagtaatcatgtctgaaaagtcaggaaagtcttcctagaggtaatttttaagctgattgttttagaattagtagaagcttgccagatggaaaagtccaggcaaagtgtaacatgaatgggaaaggccacagtctagaaatggcagagtgtgttcctagtttgtttgtttgtttgtttgtacctgccttgttccaggaaggatttaatgtggtttatattccagtcctttaatgctggaagggctgagatgagactgaaagatgggcaggaagtatatcatcacaagctttgtgtttgatgttaatgtgtatgatttttatattatgggaaataagctcttagaggagtgatataatcaggtttgtgttttagaaatctgtgtaatgaatgaatgaagaaagaaattgaagaatcatgtaacatatgtgatcgcatttttgtaaaagaaccatgtgtgtttatatgtgtttatatatatacttgtgtatgcaaaggtaaaagtctgaaaggatatatgctaactgttcacaatgataaccccccaggaatgggattggaggggagggggcttctgtgtttgttatgtatgctgggtgggatattgtgcttttatttctatattgtttgaatttttttacagtatgtattatttttgt

SEQ ID NO: 30898 - DNA, 7708 bp, Homo sapiens
  source 1..7708: mol_type = unassigned DNA
aagggagctcagtaagtcacttctgggcgactgttgttttatttccggtctatgggacccggctgcgatttgctgctgcggacagcagctaccatcactgctgccgccatcatgtcagacacggacagcgacgaagattccgctggaggcggcccattttctttagcgggtttccttttcggcaacatcaatggagccgggcagctggagggggaaagcgtcttggatgatgaatgtaagaagcacttggcaggcttgggggctttggggctgggcagcctgatcactgaactcacggcaaatgaagaattgaccgggactgacggtgccttggtaaatgatgaagggtgggttaggagtacagaagatgctgtggactattcagacatcaatgaggtggcagaagatgaaagccgaagataccagcagacgatggggagcttgcagcccctttgccactcagattatgatgaagatgactatgatgctgattgtgaagacattgattgcaagttgatgcctcctccacctccacccccgggaccaatgaagaaggataaggaccaggattctattactggtgagaaagtggacttcagtagttcctctgactcagaatctgagatgggacctcaggaagcaacacaggcagaatctgaagatggaaagctgacccttccattggctgggattatgcagcatgatgccaccaagctgttgccaagtgtcacagaactttttccagaatttcgacctggaaaggtgttacgttttctacgtctttttggaccagggaagaatgtcccatctgtttggcggagtgctcggagaaagaggaagaagaagcaccgtgagctgatacaggaagagcagatccaggaggtggagtgctcagtagaatcagaagtcagccagaagtctttgtggaactacgactacgctccaccaccacctccagagcagtgtctctctgatgatgaaatcacgatgatggctcctgtggagtccaaattttcccaatcaactggagatatagataaagtgacagataccaaaccaagagtggctgagtggcgttatgggcctgcccgactgtggtatgatatgctgggtgtccctgaagatggcagtgggtttgactatggcttcaaactgagaaagacagaacatgaacctgtgataaaatctagaatgatagaggaatttaggaaacttgaggaaaacaatggcactgatcttctggctgatgaaaacttcctgatggtgacacagctgcattgggaggatgatatcatctgggatggggaggatgtcaaacacaaagggacaaaacctcagcgtgcaagcctggcaggctggcttccttctagcatgactaggaatgcgatggcttacaatgttcagcaaggttttgcagccactcttgatgatgacaaaccttggtactccatttttcccattgacaatgaggatctggtatatggacgctgggaggacaatatcatttgggatgctcaggccatgccccggctgttggaacctcctgttttgacacttgatcccaatgatgagaacctcattttggaaattcctgatgagaaggaagaggccacctctaactccccctccaaggagagtaagaaggaatcatctctgaagaagagtcgaattctcttagggaaaacaggagtcatcaaggaggaaccacagcagaacatgtctcagccagaagtgaaagatccatggaatctctccaatgatgagtattattatcccaagcaacagggtcttcgaggcacctttggagggaatattatccagcattcaattcctgctgtggaattacggcagcccttctttcccacccacatggggcccatcaaactccggcagttccatcgcccacctctgaaaaagtactcatttggtgcactttctcagccaggtccccactcagtccaacctttgctaaagcacatcaaaaaaaaggccaagatgagagaacaagagaggcaagcttcaggtggtggagagatgttttttatgcgcacacctcaggacctcacaggcaaagatggtgatcttattcttgcagaatatagtgaggaaaatggacccttaatgatgcaggttggcatggcaaccaagataaagaactattataaacggaaacctggaaaagatcctggagcaccagattgtaaatatggggaaactgtttactgccatacatctcctttcctgggttctctccatcctggccaattgctgcaagcatttgagaacaacctttttcgtgctccaatttatcttcataagatgccagaaactgatttcttgatcattcggacaagacagggttactatattcgggaattagtggatatttttgtggttggccagcagtgtcccttgtttgaagttcctgggcctaactccaaaagggccaatacgcatattcgagactttctacaggtttttatttaccgccttttctggaaaagtaaagatcggccacggaggatacgaatggaagatataaaaaaagcctttccttcccattcagaaagcagcatccggaagaggctaaagctctgcgctgacttcaaacgcacagggatggactcaaactggtgggtgcttaagtctgattttcgtttaccaacggaagaagagatcagagctatggtgtcaccagagcagtgctgtgcttattatagcatgatagctgcagagcaacgactgaaggatgctggctatggtgagaaatccttttttgctccagaagaagaaaatgaggaagatttccagatgaagattgatgatgaagttcgcactgccccttggaacaccacaagggccttcattgctgccatgaagggcaagtgtctgctagaggtgactggggtggcagatcccacggggtgtggtgaaggattctcctatgtgaagattccaaacaaaccaacacagcagaaggatgataaagaaccgcagccagtgaagaagacagtgacaggaacagatgcagaccttcgtcgcctttccctgaaaaatgccaagcaacttctacgtaaatttggtgtgcctgaggaagagattaaaaagttgtcccgctgggaagtgattgatgtggtgcgcacaatgtcaacagaacaggctcgttctggagaggggcccatgagtaaatttgcccgtggatcaaggttttctgtggctgagcatcaagagcgttacaaagaggaatgtcagcgcatctttgacctacagaacaaggttctgtcatcaactgaagtcttatcaactgacacagacagcagctcagctgaagatagtgactttgaagaaatgggaaagaacattgagaacatgttgcagaacaagaaaaccagctctcagctttcacgtgaacgggaggaacaggagcggaaggaactacagcgaatgctactggcagcaggctcagcagcatccggaaacaatcacagagatgatgacacagcttccgtgactagccttaactcttctgccactggacgctgtctcaagatttatcgcacgtttcgagatgaagaggggaaagagtatgttcgctgtgagacagtccgaaaaccagctgtcattgatgcctatgtgcgcatacggactacaaaagatgaggaattcattcgaaaatttgccctttttgatgaacaacatcgggaagagatgcgaaaagaacggcggaggattcaagagcaactgaggcggcttaagaggaaccaggaaaaggagaagcttaagggtcctcctgagaagaagcccaagaaaatgaaggagcgtcctgacctaaaactgaaatgtggggcatgtggtgccattggacacatgaggactaacaaattctgccccctctattatcaaacaaatgcgccaccttccaaccctgttgccatgacagaagaacaggaggaggagttggaaaagacagtcattcataatgataatgaagaacttatcaaggttgaagggaccaaaattgtcttggggaaacagctaattgagagtgcggatgaggttcgcagaaaatctctggttctcaagtttcctaaacagcagcttcctccaaagaagaaacggcgagttggaaccactgttcactgtgactatttgaatagacctcataagtccatccaccggcgccgcacagaccctatggtgacgctgtcgtccatcttggagtctatcatcaatgacatgagagatcttccaaatacataccctttccacactccagtcaatgcaaaggttgtaaaggactactacaaaatcatcactcggccaatggacctacaaacactccgcgaaaacgtgcgtaaacgcctctacccatctcgggaagagttcagagagcatctggagctaattgtgaaaaatagtgcaacctacaatgggccaaaacactcattgactcagatctctcaatccatgctggatctctgtgatgaaaaactcaaagagaaagaagacaaattagctcgcttagagaaagctatcaaccccttgctggatgatgatgaccaagtggcgttttctttcattctggacaacattgtcacccagaaaatgatggcagttccagattcttggccatttcatcacccagttaataagaaatttgttccagattattacaaagtgattgtcaatccaatggatttagagaccatacgtaagaacatctccaagcacaagtatcagagtcgggagagctttctggatgatgtaaaccttattctggccaacagtgttaagtataatggacctgagagtcagtatactaagactgcccaggagattgtgaacgtctgttaccagacattgactgagtatgatgaacatttgactcaacttgagaaggatatttgtactgctaaagaagcagctttggaggaagcagaattagaaagcctggacccaatgaccccagggccctacacgcctcagcctcctgatttgtatgataccaacacatccctcagtatgtctcgagatgcctctgtatttcaagatgagagcaatatgtctgtcttggatattcccagtgccactccagaaaagcaggtaacacagatgcgccagggccgaggtaggctgggcgaggaagactctgatgtagatattgaagggtatgatgatgaggaggaggatgggaaacctaagactccagccccagaaggtgaagatggagatggtgatcttgcagatgaagaggaaggaactgtacaacagcctcaagccagtgtcctgtatgaggatttgcttatgtctgaaggagaagatgatgaggaagatgctgggagtgatgaagaaggagacaatcctttctctgctatccagctgagtgaaagtggaagtgactctgatgtgggatctggtggaataagacccaaacaaccccgcatgcttcaggagaacacaaggatggacatggaaaatgaagaaagcatgatgtcctatgagggagacggtggggaggcttcccatggtttggaggatagcaacatcagttatgggagctatgaggagcctgatcccaagtcgaacacccaagacacaagcttcagcagcatcggtgggtatgaggtatcagaggaggaagaagatgaggaggaggaagagcagcgctctgggccgagcgtactaagccaggtccacctgtcagaggacgaggaggacagtgaggatttccactccattgctggggacagtgacttggactctgatgaatgaggcttcctttgggcctccttggtcagccttccctgttctccagcctaggtggttcacctttccccaatttgttcatatttgtacagtatctgatcctgaaatcatgaaattaactaacaccttagcctttttaaaagtagtaagtaaatgataataaatcacctctcctaatcttcctggggcaatgtcaccctttgatttaaaacaaagcaaccccctttcccctaccactacggaaaagagcaagctcatttttccgtgtcctcctttatttaactccatttattgcttttggtataatttttccctggggaaggaggggaaattatgaaagaactagtaactttatgtcctcttgatgtattaggaaatttccggccaggcgtggtggctcacacctgtaatctcagcactctgggaggccgaggcgggcagatcacctgaggtcagaagttcgagaccagcttggccaacatggcgaaaccgcatctctactaaaaatacaaaaattagccaggtgtggtggcgtatgcctgttaatcctagctactcgggaggctgaggcaggagaattacttgaacccgggaggcagaggttgcagtgagtggaggtcacgccactgcactccagcctgggcgaaagagtgagattcagtctcaaaaaaaaaaaaatttccaagcatggtatcatctcacttttctaatttacaggctggagcagatgagagccctcctgctgggacagagaattgggttctagtggactctgtgctacacttaaacctgtgagacaaaccgcccattattttattatttaattatgcaatgcctagttcctaaatggattggaggcaaattaccgtaaattttgaaacagcctatatgtcagaaatgataatgttgccacctaaatgttttctgtcccccccaccctccccaggggaaatggtaggaaaatggtaagtttcttagggcaaagactgtgtcttctgtttcttttcatgcttaggatatggttctgtgcatagtaggtactcagtaaatgttcctagaatcataaaatcctcaacagatatgttactgagcatctgcttttcatgataagcactctatcagatccttgggatgcaaaggtaaataagacaaatcccttttacccaaagagctcaccatcaagttgggggagggaaagtggaattcaaaacatgttaataaatcatcatagtactgtgagataagtgcaattaagaagctagttataaagtataggggaaatagaggagtaatcatgtctgaaaagtcaggaaagtcttcctagaggtaatttttaagctgattgttttagaattagtagaagcttgccagatggaaaagtccaggcaaagtgtaacatgaatgggaaaggccacagtctagaaatggcagagtgtgttcctagtttgtttgtttgtttgtttgtacctgccttgttccaggaaggatttaatgtggtttatattccagtcctttaatgctggaagggctgagatgagactgaaagatgggcaggaagtatatcatcacaagctttgtgtttgatgttaatgtgtatgatttttatattatgggaaataagctcttagaggagtgatataatcaggtttgtgttttagaaatctgtgtaatgaatgaatgaagaaagaaattgaagaatcatgtaacatatgtgatcgcatttttgtaaaagaaccatgtgtgtttatatgtgtttatatatatacttgtgtatgcaaaggtaaaagtctgaaaggatatatgctaactgttcacaatgataaccccccaggaatgggattggaggggagggggcttctgtgtttgttatgtatgctgggtgggatattgtgcttttatttctatattgtttgaatttttttacagtatgtattatttttgt

SEQ ID NO: 30899 - DNA, 4827 bp, Homo sapiens
  source 1..4827: mol_type = unassigned DNA
aagggagctcagtaagtcacttctgggcgactgttgttttatttccggtctatgggacccggctgcgatttgctgctgcggacagcagctaccatcactgctgccgccatcatgtcagacacggacagcgacgaagattccgctggaggcggcccattttctttagcgggtttccttttcggcaacatcaatggagccgggcagctggagggggaaagcgtcttggatgatgaatgtaagaagcacttggcaggcttgggggctttggggctgggcagcctgatcactgaactcacggcaaatgaagaattgaccgggactgacggtgccttggtaaatgatgaagggtgggttaggagtacagaagatgctgtggactattcagacatcaatgaggtggcagaagatgaaagccgaagataccagcagacgatggggagcttgcagcccctttgccactcagattatgatgaagatgactatgatgctgattgtgaagacattgattgcaagttgatgcctcctccacctccacccccgggaccaatgaagaaggataaggaccaggattctattactggtgagaaagtggacttcagtagttcctctgactcagaatctgagatgggacctcaggaagcaacacaggcagaatctgaagatggaaagctgacccttccattggctgggattatgcagcatgatgccaccaagctgttgccaagtgtcacagaactttttccagaatttcgacctggaaaggtgttacgttttctacgtctttttggaccagggaagaatgtcccatctgtttggcggagtgctcggagaaagaggaagaagaagcaccgtgagctgatacaggaagagcagatccaggaggtggagtgctcagtagaatcagaagtcagccagaagtctttgtggaactacgactacgctccaccaccacctccagagcagtgtctctctgatgatgaaatcacgatgatggctcctgtggagtccaaattttcccaatcaactggagatatagataaagtgacagataccaaaccaagagtggctgagtggcgttatgggcctgcccgactgtggtatgatatgctgggtgtccctgaagatggcagtgggtttgactatggcttcaaactgagaaagacagaacatgaacctgtgataaaatctagaatgatagaggaatttaggaaacttgaggaaaacaatggcactgatcttctggctgatgaaaacttcctgatggtgacacagctgcattgggaggatgatatcatctgggatggggaggatgtcaaacacaaagggacaaaacctcagcgtgcaagcctggcaggctggcttccttctagcatgactaggaatgcgatggcttacaatgttcagcaaggttttgcagccactcttgatgatgacaaaccttggtactccatttttcccattgacaatgaggatctggtatatggacgctgggaggacaatatcatttgggatgctcaggccatgccccggctgttggaacctcctgttttgacacttgatcccaatgatgagaacctcattttggaaattcctgatgagaaggaagaggccacctctaactccccctccaaggagagtaagaaggaatcatctctgaagaagagtcgaattctcttagggaaaacaggagtcatcaaggaggaaccacagcagaacatgtctcagccagaagtgaaagatccatggaatctctccaatgatgagtattattatcccaagcaacagggtcttcgaggcacctttggagggaatattatccagcattcaattcctgctgtggaattacggcagcccttctttcccacccacatggggcccatcaaactccggcagttccatcgcccacctctgaaaaagtactcatttggtgcactttctcagccaggtccccactcagtccaacctttgctaaagcacatcaaaaaaaaggccaagatgagagaacaagagaggcaagcttcaggtggtggagagatgttttttatgcgcacacctcaggacctcacaggcaaagatggtgatcttattcttgcagaatatagtgaggaaaatggacccttaatgatgcaggttggcatggcaaccaagataaagaactattataaacggaaacctggaaaagatcctggagcaccagattgtaaatatggggaaactgtttactgccatacatctcctttcctgggttctctccatcctggccaattgctgcaagcatttgagaacaacctttttcgtgctccaatttatcttcataagatgccagaaactgatttcttgatcattcggacaagacagggttactatattcgggaattagtggatatttttgtggttggccagcagtgtcccttgtttgaagttcctgggcctaactccaaaagggccaatacgcatattcgagactttctacaggtttttatttaccgccttttctggaaaagtaaagatcggccacggaggatacgaatggaagatataaaaaaagcctttccttcccattcagaaagcagcatccggaagaggctaaagctctgcgctgacttcaaacgcacagggatggactcaaactggtgggtgcttaagtctgattttcgtttaccaacggaagaagagatcagagctatggtgtcaccagagcagtgctgtgcttattatagcatgatagctgcagagcaacgactgaaggatgctggctatggtgagaaatccttttttgctccagaagaagaaaatgaggaagatttccagatgaagattgatgatgaagttcgcactgccccttggaacaccacaagggccttcattgctgccatgaagggcaagtgtctgctagaggtgactggggtggcagatcccacggggtgtggtgaaggattctcctatgtgaagattccaaacaaaccaacacagcagaaggatgataaagaaccgcagccagtgaagaagacagtgacaggaacagatgcagaccttcgtcgcctttccctgaaaaatgccaagcaacttctacgtaaatttggtgtgcctgaggaagagattaaaaagttgtcccgctgggaagtgattgatgtggtgcgcacaatgtcaacagaacaggctcgttctggagaggggcccatgagtaaatttgcccgtggatcaaggttttctgtggctgagcatcaagagcgttacaaagaggaatgtcagcgcatctttgacctacagaacaaggttctgtcatcaactgaagtcttatcaactgacacagacagcagctcagctgaagatagtgactttgaagaaatgggaaagaacattgagaacatgttgcagaacaagaaaaccagctctcagctttcacgtgaacgggaggaacaggagcggaaggaactacagcgaatgctactggcagcaggctcagcagcatccggaaacaatcacagagatgatgacacagcttccgtgactagccttaactcttctgccactggacgctgtctcaagatttatcgcacgtttcgagatgaagaggggaaagagtatgttcgctgtgagacagtccgaaaaccagctgtcattgatgcctatgtgcgcatacggactacaaaagatgaggaattcattcgaaaatttgccctttttgatgaacaacatcgggaagagatgcgaaaagaacggcggaggattcaagagcaactgaggcggcttaagaggaaccaggaaaaggagaagcttaagggtcctcctgagaagaagcccaagaaaatgaaggagcgtcctgacctaaaactgaaatgtggggcatgtggtgccattggacacatgaggactaacaaattctgccccctctattatcaaacaaatgcgccaccttccaaccctgttgccatgacagaagaacaggaggaggagttggaaaagacagtcattcataatgataatgaagaacttatcaaggttgaagggaccaaaattgtcttggggaaacagctaattgagagtgcggatgaggttcgcagaaaatctctggttctcaagtttcctaaacagcagcttcctccaaagaagaaacggcgagttggaaccactgttcactgtgactatttgaatagacctcataagtccatccaccggcgccgcacagaccctatggtgacgctgtcgtccatcttggagtctatcatcaatgacatgagagatcttccaaatacataccctttccacactccagtcaatgcaaaggttgtaaaggactactacaaaatcatcactcggccaatggacctacaaacactccgcgaaaacgtgcgtaaacgcctctacccatctcgggaagagttcagagagcatctggagctaattgtgaaaaatagtgcaacctacaatgggccaaaacactcattgactcagatctctcaatccatgctggatctctgtgatgaaaaactcaaagagaaagaagacaaattagctcgcttagagaaagctatcaaccccttgctggatgatgatgaccaagtggcgttttctttcattctggacaacattgtcacccagaaaatgatggcagttccagattcttggccatttcatcacccagttaataagaaatttgttccagattattacaaagtgattgtcaatccaatggatttagagaccatacgtaagaacatctccaagcacaagtatcagagtcgggagagctttctggatgatgtaaaccttattctggccaacagtgttaagtataatgggtacatgtgcacaacgtgcaggttt

SEQ ID NO: 30900 - DNA, 1215 bp, Homo sapiens
  source 1..1215: mol_type = unassigned DNA
ccccacctctcggggcagctggcggagaagagagggggctttccaaatccactatgaatccttaaaaggctgaataagggaacttgaaacgatgcagacaggcaggcaacccgtagtcgagggacatagggccataaacgtcgaagccaggtcttgagcgtcagacagaatgaggtgtcccagagcggcggaggagagccagacgcacgctggttccggtctggacggaatcgccgcggagcacggcagaggctagggcggaatggctacggcagcgcagttcgccaaggctcggtctccgccctgcagcctatttcctctaacccgcagatccactatgggaggaggcggggagcgggctggagagcactaacagagacaggcggggcgagtcgtgggcgcgtgacgtcaccccggggtgtgcgcggcgcgagcggaagcggaagcggctctgttcgccgcctctcccaccggcccgatgagctgcagcggctccggcgcggaccccgaggcggcgccggcctccgccgcctcggccccgggccccgcgcccccggtctcggctcccgccgcgctgccctccagcaccgccgcggagaacaaggccagccccgcggggacagcggggggacctggggctggagcagctgctgggggcacgggacccttggcggcgcgggccggggagccagctgagcggcgtggggcggctccggtgtcggcgggtggcgcggcgcccccggagggggccatatctaacggggtttacgtactgccgagcgcggccaacggagacgtgaagcccgtggtgtccagcacgcctttggtggacttcttgatgcagctggaagattacacgcctacgatcccagatgcagtgactggttactacctgaaccgtgctggctttgaggcctcagacccacgcataattcggctcatctccttagctgcccagaaattcatctcagatattgccaatgatgccctacagcactgcaaaatgaagggcacggcctccggcagctcccggagcaagagcaaggaccgcaagtacactctaaccatggaggacttgacccctgccctcagcgagtatggcatcaatgtgaagaagccgcactacttcacctgagccacccaacctaaatgtacttatctgtccccatgtccccacaccagcctgttttcataataaactttattgtgacaggc

SEQ ID NO: 30901 - DNA, 1580 bp, Homo sapiens
  source 1..1580: mol_type = unassigned DNA
caggagagcggtaggggtgatgtcatcgctgcgcgacgacaggaagtaagatcctggcctgtgcagctcgggtttccgagcttctgcctcaggcatctccgcgatctcctctcccctccaatcctatccgtgatggacgatgcccacgagtcgccctccgacaaaggtggagagacaggggagtcggatgagacggccgctgtgcccggggacccgggggctaccgacaccgatggaatcccagaggaaactgacggagacgcagatgtggacttgaaagaagctgcagcggaggaaggcgagctcgagagtcaggatgtctcagatttaacaacagttgaaagggaagactcatcattacttaatcctgcagccaaaaaactgaaaatagataccaaagaaaagaaagagaaaaagcagaaagtagatgaagatgagattcagaagatgcaaatcctggtttcttctttttctgaggagcagctgaaccgttatgaaatgtatcgccgctcagctttccctaaggcagccatcaaaaggctgatccagtccatcactggcacctctgtgtctcagaatgttgttattgctatgtctggtatttccaaggttttcgtcggggaggtggtagaagaagcactggatgtgtgtgagaagtggggagaaatgccaccactacaacccaaacatatgagggaagccgttagaaggttaaagtcaaaaggacagatccctaactcgaagcacaaaaaaatcatcttcttctagaccaaagtctagaaaggcctatgttactgacggaagaagtattggttccagacttcctataagactgtctgcattggtgctttagtatctcaggcctccaaggattccatgatgattttaatgtctttctcaaaactctgatatttgtcacacctagaaagtatgtagcctgattgatacttgccttgactaaattttgggacctcttggggcattttgaagtatttaactgtcttgaccagttggaagaagatacgtgggccataagcatcttctggacaggggaactgctttcagagagaaaacctttccaagagagttttgttttgttttggtttcgttttgtttgagatagggtcttgctctatcacctaggctggagtgcagcggcatgactgcagccttgaactcctgggcttaagtgaccctcccacctcagtctcctgagtagctaggactacaggcacacactactgtgcccagctaacttatttttattttttatggagatggggtcttgctttgttgcccaggctggtcgtgaactcctggcttcaagcagtcctcctgcctcagcctcctaaagtgctgagggctttaatggtttcacattgaagcctgaagttgctaagacttaggttgtttcttatatctggttttaagtagatgaaacaaccagaaacttttacttgtgatactctaccatgaaggatgcggtaatggcaggaatagcagaataattggtgcttgtaaacatttaagattctcctgtggattttggtgagtgatcattaaactgttttccaacttgc

SEQ ID NO: 30902 - DNA, 1241 bp, Homo sapiens
  source 1..1241: mol_type = unassigned DNA
aagatcctggcctgtgcagctcgggtttccgagcttctgcctcaggcatctccgcgatctcctctcccctccaatcctatccgtgatggacgatgcccacgagtcgccctccgacaaaggtggagagacaggggagtcggatgagacggccgctgtgcccggggacccgggggctaccgacaccgatggaatcccagaggaaactgacggagacgcagatgtggacttgaaagaagctgcagcggaggaaggcgagctcgagagtcaggatgtctcagatttaacaacagttgaaagggaagactcatcattacttaatcctgcagccaaaaaactgaaaatagataccaaagaaaagaaagagaaaaagcagaaagtagatgaagatgagattcagaagatgcaaatcctggtttcttctttttctgaggagcagctgaaccgttatgaaatgtatcgccgctcagctttccctaaggcagccatcaaaaggcactggatgtgtgtgagaagtggggagaaatgccaccactacaacccaaacatatgagggaagccgttagaaggttaaagtcaaaaggacagatccctaactcgaagcacaaaaaaatcatcttcttctagaccaaagtctagaaaggcctatgttactgacggaagaagtattggttccagacttcctataagactgtctgcattggtgctttagtatctcaggcctccaaggattccatgatgattttaatgtctttctcaaaactctgatatttgtcacacctagaaagtatgtagcctgattgatacttgccttgactaaattttgggacctcttggggcattttgaagtatttaactgtcttgaccagttggaagaagatacgtgggccataagcatcttctggacaggggaactgctttcagagagaaaacctttccaagagagttttgttttgttttggtttcgttttgtttgagatagggtcttgctctatcacctaggctggagtgcagcggcatgactgcagccttgaactcctgggcttaagtgaccctcccacctcagtctcctgagtagctaggactacaggcacacactactgtgcccagctaacttatttttattttttatggagatggggtcttgctttgttgcccaggctggtcgtgaactcctggcttcaagcagtcctcctgcctcagcctcctaaagtgctgagggctttaatggtttcacattgaag

SEQ ID NO: 30903 - DNA, 1359 bp, Homo sapiens
  source 1..1359: mol_type = unassigned DNA
agacgctgctgcctgtgagtcttgggccctggcagttgaggaacaagagcgggaggagggagtcaggacccagacctacagtgggtcagtgttcgaaggaccaggttgtggacgagacggggctgtgaggattcaggctcttgggaagggactgactgagaggatcaggctcggagaagacgcggctgtggggacccgggctctaagacgggacttagggaacggggacggatgcgagttctccggcatctgagggaaagtggtctgagaggagcaggattatgaggacccgcactcctacgaggaaagggtcagaaaggaacggggcgtgaagacacaggctccggagagttaattggccttggtcctcacagctccaaaaagaaacaggatctcgataagctctatgagctgaagtccaaagctcggcagattatgaaccagtttggcccctcagccctaatcaacctctccaatttctcatccataaaaccggaaccagccagcacccctccacaaggctccatggccaatagtactgcagtggtaaagataccaggcactcctggggcaggaggtcgtcttagccctgaaaacaatcaggtattgaccaagaagaaattacaggacttagtaagagaagtggatcctaatgagcagttggatgaagatgtggaggagatgctgctgcagattgctgatgattttatcgagagtgtggtgacagcagcctgtcagcttgcgcggcatcgcaagtctagcaccctggaggtgaaagatgtccagctgcatttagagcgccagtggaacatgtggatcccaggatttggctctgaagaaatccgaccctacaaaaaagcttgcaccacagaagctcacaaacagagaatggcattgatccggaaaacaaccaagaaataacacacggaaaggtcagggaatggacagcaatgtatttggagatacttgagctgagaactcagccatctcatccttggatttttttttttaatgctttacagagaagcatatattttttattaacagtgcagcaatatctataatgactgagaggatctgccaaaagaataaagcctcctaccccaacttccggtcccttttccctgccatctcaaagaggagcaatgtatcttccagagaagattttatttgtggtttattatataagtgactgaatatgggacaaagcattatggtctttttgggtaagacagtattagcaggatttgtaaagggttttgtttccttctcccttccccttttccctgtactttgtaatgtcagtgtttatatgaatatgactttcatttgcttttccagaataaagaagttattaat

SEQ ID NO: 30904 - DNA, 1334 bp, Homo sapiens
  source 1..1334: mol_type = unassigned DNA
gtcggaccggctgctgagacgaacgcttcactggggcagtctctgcatatcatggggagatagacgctgctgcctttaattggccttggtcctcacagctccaaaaagaaacaggatctcgataagctctatgagctgaagtccaaagctcggcagattatgaaccagtttggcccctcagccctaatcaacctctccaatttctcatccataaaaccggaaccagccagcacccctccacaaggctccatggccaatagtactgcagtggtaaagataccaggcactcctggggcaggaggtcgtcttagccctgaaaacaatcaggtattgaccaagaagaaattacaggacttagtaagagaagtggatcctaatgagcagttggatgaagatgtggaggagatgctgctgcagattgctgatgattttatcgagagtgtggtgacagcagcctgtcagcttgcgcggcatcgcaagtctagcaccctggaggtgaaagatgtccagctgcatttagagcgccagtggaacatgtggatcccaggatttggctctgaagaaatccgaccctacaaaaaagcttgcaccacagaagctcacaaacagagaatggcattgatccggaaaacaaccaagaaataacacacggaaaggtcagggaatggacagcaatgtatttggagatacttgagctgagaactcagccatctcatccttggatttttttttttaatgctttacagagaagcatatattttttattaacagtgcagcaatatctataatgactgagaggatctgccaaaagaataaagcctcctaccccaacttccggtcccttttccctgccatctcaaagaggagcaatgtatcttccagagaagattttatttgtggtttattatataagtgactgaatatgggacaaagcattatggtctttttgggtaagacagtattagcaggatttgtaaagggttttgtttccttctcccttccccttttccctgtactttgtaatgtcagtgtttatatgaatatgactttcatttgcttttccagaataaagaagttattaatcgaaagacagggtacctttgaaatcccagagggagtcaggacaagcaagcctggattgtagctctctagtcagcaggtggcagcatcgttattcattttggtgtttgagaaaaactcagggattttccatcattttaccccaagggaggccataacatcagcaggagtttgagtccagcttctcggccataagaattgagtagggtgaccttctctcacggccctcaactgaagaggcatccttgttttgg

SEQ ID NO: 30905 - DNA, 2191 bp, Homo sapiens
  source 1..2191: mol_type = unassigned DNA
agtccgcctcagcccgccgcgccgccctcagtacagctccggccgccgcgccgcctggctttcgtattcgttgttctcggcgggctgtggggcctccgcgccgcggccgttagtcatgtcggattctggaagttacggtcagtctgggggtgagcagcaaagttattctacctatggaaatccaggcagccaaggctatggacaagcatcacaaagctattctggctatgggcaaacgactgattcctcttatggacagaactacagcggttactccagttatggacaaagtcagtcaggttattcacagtcctatggtggttatgagaatcaaaagcagagctcatatagccagcaaccatataataaccagggacagcagcaaaacatggaatcatcaggaagccaaggtggaagagcaccttcctatgaccagccagactatggtcaacaagattcatatgaccagcagtcaggctatgatcaacatcaaggctcatatgatgagcagtcaaattatgatcagcagcatgattcctatagtcaaaaccagcagtcctatcattcacaaagggaaaactacagccaccacacacaagatgaccgtcgtgatgtgagtaggtatggagaagataatagaggatatggcgggtcacagggaggaggtagagggcgtgggggatatgacaaggatggaagaggtcctatgacaggatcaagtggtggtgaccgcggtggcttcaaaaattttggtggtcacagggattatggacccagaacagatgctgattcagaatctgataattcagataacaacacaatctttgtgcaaggacttggggagggtgtgtctacagatcaagttggggagttctttaaacaaataggaattatcaagacaaataagaagaccggaaaaccaatgataaatctttatacagacaaggacacaggaaagccaaagggggaggcaacagtgtcatttgatgaccctccttcagctaaggcagccattgactggtttgatggaaaagaattccatggcaacatcattaaagtgtcctttgccactagaagacctgaattcatgagaggaggtggaagtggaggtgggcggcgaggccgtggaggatatagaggtcgtggaggctttcaagggagaggtggagaccccaaaagtggggattgggtttgccctaatccgtcatgcggaaatatgaactttgctcgaaggaattcctgcaatcagtgcaatgagcctagaccagaggactctcgtccctcaggaggagatttccgggggagaggctacggtggagagaggggctacagaggtcgtgggggcagaggtggagaccgaggcggctatggtggagacagaagtgggggtggctatggtggagacagaagcagcggtggtggctacagcggagatagaagtgggggcggctatggtggagacagaagtgggggtggctatggtggggacagaggcggcggctatggtggggacagaggaggcggctatggaggagaccgaggaggtggctatggaggagatcgaggtggctatggaggagaccgaggtggaggctatggtggagaccgaggaggctatggaggagatcgaggaggttacggaggagatcgaggaggttatggaggagatcgaggaggctatggaggagacagaagccgggggggctatggaggagaccgtggtggtggcagtggctacggtggagaccgaagtggaggctatggaggagacaggagtggtggcggctatggaggagaccgaggtgggggctacggaggagaccgaggtggctatggaggcaaaatgggaggaagaaacgactacagaaatgatcagcgcaaccgaccatactgatgactgttttgaatgttcctttgtctctgacatgatccatagtgaaattgccagagttttgcctgctgctttcctcgtggcctcttcttgggtagtgaaattaagtgacatttggatttttatttgggtgggagggctgggacagtttttcttctagaaatgtctgttgagatttccccctttagtttccaaccttctccccaacccttggagctaaatgcgttgtaaaatattgccaaaatgaaaagtgttttgtaatactgcaataaaggctgcttgtttttgtggacttttgta

SEQ ID NO: 30906 - DNA, 2153 bp, Homo sapiens
  source 1..2153: mol_type = unassigned DNA
agtacagctccggccgccgcgccgcctggctttcgtattcgttgttctcggcgggctgtggggcctccgcgccgcggccgttagtcatgtcggattctggaagttacggtcagtctgggggtgagcagcaaagttattctacctatggaaatccaggcagccaaggctatggacaagcatcacaaagctattctggctatgggcaaacgactgattcctcttatggacagaactacagcggttactccagttatggacaaagtcagtcaggttattcacagtcctatggtggttatgagaatcaaaagcagagctcatatagccagcaaccatataataaccagggacagcagcaaaacatggaatcatcaggaagccaaggtggaagagcaccttcctatgaccagccagactatggtcaacaagattcatatgaccagcagtcaggctatgatcaacatcaaggctcatatgatgagcagtcaaattatgatcagcagcatgattcctatagtcaaaaccagcagtcctatcattcacaaagggaaaactacagccaccacacacaagatgaccgtcgtgatgtgagtaggtatggagaagataatagaggatatggcgggtcacagggaggaggtagagggcgtgggggatatgacaaggatggaagaggtcctatgacaggatcaagtggtggtgaccgcggtggcttcaaaaattttggtggtcacagggattatggacccagaacagatgctgattcagaatctgataattcagataacaacacaatctttgtgcaaggacttggggagggtgtgtctacagatcaagttggggagttctttaaacaaataggaattatcaagacaaataagaagaccggaaaaccaatgataaatctttatacagacaaggacacaggaaagccaaagggggaggcaacagtgtcatttgatgaccctccttcagctaaggcagccattgactggtttgatggaaaagaattccatggcaacatcattaaagtgtcctttgccactagaagacctgaattcatgagaggaggtggaagtggaggtgggcggcgaggccgtggaggatatagaggtcgtggaggctttcaagggagaggtggagaccccaaaagtggggattgggtttgccctaatccgtcatgcggaaatatgaactttgctcgaaggaattcctgcaatcagtgcaatgagcctagaccagaggactctcgtccctcaggaggagatttccgggggagaggctacggtggagagaggggctacagaggtcgtgggggcagaggtggagaccgaggcggctatggtggagacagaagtgggggtggctatggtggagacagaagcagcggtggtggctacagcggagatagaagtgggggcggctatggtggagacagaagtgggggtggctatggtggggacagaggcggcggctatggtggggacagaggaggcggctatggaggagaccgaggaggtggctatggaggagatcgaggtggctatggaggagaccgaggtggaggctatggtggagaccgaggaggctatggaggagatcgaggaggttacggaggagatcgaggaggttatggaggagatcgaggaggctatggaggagacagaagccgggggggctatggaggagaccgtggtggtggcagtggctacggtggagaccgaagtggaggctatggaggagacaggagtggtggcggctatggaggagaccgaggtgggggctacggaggagaccgaggtggctatggaggcaaaatgggaggaagaaacgactacagaaatgatcagcgcaaccgaccatactgatgactgttttgaatgttcctttgtctctgacatgatccatagtgaaattgccagagttttgcctgctgctttcctcgtggcctcttcttgggtagtgaaattaagtgacatttggatttttatttgggtgggagggctgggacagtttttcttctagaaatgtctgttgagatttccccctttagtttccaaccttctccccaacccttggagctaaatgcgttgtaaaatattgccaaaatgaaaagtgttttgtaatactgcaataaaggctgcttgtttttgtgg

SEQ ID NO: 30907 - DNA, 1879 bp, Homo sapiens
  source 1..1879: mol_type = unassigned DNA
agtacagctccggccgccgcgccgcctggctttcgtattcgttgttctcggcgggctgtggggcctccgcgccgcggccgttagtcatgtcggattctggaagttacggtcagtctgggggtgagcagcaaagttattctacctatggaaatccaggcagccaaggctatggacaagcatcacaaagctattctggctatgggcaaacgactgattcctcttatggacagaactacagcggttactccagttatggacaaagtcagtcaggttattcacagtcctatggtggttatgagaatcaaaagcagagctcatatagccagcaaccatataataaccagggacagcagcaaaacatggaatcatcaggaagccaaggtggaagagcaccttcctatgaccagccagactatgatcagcagcatgattcctatagtcaaaaccagcagtcctatcattcacaaagggaaaactacagccaccacacacaagatgaccgtcgtgatgtgagtaggtatggagaagataatagaggatatggcgggtcacagggaggaggtagagggcgtgggggatatgacaaggatggaagaggtcctatgacaggatcaagtggtggtgaccgcggtggcttcaaaaattttggtggtcacagggattatggacccagaacagatgctgattcagaatctgataattcagataacaacacaatctttgtgcaaggacttggggagggtgtgtctacagatcaagttggggagttctttaaacaaataggaattatcaagacaaataagaagaccggaaaaccaatgataaatctttatacagacaaggacacaggaaagccaaagggggaggcaacagtgtcatttgatgaccctccttcagctaaggcagccattgactggtttgatggaaaagaattccatggcaacatcattaaagtgtcctttgccactagaagacctgaattcatgagaggaggtggaagtggaggtgggcggcgaggccgtggaggatatagaggtcgtggaggctttcaagggagaggtggagaccccaaaagtggggattgggtttgccctaatccgtcatgcggaaatatgaactttgctcgaaggaattcctgcaatcagtgcaatgagcctagaccagaggactctcgtccctcaggaggagatttccgggggagaggctacggtggagagaggggctacagaggtcgtgggggcagaggtggagaccgaggcggctatggtggagacagaagtgggggtggctatggtggagacagaagcagcggtggtggctacagcggagatagaagtgggggcggctatggtggagacagaagtgggggtggctatggtggggacagaggcggcggctatggtggggacagaggaggcggctatggaggagaccgaggaggtggctatggaggagatcgaggtggctatggaggagaccgaggtggaggctatggtggagaccgaggaggctatggaggagatcgaggaggttacggaggagatcgaggaggttatggaggagatcgaggaggctatggaggagacagaagccgggggggctatggaggagaccgtggtggtggcagtggctacggtggagaccgaagtggaggctatggaggagacaggagtggtggcggctatggaggagaccgaggtgggggctacggaggagaccgaggtggctatggaggcaaaatgggaggaagaaacgactacagaaatgatcagcgcaaccgaccatactgatgactgttttgaatgttcctttgtctctgacatgatccatagtgaaattgccagagttttgcctgctgctttcctcgtggcctcttctt

SEQ ID NO: 30908 - DNA, 4872 bp, Homo sapiens
  source 1..4872: mol_type = unassigned DNA
cagcgggaggcggagcgagtccaaaatggcggctctcaggctggcgcgctccgtgctgctggggctttgaggtggtcgccgggggtccgggggaccctttccccgccgcggaagccctagaggatgaatcggggaccctgctaaggtctggcggcggggctggagagcagtggcagcaagggctgcggtggcgtccacgcagcgggatgtgcgagagttactccaggtcgttgttgagggtctcggtggcgcagatctgccaggcgctgggctgggactcggtgcagctcagcgcctgccacctcctcacggacgtgctgcagcgctatctgcagcagctgggccggggctgccatcggtactctgagctctatggccgaacagacccaattttggatgatgttggtgaagctttccagctgatgggggttagtctacatgaactagaagactatattcacaacattgagcctgtcaccttcccacaccaaattccgtcatttcctgttagcaagaacaatgtacttcagtttcctcaacctggaagtaaagatgcagaggaaagaaaagaatacattcctgattacctgccacccattgtgtcttctcaagaagaagaagaagaagagcaggtgcccactgatggaggcacatcagcagaagccatgcaggttcccttggaagaagatgatgaattggaggaggaagaaattattaatgatgagaatttcctgggcaagagaccactggatagtcctgaagctgaagaactgccagccatgaagcggcctcggctattaagcactaaaggggacacgctagatgttgtgttattggaagctcgagagccactcagctcaataaatactcaaaagatcccaccaatgctttctccagtccatgtacaggacagtacagacttggcacctccctcacccgagccgccaatgttggctccagttgcaaaatcacaaatgccaactgcaaaaccattagaaacaaagtcatttacacctaaaacaaagactaaaactagctctccaggacagaagactaaatcacctaaaaccgcccagtcaccagcaatggtcggaagtcctattcgatcaccaaaaactgtatccaaagaaaagaaatcacctggacgttccaagagccccaagagtcccaagagccccaaggtcacgactcacattccccaaacacctgtgagacctgaaacgcccaacaggactccttcagctacactcagtgaaaaaatcagtaaagagactatccaggtaaaacaaatacagacaccccctgatgctgggaaactgaacagtgagaatcagccgaaaaaggctgtggtagcagataaaacgattgaggcctctatcgatgctgtgattgcacgagcctgtgctgagcgagagccagatcctttcgaattttcttctggatcggaatctgaaggagacatttttactagccctaagagaatttcaggcccggagtgtactactcccaaagcttccacttccgcgaacaatttcacaaagtcaggatccactcctctgcctctttccggtggaacctcaagttccgataactcatggacaatggatgcctccattgatgaggttgtacgtaaagcaaaactgggaacaccttcaaatatgccccccaactttccttatatctcttctccgtcagtgtctcctcccactcccgaacctctccacaaggtgtatgaggagaaaaccaagctgccttcctccgtggaggtaaagaagaagttgaaaaaggaactaaagactaaaatgaaaaagaaagaaaagcagagagatagggagagggaaaaagacaagaacaaggacaaaagtaaggagaaggataaagtgaaagagaaagagaaagacaaggaaactggcagggaaacaaagtatccctggaaggaatttcttaaagaggaagaggcagatccctacaagtttaaaatcaaagaatttgaagatgttgatcccaaagtgaaattgaaagatggacttgtgaggaaggagaaagagaagcataaagataagaagaaagatagagagaaaggcaagaaagataaagataagagagagaaagaaaaagtgaaagataaaggcagagaagataagatgaaagccccagcacccccactggtgttgcccccaaaagagttggccctgcccttgttcagccctgccacagcctccagggtcccagccatgctgccatctttgttgccagtgcttccggaaaaactgtttgaggagaaagagaaggtgaaggagaaagaaaagaaaaaggacaaaaaggagaagaagaaaaagaaggaaaaagagaaggagaagaaggagaaggaaagagagaaagagaagagagagcgagagaagagagaaaaagagaaggagaaacacaagcatgaaaaaataaaagtggaaccagtcgctctggccccgagtccagttatccccagattaactctccgagtcggtgctggccaagacaagattgtcatcagcaaggtggtccctgcccccgaggccaagccggcgccctcgcagaacaggccgaagaccccaccgccggcccccgcgcccgcccccggccccatgctcgtcagccctgcgcccgtgccgctgccgctgctcgcccaggccgccgcgggccctgccctgctgccctccccgggtcccgccgcctccggggccagtgccaaagcccccgtgcgcagcgtggtgactgagacggtcagcacctacgtgatccgagatgagtggggcaatcagatctggatctgccctgggtgtaacaagcctgacgatgggagtcccatgattgggtgtgacgactgcgatgactggtaccactggccctgtgttggaatcatgactgcacccccagaagagatgcagtggttctgccccaagtgtgcgaacaagaagaaggacaaaaagcacaagaagaggaagcatcgagcccactgacgactcccgaggggctggaccaagcggggtcagcccgggcttcttccctggcgcctctggaagggagctggtgcaagtctgccgtcacatccacccccagatgcctgtggataaagaacccaggaggactgaggctggaacacaccgcgcacctggattgttcactcccgagccgccttggcctgtggctccgtggcagtgcgacagaaggaaactcaagcagaggcgtggcctgggggctgcccctcctccacttctctaataccagtgacaagtattattaataaagagcgtacatcttcccttttgatttcctttattctctccagggccttttcattgaggtattagatgagaagataatgtacaaactgcctcaactgtaatttaaggatgatagagtctgtatacagttttcagcccctttccctctatagtaagataatcagaataacataaaagaaaactccagttggagtaccggtaaatatttttgtgataagaatatatgaagcttccctccttcccccgtttttagtactaacatgtaaaatgttcaggcttttgtgaaataccttatattttttaagaaaaaggtttctatcatgtcctgtttgcttttgtgcaaattatttttgtttaatgtattttatatcttcgttgcattctaattttgcccttctttaaactgctggagtctcttctcactgcttgtacatttcatcaacttgtataaaaactcttcagactaaaagattgcccctaatgtaaataataaatatttatgaagtagttattttttaaatttttatcgtgtttaattctggctttctctgaaatccactgtgatttcagccaggtctgtaatgacgctggacagaaacaaggctagagaaaaagccatcgttcaaagaaatttcccttgagctcagcctgcgcagtgcccggaaacatggtggggaaagggcccgagcagttggaaggaaaacaaggcaatttaaatttagagtttatgacttgaagttgttttgtttgttgtctattttgtttttgtaaatttctttgacagacttttactaaaaggacatgtagtttccatgaaagtaaaaaaaaaaaacaacaaaaaacccacatatactgtagcattttgtctttatattgttttatttctacaaatctgttcattaatattgtgctttaaggctgaaatgaagtatattatgaatttttttaagaaaactcatcaaatttcagggtatcacaaaactttattatattattatactgcccactatttattatatgttatagatgtctgagaggtaaaccaaatattttatttttaatgttaaaaaaacatcaaatttaactttattagcatattttagcaactttgggataaatacggacttttacttgattttgaaataatcccagtgtaggcccatgtgctggatctgttggatgctagaatatgggctttgaacctaatacaaatatattactagaaaatgtgatttttttaaatgccaagtaaattgatattagtgtatgaattagtcatattttaaaacattatgtggttagagaaatgcggttttctgccatgaatgttaagttgcaaatcagtggaaatggagtcgacctcttcggagcacagggtgtcattgccctcgttgttcaagaggccagaatttttctatccccgctaagaaacaaagcatctatgttgagatatgtgtttttttgtttgattaatttgagatcattctaaatactttatacaatattttcacatgcacaaaaatgcgcgttagtggtttttggagaggggtgaggggtgggggaagtgcaaaataaagattattggctattt

SEQ ID NO: 30909 - DNA, 1021 bp, Homo sapiens
  source 1..1021: mol_type = unassigned DNA
ctcaggctggcgcgctccgtgctgctggggctttgaggtggtcgccgggggtccgggggaccctttccccgccgcggaagccctagaggatgaatcggggaccctgctaaggtctggcggcggggctggagagcagtggcagcaagggctgcggtggcgtccacgcagcgggatgtgcgagagttactccaggtcgttgttgagggtctcggtggcgcagatctgccaggcgctgggctgggactcggtgcagctcagcgcctgccacctcctcacggacgtgctgcagcgctatctgcagcagctgggccggggctgccatcggtactctgagctctatggccgaacagacccaattttggatgatgttggtgaagctttccagctgatgggggttagtctacatgaactagaagactatattcacaacattgagcctgtcaccttcccacaccaaattccgtcatttcctgttagcaagaacaatgtacttcagtttcctcaacctggaagtaaagatgcagaggaaagaaaagaatacattcctgattacctgccacccattgtgtcttctcaagaagaagaagaagaagagcaggtgcccactgatggaggcacatcagcagaagccatgcaggttcccttggaagaagatgatgaattggaggaggaagaaattattaatgatgagaatttcctgggcaagagaccactggatagtcctgaagctgaagaactgccagccatgaagcggcctcggctattaagcactaaaggggacacgctagatgttgtgttattggaagctcgagagccactcagctcaataaatactcaaaagatcccaccaatgctttctccagtccatgtacaggacagtacagacttggcacctccctcacccgagccgccaatgttggctccagttgcaaaatcacaaatgccaactgcaaaaccattagaaacaaagtcatttacacctaaaacaaagactaaaaaaaaaaaaaaaaaaaaaaagagt

SEQ ID NO: 30910 - DNA, 4630 bp, Homo sapiens
  source 1..4630: mol_type = unassigned DNA
atggcggcgggctcggatctgctggacgaggtcttcttcaacagcgaggtggacgagaaagtggtgagcgacctggtgggctcgctggagtcgcagctggcggccagcgcggcccaccaccaccacctcgcgccgcgcacgcccgaggtgcgggccgcggccgccggcgcgctcgggaaccatgttgtgagcggcagcccggccggagccgcgggcgcagggccggccgcccccgccgagggcgcgcccggagcggcgccggagccgccccccgcaggtagagcgcggccggggggcggggggccgcagcgcccgggccccccctcaccgcgccgcccccttgtccccgcagggcccgcgccgcccgccgcgaagctgaggccgccgcccgagggcagcgcggggtcctgcgccccggtgcccgccgccgccgccgtcgccgcggggcccgagcccgcccccgccggccccgccaagcccgccggccccgccgcgctggccgcccgcgccggccccggccccgggcccggccccggccccggccccggccctggccctggcaagcccgccggccccggcgccgcgcaaactttgaatgggagcgccgcgctgctgaactcgcaccacgccgccgcacctgctgtcagcctggtcaacaacgggcccgccgcgctgctgccgctgcccaagcccgccgcccccggcactgtcatccagacgccccccttcgtgggcgccgccgcgccccccgcgcccgccgcgccctcgccccccgccgcccccgcgcccgccgcccccgccgccgccccgcccccgccaccccccgcgcccgccactctggcccggccgcccggccaccccgccggacccccgaccgccgcgcccgccgtgccgccccccgccgccgcccagaacgggggcagcgccggggcagcccccgcccccgccccggccgccgggggccccgcgggggtcagcggccaacccgggcccggcgcggcggctgcggcgccggcgccgggggtcaaggccgagtcgcccaagagggtggtgcaggcggcgcccccggcggcgcagaccctggcggccagcggcccggccagcacggcggccagcatggtcatcgggccaactatgcaaggggcgctgcccagcccggccgccgtcccgccgcccgcccccgggacccccaccgggctgcccaaaggcgcggccggcgcagtgacccagagcctgtcccggacgcccacggccaccaccagcgggattcgggccaccctgacgcccaccgtgctggccccccgcttgccgcagccgcctcagaacccgaccaacatccagaacttccagctgcccccaggaatggtcctcgtccgaagtgagaatgggcagttgttaatgattcctcagcaggccttggcccagatgcaggcgcaggcccatgcccagcctcagaccaccatggcgcctcgccctgccacccccacaagtgcccctcccgtccagatctccaccgtacaggcacctggaacacctatcattgcacggcaggtgaccccaactaccataattaagcaagtgtctcaggcccagacaacggtgcagcccagtgcaaccctgcagcgctcgcccggcgtccagcctcagctcgttctgggtggcgctgcccagacggcttcacttgggacggcgacggctgttcagacggggactcctcagcgcacggtaccaggggcgaccaccacttcctcagctgccacggaaactatggaaaacgtgaagaaatgtaaaaatttcctatctacgttaataaaactggcttcatctggcaagcagtctacagagacagcagctaatgtgaaagagctcgtgcagaatttactggatggaaaaatagaagcagaagatttcacaagcaggttataccgagaacttaattcttcacctcaaccttaccttgtgcctttcctgaagaggagcttacccgccttgagacagctgacccccgactccgcggccttcatccagcagagccagcagcagccgccaccgcccacctcgcaggccaccactgcgctcacggccgtggtgctgagtagctcggtccagcgcacggccgggaagacggcggccaccgtgaccagtgccctccagccccctgtgctcagcctcacgcagcccacgcaggtcggcgtcggcaagcaggggcaacccacaccgctggtcatccagcagcctccgaagccaggagccctgatccggcccccgcaggtgacgttgacgcagacacccatggtcgccctgcggcagcctcacaaccggatcatgctcaccacgcctcagcagatccagctgaacccactgcagccagtccctgtggtgaaacccgccgtgttacctggaaccaaagccctttctgctgtctcggcacaagcagctgctgcacagaaaaataaactcaaggagcctgggggaggttcgtttcgggacgatgatgacattaatgatgttgcatcgatggctggagtaaacttgtcagaagaaagtgcaagaatattagccacgaactctgaattggtgggcacgctaacgcggtcctgtaaagatgaaaccttcctcctccaagcgcctttgcagagaagaatattagaaataggtaaaaaacatggtataacggaattacatccagatgtagtaagttatgtatcacatgccacgcaacaaaggctacagaatcttgtagagaaaatatcagaaacagctcagcagaagaacttttcttacaaggatgacgacagatatgagcaggcgagtgacgtccgggcacagctcaagttttttgaacagcttgatcaaatcgaaaagcagaggaaggatgagcaggagcgggagatcctgatgagggcagcaaagtctcggtcaagacaagaagatccagaacagttaaggctgaaacagaaggcaaaggagatgcagcaacaggaactggcacaaatgagacagcgggacgccaacctcacagcactagcagcgatcgggcccaggaaaaagaggaaagtggactgtccggggccgggctcaggagcagaggggtcgggccccggctcagtggtcccaggcagctcgggtgtcggaacccccagacagttcacgcgacaaagaatcacgcgggtcaacctcagggacctcatattttgtttagaaaatgaacgtgagacaagccattcactgctgctctacaaagcattccttaagtgacacaggaggacgcctggggactttttatatatttgcagattacgcctttttgtaacgagcaaatgggatattgtttaaaaaacagccacctctttacaatggaacagttttatattcctgtttctaaatcagctcttcagtgtgaaagaaaacacgtttctgtaacagagagaacacaaaggcctgtggatactcttaaaggacaattaaatcttaactcatcttgattgagtggccttcctgccaaacaagccatatataaagactgatggaatcgttagcaaataattagctgccctctgtcaactcatagcagtttctgcattatttgtgcattttggtttagttctacctaacttactatgtaggtgtatgtctacagccgatgacctcatttcgtttattttatttttgtaatagtcagttggcaaagcaaactgattttttagactatttatcttccttcccttcccctcccaccccgctctcctctctgccccctgccctcccctcccctcccttcccctccactccgctgagaatcctggaggaatacacaattcatcgttgcacccccacctcagagtgtaatcgcatttctgcttggtagaggccgagcccagcaaaggtggctccttctgaatgtgtggtcagcatctgtacaaatgcattttatttgctatagtttgtaaagctgtaaagttaaaagagatgaaaaccttttcagcataaatatattttacttgcactgtgttttttagctaaaagtgaaaacctagattaaataaaatcaaagttgagaagaatcatcaaaagactgtttctcggtgtgaatcaagtgttgaaaaatggttggtgtattttgtcagtaattgtacataacttttggcacatgacatagaaatggctatgtaaactataattattttgctaagagactgtatgcaagccttgggccgactttacagacgtccagagcaaagccccttctttgtacctatttttttattacaaatatactaattggttctttctattttcagaggttattgtatgaaattgtctattgatagtacttttatgactgtaaatactctggctttctccgtgtgaattctcacattagactttaattcgagcgcgtgtgaactgaacgctgatcagtattttttatcaacacctgagaactgttacaccttttattttgtcttttaggaaatccctgtctttccattttttcatgtaaattttgcacagttacttgttcatatgtaaatattttactttcagaaatgaagtttttaattgctattgttttatataggattgaaagaaaattaactcctttattaaaaacaaatttatctgtatt

SEQ ID NO: 30911 - DNA, 4222 bp, Homo sapiens
  source 1..4222: mol_type = unassigned DNA
ggacgaggtcttcttcaacagcgaggtggacgagaaagtgggcccgcgccgcccgccgcgaagctgaggccgccgcccgagggcagcgcggggtcctgcgccccggtgcccgccgccgccgccgtcgccgcggggcccgagcccgcccccgccggccccgccaagcccgccggccccgccgcgctggccgcccgcgccggccccggccccgggcccggccccggccccggccccggccctggccctggcaagcccgccggccccggcgccgcgcaaactttgaatgggagcgccgcgctgctgaactcgcaccacgccgccgcacctgctgtcagcctggtcaacaacgggcccgccgcgctgctgccgctgcccaagcccgccgcccccgccgccgccccgcccccgccaccccccgcgcccgccactctggcccggccgcccggccaccccgccggacccccgaccgccgcgcccgccgtgccgccccccgccgccgcccagaacgggggcagcgccggggcagcccccgcccccgccccggccgccgggggccccgcgggggtcagcggccaacccgggcccggcgcggcggctgcggcgccggcgccgggggtcaaggccgagtcgcccaagagggtggtgcaggcggcgcccccggcggcgcagaccctggcggccagcggcccggccagcacggcggccagcatggtcatcgggccaactatgcaaggggcgctgcccagcccggccgccgtcccgccgcccgcccccgggacccccaccgggctgcccaaaggcgcggccggcgcagtgacccagagcctgtcccggacgcccacggccaccaccagcgggattcgggccaccctgacgcccaccgtgctggccccccgcttgccgcagccgcctcagaacccgaccaacatccagaacttccagctgcccccaggaatggtcctcgtccgaagtgagaatgggcagttgttaatgattcctcagcaggccttggcccagatgcaggcgcaggcccatgcccagcctcagaccaccatggcgcctcgccctgccacccccacaagtgcccctcccgtccagatctccaccgtacaggcacctggaacacctatcattgcacggcaggtgaccccaactaccataattaagcaagtgtctcaggcccagacaacggtgcagcccagtgcaaccctgcagcgctcgcccggcgtccagcctcagctcgttctgggtggcgctgcccagacggcttcacttgggacggcgacggctgttcagacggggactcctcagcgcacggtaccaggggcgaccaccacttcctcagctgccacggaaactatggaaaacgtgaagaaatgtaaaaatttcctatctacgttaataaaactggcttcatctggcaagcagtctacagagacagcagctaatgtgaaagagctcgtgcagaatttactggatggaaaaatagaagcagaagatttcacaagcaggttataccgagaacttaattcttcacctcaaccttaccttgtgcctttcctgaagaggagcttacccgccttgagacagctgacccccgactccgcggccttcatccagcagagccagcagcagccgccaccgcccacctcgcaggccaccactgcgctcacggccgtggtgctgagtagctcggtccagcgcacggccgggaagacggcggccaccgtgaccagtgccctccagccccctgtgctcagcctcacgcagcccacgcaggtcggcgtcggcaagcaggggcaacccacaccgctggtcatccagcagcctccgaagccaggagccctgatccggcccccgcaggtgacgttgacgcagacacccatggtcgccctgcggcagcctcacaaccggatcatgctcaccacgcctcagcagatccagctgaacccactgcagccagtccctgtggtgaaacccgccgtgttacctggaaccaaagccctttctgctgtctcggcacaagcagctgctgcacagaaaaataaactcaaggagcctgggggaggttcgtttcgggacgatgatgacattaatgatgttgcatcgatggctggagtaaacttgtcagaagaaagtgcaagaatattagccacgaactctgaattggtgggcacgctaacgcggtcctgtaaagatgaaaccttcctcctccaagcgcctttgcagagaagaatattagaaataggtaaaaaacatggtataacggaattacatccagatgtagtaagttatgtatcacatgccacgcaacaaaggctacagaatcttgtagagaaaatatcagaaacagctcagcagaagaacttttcttacaaggatgacgacagatatgagcaggcgagtgacgtccgggcacagctcaagttttttgaacagcttgatcaaatcgaaaagcagaggaaggatgagcaggagcgggagatcctgatgagggcagcaaagtctcggtcaagacaagaagatccagaacagttaaggctgaaacagaaggcaaaggagatgcagcaacaggaactggcacaaatgagacagcgggacgccaacctcacagcactagcagcgatcgggcccaggaaaaagaggaaagtggactgtccggggccgggctcaggagcagaggggtcgggccccggctcagtggtcccaggcagctcgggtgtcggaacccccagacagttcacgcgacaaagaatcacgcgggtcaacctcagggacctcatattttgtttagaaaatgaacgtgagacaagccattcactgctgctctacaaagcattccttaagtgacacaggaggacgcctggggactttttatatatttgcagattacgcctttttgtaacgagcaaatgggatattgtttaaaaaacagccacctctttacaatggaacagttttatattcctgtttctaaatcagctcttcagtgtgaaagaaaacacgtttctgtaacagagagaacacaaaggcctgtggatactcttaaaggacaattaaatcttaactcatcttgattgagtggccttcctgccaaacaagccatatataaagactgatggaatcgttagcaaataattagctgccctctgtcaactcatagcagtttctgcattatttgtgcattttggtttagttctacctaacttactatgtaggtgtatgtctacagccgatgacctcatttcgtttattttatttttgtaatagtcagttggcaaagcaaactgattttttagactatttatcttccttcccttcccctcccaccccgctctcctctctgccccctgccctcccctcccctcccttcccctccactccgctgagaatcctggaggaatacacaattcatcgttgcacccccacctcagagtgtaatcgcatttctgcttggtagaggccgagcccagcaaaggtggctccttctgaatgtgtggtcagcatctgtacaaatgcattttatttgctatagtttgtaaagctgtaaagttaaaagagatgaaaaccttttcagcataaatatattttacttgcactgtgttttttagctaaaagtgaaaacctagattaaataaaatcaaagttgagaagaatcatcaaaagactgtttctcggtgtgaatcaagtgttgaaaaatggttggtgtattttgtcagtaattgtacataacttttggcacatgacatagaaatggctatgtaaactataattattttgctaagagactgtatgcaagccttgggccgactttacagacgtccagagcaaagccccttctttgtacctatttttttattacaaatatactaattggttctttctattttcagaggttattgtatgaaattgtctattgatagtacttttatgactgtaaatactctggctttctccgtgtgaattctcacattagactttaattcgagcgcgtgtgaactgaacgctgatcagtattttttatcaacacctgagaactgttacaccttttattttgtcttttaggaaatccctgtctttccattttttcatgtaaattttgcacagttacttgttcatatgtaaatattttactttcagaaatgaagtttttaattgctattgttttatataggattgaaagaaaattaactcctttattaaaaacaaatttatctgtatt

SEQ ID NO: 30912 - DNA, 4744 bp, Homo sapiens
  source 1..4744: mol_type = unassigned DNA
gtggctatataaacatggctggcgtggccgcgcggcggggccgtgccaatcgcgcgtagggggctgtgggcactcggggttcgtagttttgaaatttctggcgggggagcagctgcgcagttaggctcgaggtgtgagcgacgaccttccgggagccgcaagtccaggctcccccgcagcgggacccgagcctgaggcgcagggctgaggcagcgcacgtgtgagcgccgctgaggaagctgcgagaggtcgggcgggtgtcgctccgggggcagcccaggctcgcgcggacgagaggaaggtccgggacgcgcgtgtcctgccgtgcagcgggcgcccgtcactgacttcgctgctgcggcccccgcgcctctccccagcgatgctgtggaacccgaaccgcaccggagtcggctgccgcgcgccaagcctcccctcacctctgctcccggaaccgcagcgccaaagctgccgctgagcccctgggggatgcccgccggcctcaccgaacccgccggcgccgctcccccggctgctgtgagcgcctcggggaccgtgaccatggccccggccggggcgctgccggtgcgggtggagagcactccggtggccctgggcgccgtgactaaggctcctgtcagcgtctgcgtggagcccacggcgtcccagcccctgcggtcccccgtggggaccctggtgaccaaagtggctccggtcagcgcccctcctaaagtcagcagcggccctaggctgcctgctcctcagatagtcgccgtgaaagcccccaacaccacgacaatccagtttcctgctaatttgcagcttcctccaggaaccgttttgattaaaagtaacagtggtccgttgatgttggtatctcctcagcaaactgtaacaagagccgagaccacaagtaacataacctcaaggccagcagtaccagcgaatcctcaaacagtcaaaatctgtacagtgccgaactctagctcacaattaatcaagaaagtggcagtgacacctgttaaaaaattggcacaaataggaactactgtggtaaccactgttccgaagccttcctcagtacaatctgtggctgtgccaaccagtgtcgtcacagttactcctggaaagccattgaatactgtaactaccctgaagccttcaagtttgggagcatcatccactccttcaaatgagcccaatcttaaagcagagaactcagcagctgttcagattaatctttctccgacaatgctagaaaatgtgaagaaatgcaagaacttccttgcaatgttaataaaactagcatgtagtggatcacagtccccagaaatggggcaaaatgtgaagaagctggtggaacaacttttggatgcaaaaatcgaagcagaagaatttactaggaaactgtatgttgaactcaagtcttcacctcagcctcacctggttccttttcttaagaaaagcgtggttgccttacgacaacttctgcctaactcccagagcttcatccagcaatgtgttcagcagacttctagtgacatggtcattgctacctgtactacaacagtaacaacttctcctgtggtgacaactacagtgtcctcaagccagtctgaaaagtcaattattgtttctggagcaacagcacccagaactgtgtcagtgcaaactttgaacccacttgctggtccagtgggagcaaaagctggagttgtgacacttcattctgtgggcccaactgctgcaacaggaggaacaacagctggaactggtttgcttcagacttcaaaaccacttgtgacatctgtggcaaacacagtgaccacggtctcactgcaacctgaaaagccagttgtctctggaacagcagtaacactgtcccttccagcagtaacttttggagaaacttcaggtgcagctatttgtcttccatctgtgaaacctgttgtttcttctgctgggaccacatctgacaagcctgttattgggactccagttcaaatcaaacttgcccagccgggccctgtcctttcacaaccagctgggattccacaggcagttcaagtcaagcaactagtagttcagcagccttcaggaggcaatgaaaaacaagtgaccacaatttcacattcctcaacattgaccattcagaaatgtggacagaagacgatgccagtgaacaccataatacctactagtcagtttcctccagcttccattctaaagcaaattactctgcctggaaataaaattctgtcacttcaagcatctcctactcagaaaaatagaataaaagagaatgtaacatcatgcttccgagatgaggatgacatcaatgatgtgacttctatggcaggggtcaaccttaatgaagaaaatgcctgcatcttagcaacaaactctgaattggttggcacactcattcagtcatgtaaagatgaaccatttctttttattggagctctacaaaagagaattttagacattggtaaaaagcatgacattacagaacttaactctgatgctgtgaacttgatctcccaagcaacacaggaacgactacgaggccttctagaaaaactgactgcaattgctcagcatcgaatgactacttacaaggcaagtgaaaattacatcctgtgtagtgataccaggtcacagctcaaatttcttgaaaagctggatcaattggagaagcagagaaaggatttggaagaaagagaaatgttacttaaggcagccaagagtcgttctaataaagaagatccagaacagctgagattaaagcagaaagccaaagagttacagcaattggaacttgcacagatacagcatagagacgctaatctcacagctcttgcagctattggaccaaggaagaagagaccactagaatctggaattgagggcttaaaagacaaccttcttgcttctgggacatccagcctgacagccaccaaacagttgcatcgtccaagaatcacgagaatctgcctcagggacttgatattttgtatggaacaggaacgggagatgaagtattctcgagctctatacctggcccttctgaagtgaccactccactcttccatccagatccttgctatttactgccaaagaagacacaaagcattgttgcactgtcctgaaatttcaatttctggaaaataatcaccaacatgaaagagcattgtttacagttagaaactttattaactcttacctatccatctcatgggactcttacagactcagattcatctttgtcttctgaaaatcagttatgaaatacactttgcacagaattaggcatctgcctatctgtgcattaaattaaagcaagttaaggccctatttgttactacctgcctcatttgccaaattgtagcaggtgaggtgtccttccctaatacagcatgcattgagatgcaggagaaaggaagaggcataagaaaatacaagaatgactatttcattctatattgaacctgtcccaaagtggtaggttttctgggctggaatcagaagttgcttagctaactatgacagtcaccctctgtacgtgacaggccactgtggtgactttggtcggctgagttccagtgttgtcaaaacaagacaaatggggatagattgtgcctggggttgctaattctctgcttcatatcaccatatgccgtttctggtaccaagtgaggggacatgcttgtcagggaaaccttaaaattgaatctactgatatatcttgttgaaaaaatggaaaaggtgcaaagtattagaaggaacgttagggcgttgctttcaaactgatgaggggaatgtgaaaatggtatcataaaacaggaaatgtgcttcatatgcccaagaggggaagaggtggaatcggaactccaaaacaactggtacatgttttgttgatgggcaaaaaaaatcacagcacaaccagaaaggagaatgtaccagatgttttcaaattagagtatttcaaaaggaaaatgttattttttgttttgtattgttttaaatcccaaggatagtttttatagttccttctgtcataatatattttagttatcctaatttttaagcatgttggcacatttaaaaaatcctaattgatgatgagaaatttttaacaataggactttatgttggattctgtacttaaaaggtactgtcaatatctcactcttggggatatgagctctaaatatgagaagcaagttatatgtgttcacctgaggaagaagctgacggacaaagcaaaccctctttaaaaaaaaaaaaaagaaaattccacgtgtgtggaatacagccggtgaaaaataatcactgtagttagaatcacatacagaaaaaaaatgattgaatcctccaagaaggtatttcaaaaatgggaaatgctatacttataagaattgaaggaaaaaaaaaaaaacacctcacgtatgttattcttcatcctgttcttcccattgggactgttatggccatattctacagtatagtaaattttaaattggccacatttttttttgtttcagcaagttatgtaaaatgctataaattatgtgtatgttaaaggagtactttaagaagagatctttatccaaagttgtttttgtatatttaaatgcttacctttattttttgtaaagtgcagcatactcatttgtgtataatcttactgatcagatgtttaaaattattccaaatacttcattaaaataattattttatt

SEQ ID NO: 30913 - DNA, 2346 bp, Homo sapiens
  source 1..2346: mol_type = unassigned DNA
gtggctatataaacatggctggcgtggccgcgcggcggggccgtgccaatcgcgcgtagggggctgtgggcactcggggttcgtagttttgaaatttctggcgggggagcagctgcgcagttaggctcgaggtgtgagcgacgaccttccgggagccgcaagtccaggctcccccgcagcgggacccgagcctgaggcgcagggctgaggcagcgcacgtgtgagcgccgctgaggaagctgcgagaggtcgggcgggtgtcgctccgggggcagcccaggctcgcgcggacgagaggaaggtccgggacgcgcgtgtcctgccgtgcagcgggcgcccgtcactgacttcgctgctgcggcccccgcgcctctccccagcgatgctgtggaacccgaaccgcaccggagtcggctgccgcgcgccaagcctcccctcacctctgctcccggaaccgcagcgccaaagctgccgctgagcccctgggggatgcccgccggcctcaccgaacccgccggcgccgctcccccggctgctgtgagcgcctcggggaccgtgaccatggccccggccggggcgctgccggtgcgggtggagagcactccggtggccctgggcgccgtgactaaggctcctgtcagcgtctgcgtggagcccacggcgtcccagcccctgcggtcccccgtggggaccctggtgaccaaagtggctccggtcagcgcccctcctaaagtcagcagcggccctaggctgcctgctcctcagatagtcgccgtgaaagcccccaacaccacgacaatccagtttcctgctaatttgcagcttcctccaggaaccgttttgattaaaagtaacagtggtccgttgatgttggtatctcctcagcaaactgtaacaagagccgagaccacaagtaacataacctcaaggccagcagtaccagcgaatcctcaaacagtcaaaatctgtacagtgccgaactctagctcacaattaatcaagaaagtggcagtgacacctgttaaaaaattggcacaaataggaactactgtggtaaccactgttccgaagccttcctcagtacaatctgtggctgtgccaaccagtgtcgtcacagttactcctggaaagccattgaatactgtaactaccctgaagccttcaagtttgggagcatcatccactccttcaaatgagcccaatcttaaagcagagaactcagcagctgttcagattaatctttctccgacaatgctagaaaatgtgaagaaatgcaagaacttccttgcaatgttaataaaactagcatgtagtggatcacagtccccagaaatggggcaaaatgtgaagaagctggtggaacaacttttggatgcaaaaatcgaagcagaagaatttactaggaaactgtatgttgaactcaagtcttcacctcagcctcacctggttccttttcttaagaaaagcgtggttgccttacgacaacttctgcctaactcccagagcttcatccagcaatgtgttcagcagacttctagtgacatggtcattgctacctgtactacaacagtaacaacttctcctgtggtgacaactacagtgtcctcaagccagtctgaaaagtcaattattgtttctggagcaacagcacccagaactgtgtcagtgcaaactttgaacccacttgctggtccagtgggagcaaaagctggagttgtgacacttcattctgtgggcccaactgctgcaacaggaggaacaacagctggaactggtttgcttcagacttcaaaaccacttgtgacatctgtggcaaacacagtgaccacggtctcactgcaacctgaaaagccagttgtctctggaacagcagtaacactgtcccttccagcagtaacttttggagaaacttcaggtgcagctatttgtcttccatctgtgaaacctgttgtttcttctgctgggaccacatctgacaagcctgttattgggactccagttcaaatcaaacttgcccagccgggccctgtcctttcacaaccagctgggattccacaggcagttcaagtcaagcaactagtagttcagcagccttcaggaggcaatgaaaaacaagtgaccacaatttcacattcctcaacattgaccattcagaaatgtggacagaagacgatgccagtgaacaccataatacctactagtcagtttcctccagcttccattctaaagcaaattactctgcctggaaataaaattctgtcacttcaagcatctcctactcagaaaaatagaataaaagagaatgtaacatcatgcttccggtctacttttatatgcgtatattaa

SEQ ID NO: 30914 - DNA, 4753 bp, Homo sapiens
  source 1..4753: mol_type = unassigned DNA
gtggctatataaacatggctggcgtggccgcgcggcggggccgtgccaatcgcgcgtagggggctgtgggcactcggggttcgtagttttgaaatttctggcgggggagcagctgcgcagttaggctcgaggtgtgagcgacgaccttccgggagccgcaagtccaggctcccccgcagcgggacccgagcctgaggcgcagggctgaggcagcgcacgtgtgagcgccgctgaggaagctgcgagaggtcgggcgggtgtcgctccgggggcagcccaggctcgcgcggacgagaggaaggtccgggacgcgcgtgtcctgccgtgcagcgggcgcccgtcactgacttcgctgctgcggcccccgcgcctctccccagcgatgctgtggaacccgaaccgcaccggagtcggctgccgcgcgccaagcctcccctcacctctgctcccggaaccgcagcgccaaagctgccgctgagcccctgggggatgcccgccggcctcaccgaacccgccggcgccgctcccccggctgctgtgagcgcctcggggaccgtgaccatggccccggccggggcgctgccggtgcgggtggagagcactccggtggccctgggcgccgtgactaaggctcctgtcagcgtctgcgtggagcccacggcgtcccagcccctgcggtcccccgtggggaccctggtgaccaaagtggctccggtcagcgcccctcctaaagtcagcagcggccctaggctgcctgctcctcagatagtcgccgtgaaagcccccaacaccacgacaatccagtttcctgctaatttgcagcttcctccaggaaccgttttgattaaaagtaacagtggtccgttgatgttggtatctcctcagcaaactgtaacaagagccgagaccacaagtaacataacctcaaggccagcagtaccagcgaatcctcaaacagtcaaaatctgtacagtgccgaactctagctcacaattaatcaagaaagtggcagtgacacctgttaaaaaattggcacaaataggaactactgtggtaaccactgttccgaagccttcctcagtacaatctgtggctgtgccaaccagtgtcgtcacagttactcctggaaagccattgaatactgtaactaccctgaagccttcaagtttgggagcatcatccactccttcaaatgagcccaatcttaaagcagagaactcagcagctgttcagattaatctttctccgacaatgctagaaaatgtgaagaaatgcaagaacttccttgcaatgttaataaaactagcatgtagtggatcacagtccccagaaatggggcaaaatgtgaagaagctggtggaacaacttttggatgcaaaaatcgaagcagaagaatttactaggaaactgtatgttgaactcaagtcttcacctcagcctcacctggttccttttcttaagaaaagcgtggttgccttacgacaacttctgcctaactcccagagcttcatccagcaatgtgttcagcagacttctagtgacatggtcattgctacctgtactacaacagtaacaacttctcctgtggtgacaactacagtgtcctcaagccagtctgaaaagtcaattattgtttctggagcaacagcacccagaactgtgtcagtgcaaactttgaacccacttgctggtccagtgggagcaaaagctggagttgtgacacttcattctgtgggcccaactgctgcaacaggaggaacaacagctggaactggtttgcttcagacttcaaaaccacttgtgacatctgtggcaaacacagtgaccacggtctcactgcaacctgaaaagccagttgtctctggaacagcagtaacactgtcccttccagcagtaacttttggagaaacttcaggtgcagctatttgtcttccatctgtgaaacctgttgttttctgctgggaccacatcaagcctgttattgggactccagttcaaatcaaacttgcccagccgggccctgtcctttcacaaccagctgggattccacaggcagttcaagtcaagcaactattctcattgtttcaggtagttcagcagccttcaggaggcaatgaaaaacaagtgaccacaatttcacattcctcaacattgaccattcagaaatgtggacagaagacgatgccagtgaacaccataatacctactagtcagtttcctccagcttccattctaaagcaaattactctgcctggaaataaaattctgtcacttcaagcatctcctactcagaaaaatagaataaaagagaatgtaacatcatgcttccgagatgaggatgacatcaatgatgtgacttctatggcaggggtcaaccttaatgaagaaaatgcctgcatcttagcaacaaactctgaattggttggcacactcattcagtcatgtaaagatgaaccatttctttttattggagctctacaaaagagaattttagacattggtaaaaagcatgacattacagaacttaactctgatgctgtgaacttgatctcccaagcaacacaggaacgactacgaggccttctagaaaaactgactgcaattgctcagcatcgaatgactacttacaaggcaagtgaaaattacatcctgtgtagtgataccaggtcacagctcaaatttcttgaaaagctggatcaattggagaagcagagaaaggatttggaagaaagagaaatgttacttaaggcagccaagagtcgttctaataaagaagatccagaacagctgagattaaagcagaaagccaaagagttacagcaattggaacttgcacagatacagcatagagacgctaatctcacagctcttgcagctattggaccaaggaagaagagaccactagaatctggaattgagggcttaaaagacaaccttcttgcttctgggacatccagcctgacagccaccaaacagttgcatcgtccaagaatcacgagaatctgcctcagggacttgatattttgtatggaacaggaacgggagatgaagtattctcgagctctatacctggcccttctgaagtgaccactccactcttccatccagatccttgctatttactgccaaagaagacacaaagcattgttgcactgtcctgaaatttcaatttctggaaaataatcaccaacatgaaagagcattgtttacagttagaaactttattaactcttacctatccatctcatgggactcttacagactcagattcatctttgtcttctgaaaatcagttatgaaatacactttgcacagaattaggcatctgcctatctgtgcattaaattaaagcaagttaaggccctatttgttactacctgcctcatttgccaaattgtagcaggtgaggtgtccttccctaatacagcatgcattgagatgcaggagaaaggaagaggcataagaaaatacaagaatgactatttcattctatattgaacctgtcccaaagtggtaggttttctgggctggaatcagaagttgcttagctaactatgacagtcaccctctgtacgtgacaggccactgtggtgactttggtcggctgagttccagtgttgtcaaaacaagacaaatggggatagattgtgcctggggttgctaattctctgcttcatatcaccatatgccgtttctggtaccaagtgaggggacatgcttgtcagggaaaccttaaaattgaatctactgatatatcttgttgaaaaaatggaaaaggtgcaaagtattagaaggaacgttagggcgttgctttcaaactgatgaggggaatgtgaaaatggtatcataaaacaggaaatgtgcttcatatgcccaagaggggaagaggtggaatcggaactccaaaacaactggtacatgttttgttgatgggcaaaaaaaatcacagcacaaccagaaaggagaatgtaccagatgttttcaaattagagtatttcaaaaggaaaatgttattttttgttttgtattgttttaaatcccaaggatagtttttatagttccttctgtcataatatattttagttatcctaatttttaagcatgttggcacatttaaaaaatcctaattgatgatgagaaatttttaacaataggactttatgttggattctgtacttaaaaggtactgtcaatatctcactcttggggatatgagctctaaatatgagaagcaagttatatgtgttcacctgaggaagaagctgacggacaaagcaaaccctctttaaaaaaaaaaaaaagaaaattccacgtgtgtggaatacagccggtgaaaaataatcactgtagttagaatcacatacagaaaaaaaatgattgaatcctccaagaaggtatttcaaaaatgggaaatgctatacttataagaattgaaggaaaaaaaaaaaaacacctcacgtatgttattcttcatcctgttcttcccattgggactgttatggccatattctacagtatagtaaattttaaattggccacatttttttttgtttcagcaagttatgtaaaatgctataaattatgtgtatgttaaaggagtactttaagaagagatctttatccaaagttgtttttgtatatttaaatgcttacctttattttttgtaaagtgcagcatactcatttgtgtataatcttactgatcagatgtttaaaattattccaaatacttcattaaaataattattttatt

SEQ ID NO: 30915 - DNA, 3099 bp, Homo sapiens
  source 1..3099: mol_type = unassigned DNA
gcgcgaggtggctcagccgcaagatggcggcgctggcggaggagcagacggaggtggcggtcaagctagagcctgagggaccgccaacgctgctacctccgcaggcgggggacggcgcaggcgagggtagcggcggcactaccaacaacggccccaacggcggcggcgggaacgttgcggcgtcgtcgtccactggcggggatggcgggacccccaagcccacggtggctgtctccgccgctgccccggcgggggcggccccggtgcccgccgctgctccggacgccggcgctccgcatgaccgacagactctactggccgtgctgcagttcctacggcagagcaaactccgcgaggccgaagaggcgctgcgccgtgaggccgggctgctggaggaggcagtggcgggctccggagccccgggagaggtggacagcgccggcgctgaggtgaccagcgcgcttctcagccgggtgaccgcctcggcccctggccctgcggcccccgaccctccgggcactggcgcttcgggggccacggtcgtctcaggttcagcctcaggtcctgcggctccgggtaaagttggaagtgttgctgtggaagaccagccagatgtcagtgccgtgttgtcagcctacaaccaacaaggagatcccacaatgtatgaagaatactatagtggactgaaacacttcattgaatgttccctggactgccatcgggcagagttgtcccaacttttttatcctctgtttgtgcacatgtacttggagctagtctacaatcaacatgagaatgaagcaaagtcattctttgagaagttccatggagatcaggaatgttattaccaggatgacctacgagtattatctagtcttaccaaaaaggaacacatgaaagggaatgagaccatgttggattttcgaacaagtaaatttgttctgcgtatttcccgtgactcgtaccaactcttgaagaggcatcttcaggagaaacagaacaatcagatatggaacatagttcaggagcacctctacattgacatctttgatgggatgccgcgtagtaagcaacagatagatgcgatggtgggaagtttggcaggagaggctaaacgagaggcaaacaaatcaaaggtattttttggtttattaaaagaaccagaaattgaggtacctttggatgacgaggatgaagagggagaaaatgaagaaggaaaacctaaaaagaagaagcctaaaaaagatagtattggatccaaaagcaaaaaacaagatcccaatgctccacctcagaacagaatccctcttcctgagttgaaagattcagataagttggataagataatgaatatgaaagaaaccaccaaacgagtgcgccttgggccggactgcttaccctccatttgtttctatacatttctcaatgcttaccagggtctcactgcagtggatgtcactgatgattctagtctgattgctggaggttttgcagattcaactgtcagagtgtggtcggtaacacccaaaaagcttcgtagtgtcaaacaagcatcagatcttagtcttatagacaaagaatcagatgatgtcttagaaagaatcatggatgagaaaacagcaagtgagttgaagattttgtatggtcacagtgggcctgtctacggagccagcttcagtccggataggctctgggctacagaccactatcagcctttaagaatatttgccggccatcttgctgatgtgaattgtaccagattccatccaaattctaattatgttgctacgggctctgcagacagaactgtgcggctctgggacgtcctgaatggtaactgtgtaaggatcttcactggacacaagggaccaattcattccttgacattttctcccaatgggagattcctggctacaggagcaacagatggcagagtgcttctttgggatattggacatggtttgatggttggagaattaaaaggccacactgatacagtctgttcacttaggtttagtagagatggtgaaattttggcatcaggttcaatggataatacagttcgattatgggatgctatcaaagcctttgaagatttagagaccgatgactttactacagccactgggcatataaatttacctgagaattcacaggagttattgttgggaacatatatgaccaaatcaacaccagttgtacaccttcattttactcgaagaaacctggttctagctgcaggagcttatagtccacaataaaccatcggtattaaagaccttttggaagctactgtttttaaaaagggagactaaaagcaaatacctcagtgattaatatttaagctacagagaatgtttttgtctatatggatctggaagtatgctgcttggaaaaatctgaacaggacagttccacgtttctatagcaaccacatttgactaatttccgttagttgaataagaggtattatgatcatggaggggacatttatggtgctttggattgtgtggaaactatgcattttctgttcaaatgctattttaatttattacatttagaaaaaaagttgatttcaataattcatcctgcttcaagattcaaattcagaaatatactatcatcttgaattttagctgaagaatcctatgagcatgtatgtttctgctgtaaaaacgtagttactgtatggcactcaaaaactatgttaaatgatccactaactttttttttcttggcccatgattaatggaatgtatgtaactaggtagggttcctttcttagatctagaggaagtacagccacccactgacatctgaatttatatacctgttgagttttgagtgcacccaaacactcgataaaccaggtgaagaaatttagcttccatgttctacttcagctaaaacagctacatacaacctagtacacttgaagtcagacagacatttcagttgcttacctccagtactgagccttgctttgggaaactaaaagatttagaccaagtcactgccagtttttgcctttgttgcattttgtacagtttttatatttttgatatcttgtaaataaagacaaccagcttttccaggttc

SEQ ID NO: 30916 - DNA, 3268 bp, Homo sapiens
  source 1..3268: mol_type = unassigned DNA
gcgcgaggtggctcagccgcaagatggcggcgctggcggaggagcagacggaggtggcggtcaagctagagcctgagggaccgccaacgctgctacctccgcaggcgggggacggcgcaggcgagggtagcggcggcactaccaacaacggccccaacggcggcggcgggaacgttgcggcgtcgtcgtccactggcggggatggcgggacccccaagcccacggtggctgtctccgccgctgccccggcgggggcggccccggtgcccgccgctgctccggacgccggcgctccgcatgaccgacagactctactggccgtgctgcagttcctacggcagagcaaactccgcgaggccgaagaggcgctgcgccgtgaggccgggctgctggaggaggcagtggcgggctccggagccccgggagaggtggacagcgccggcgctgaggtgaccagcgcgcttctcagccgggtgaccgcctcggcccctggccctgcggcccccgaccctccgggcactggcgcttcgggggccacggtcgtctcaggttcagcctcaggtcctgcggctccgggtaaagttggaagtgttgctgtggaagaccagccagatgtcagtgccgtgttgtcagcctacaaccaacaaggagatcccacaatgtatgaagaatactatagtggactgaaacacttcattgaatgttccctggactgccatcgggcagagttgtcccaacttttttatcctctgtttgtgcacatgtacttggagctagtctacaatcaacatgagaatgaagcaaagtcattctttgagaagttccatggagatcaggaatgttattaccaggatgacctacgagtattatctagtcttaccaaaaaggaacacatgaaagggaatgagaccatgttggattttcgaacaagtaaatttgttctgcgtatttcccgtgactcgtaccaactcttgaagaggcatcttcaggagaaacagaacaatcagatatggaacatagttcaggagcacctctacattgacatctttgatgggatgccgcgtagtaagcaacagatagatgcgatggtgggaagtttggcaggagaggctaaacgagaggcaaacaaatcaaaggtattttttggtttattaaaagaaccagaaattgaggtacctttggatgacgaggatgaagagggagaaaatgaagaaggaaaacctaaaaagaagaagcctaaaaaagatagtattggatccaaaagcaaaaaacaagatcccaatgctccacctcagaacagaatccctcttcctgagttgaaagattcagataagttggataagataatgaatatgaaagaaaccaccaaacgagtgcgccttgggccggactgcttaccctccatttgtttctatacatttctcaatgcttaccagggtctcactgcagtggatgtcactgatgattctagtctgattgctggaggttttgcagattcaactgtcagagtgtggtcggtaacacccaaaaagcttcgtagtgtcaaacaagcatcagatcttagtcttatagacaaagaatcagatgatgtcttagaaagaatcatggatgagaaaacagcaagtgagttgaagattttgtatggtcacagtgggcctgtctacggagccagcttcagtccggataggaactatctgctttcctcttcagaggacggaactgttagattgtggagccttcaaacatttacttgtttggtgggatataaaggacacaactatccagtatgggacacacaattttctccatatggatattattttgtgtcagggggccatgaccgagtagctcggctctgggctacagaccactatcagcctttaagaatatttgccggccatcttgctgatgtgaattgtaccagattccatccaaattctaattatgttgctacgggctctgcagacagaactgtgcggctctgggacgtcctgaatggtaactgtgtaaggatcttcactggacacaagggaccaattcattccttgacattttctcccaatgggagattcctggctacaggagcaacagatggcagagtgcttctttgggatattggacatggtttgatggttggagaattaaaaggccacactgatacagtctgttcacttaggtttagtagagatggtgaaattttggcatcaggttcaatggataatacagttcgattatgggatgctatcaaagcctttgaagatttagagaccgatgactttactacagccactgggcatataaatttacctgagaattcacaggagttattgttgggaacatatatgaccaaatcaacaccagttgtacaccttcattttactcgaagaaacctggttctagctgcaggagcttatagtccacaataaaccatcggtattaaagaccttttggaagctactgtttttaaaaagggagactaaaagcaaatacctcagtgattaatatttaagctacagagaatgtttttgtctatatggatctggaagtatgctgcttggaaaaatctgaacaggacagttccacgtttctatagcaaccacatttgactaatttccgttagttgaataagaggtattatgatcatggaggggacatttatggtgctttggattgtgtggaaactatgcattttctgttcaaatgctattttaatttattacatttagaaaaaaagttgatttcaataattcatcctgcttcaagattcaaattcagaaatatactatcatcttgaattttagctgaagaatcctatgagcatgtatgtttctgctgtaaaaacgtagttactgtatggcactcaaaaactatgttaaatgatccactaactttttttttcttggcccatgattaatggaatgtatgtaactaggtagggttcctttcttagatctagaggaagtacagccacccactgacatctgaatttatatacctgttgagttttgagtgcacccaaacactcgataaaccaggtgaagaaatttagcttccatgttctacttcagctaaaacagctacatacaacctagtacacttgaagtcagacagacatttcagttgcttacctccagtactgagccttgctttgggaaactaaaagatttagaccaagtcactgccagtttttgcctttgttgcattttgtacagtttttatatttttgatatcttgtaaataaagacaaccagcttttccaggttcataa

SEQ ID NO: 30917 - DNA, 2727 bp, Homo sapiens
  source 1..2727: mol_type = unassigned DNA
gatggcgccgagcgccgggtgagcagcgtctcggctgccgctagagttttcctgctccccgcgctcgggtggcgggggcgggtctgagtggtaccccggaggagaccctttgaaggtcccttgtggggactggaaagaggacggttggttgtgtgtctgtgctcgtggggaccccgtgtgtgtgcctgcattggagagatgttgcaggagatggggtgggctctctgaacctcctttcgcgctgcccggggatcttcgacctgcttctctgctgggatctcgcttaagttaacccttccctgggacgccttcctgccgcctccactgatctgaggagatcctgtgactgtagcgtgttttatgagcctttactggcagagggtaccgccgggtattgaaggattcgtaggagttcgccagggaagtgggacacgaccccctcttgtaaacccggcgccaggcacagaggtctccgtctctccaccgggggcttcatccttccagggaggagaagagggactccagaatggctgaggagaagaagctgaagcttagcaacactgtgctgccctcggagtccatgaaggtggtggctgaatccatgggcatcgcccagattcaggaggagacctgccagctgctaacggatgaggtcagctaccgcatcaaagagatcgcacaggatgccttgaagttcatgcacatggggaagcggcagaagctcaccaccagtgacattgactacgccttgaagctaaagaatgtcgagccactctatggcttccacgcccaggagttcattcctttccgcttcgcctctggtgggggccgggagctttacttctatgaggagaaggaggttgatctgagcgacatcatcaatacccctctgccccgggtgcccctggacgtctgcctcaaagctcattggctgagcatcgagggctgccagccagctatccccgagaacccgcccccagctcccaaagagcaacagaaggctgaagccacagaacccctgaagtcagccaagccaggccaggaggaagacggacccctgaagggcaaaggtcaaggggccaccacagccgacggcaaagggaaagagaagaaggcgccgcccttgctggagggggcccccttgcgactgaagccccggagcatccacgagttgtctgtggagcagcagctctactacaaggagatcaccgaggcctgcgtgggctcctgcgaggccaagagggcggaagccctgcaaagcattgccacggaccctggactgtatcagatgctgccacggttcagtacctttatctcggagggggtccgtgtgaacgtggttcagaacaacctggccctactcatctacctgatgcgtatggtgaaagcgctgatggacaaccccacgctctatctagaaaaatacgtccatgagctgattccagctgtgatgacctgcatcgtgagcagacagttgtgcctgcgaccagatgtggacaatcactgggcactccgagactttgctgcccgcctggtggcccagatctgcaagcattttagcacaaccactaacaacatccagtcccggatcaccaagaccttcaccaagagctgggtggacgagaagacgccctggacgactcgttatggctccatcgcaggcttggctgagctgggacacgatgttatcaagactctgattctgccccggctgcagcaggaaggggagcggatccgcagtgtgctggacggccctgtgctgagcaacattgaccggattggagcagaccatgtgcagagcctcctgctgaaacactgtgctcctgttctggcaaagctgcgcccaccgcctgacaatcaggacgcctatcgggcagaattcgggtcccttgggcccctcctctgctcccaggtggtcaaggctcgggcccaggctgctctgcaggctcagcaggtcaacaggaccactctgaccatcacgcagccccggcccacgctgaccctctcgcaggccccacagcctggccctcgcacccctggcttgctgaaggttcctggctccatcgcacttcctgtccagacactggtgtctgcacgagcggctgccccaccacagccttcccctcctccaaccaagtttattgtaatgtcatcgtcctccagcgccccatccacccagcaggtcctgtccctcagcacctcggcccccggctcaggttccaccaccacttcgcccgtcaccaccaccgtccccagcgtgcagcccatcgtcaagttggtctccaccgccaccaccgcaccccccagcactgctccctctggtcctgggagtgtccagaagtacatcgtggtctcacttcccccaacaggggagggcaaaggaggccccacctcccatccttctccagttcctcccccggcatcgtccccgtccccactcagcggcagtgccctttgtggggggaagcaggaggctggggacagtccccctccagctccagggactccaaaagccaatggctcccagcccaactccggctcccctcagcctgctccgtgatgctccacctgccagcccccggattcccacacatgcagacatgtacacacgtgcacgtacacacatgcatgctcgctaagcggaaggaagttgtagattgcttccttcatgtcactttctttttagatattgtacagccagtttctcagaataaaagtttggtttgt

SEQ ID NO: 30918 - DNA, 537 bp, Homo sapiens
  source 1..537: mol_type = unassigned DNA
aagatggcgccgagcgccgggtgagcagcgtctcggctgccgctagagttttcctgctccccgcgctcgggtggcgggggcgggtctgagtggtaccccggaggagaccctttgaagggtttccgtctgttacccaggctgttgtgcagtggcaccatcttggctcactgcagcctccaactcctcagttcaagcgatcctcctgcctcagcctcctaagtagctgggatgacaggttcacaccaccagggtctccgtctctccaccgggggcttcatccttccagggaggagaagagggactccagaatggctgaggagaagaagctgaagcttagcaacactgtgctgccctcggagtccatgaaggtggtggctgaatccatgggcatcgcccagattcaggaggagacctgccagctgctaacggatgaggtcagctaccgcatcaaagagatcgcacaggatgccttgaagttcatgcacatggggaagcggcagaagctcaccaccagtgacattgactacgccttgaagc

SEQ ID NO: 30919 - DNA, 2680 bp, Homo sapiens
  source 1..2680: mol_type = unassigned DNA
gcggggccaagatggcgccgagcgccgggtgagcagcgtctcggctgccgctagagttttcctgctccccgcgctcgggtggcgggggcgggtctgagtggtaccccggaggagaccctttgaaggtcccttgtggggactggaaagaggacggttggttgtgtgtctgtgctcgtggggaccccgtgtgtgtgcctgcattggagagatgttgcaggagatggggtgggctctctgaacctcctttcgcgctgcccggggatcttcgacctgcttctctgctgggatctcgcttaagttaacccttccctgggacgccttcctgccgcctccactgatctgaggagatcctgtgactgtagcgtgttttatgagcctttactggcagagggtaccgccgggtattgaaggattcgtaggagttcgccagggaagtgggacacgaccccctcttgtaaacccggcgccaggcacagaggtctccgtctctccaccgggggcttcatccttccagggaggagaagagggactccagaatggctgaggagaagaagctgaagcttagcaacactgtgctgccctcggagtccatgaaggtggtggctgaatccatgggcatcgcccagattcaggaggagacctgccagctgctaacggatgaggtcagctaccgcatcaaagagatcgcacaggatgccttgaagttcatgcacatggggaagcggcagaagctcaccaccagtgacattgactacgccttgaagctaaagaatgtcgagccactctatggcttccacgcccaggagttcattcctttccgcttcgcctctggtgggggccgggagctttacttctatgaggagaaggaggttgatctgagcgacatcatcaatacccctctgccccgggtgcccctggacgtctgcctcaaagctcccaaagagcaacagaaggctgaagccacagaacccctgaagtcagccaagccaggccaggaggaagacggacccctgaagggcaaaggtcaaggggccaccacagccgacggcaaagggaaagagaagaaggcgccgcccttgctggagggggcccccttgcgactgaagccccggagcatccacgagttgtctgtggagcagcagctctactacaaggagatcaccgaggcctgcgtgggctcctgcgaggccaagagggcggaagccctgcaaagcattgccacggaccctggactgtatcagatgctgccacggttcagtacctttatctcggagggggtccgtgtgaacgtggttcagaacaacctggccctactcatctacctgatgcgtatggtgaaagcgctgatggacaaccccacgctctatctagaaaaatacgtccatgagctgattccagctgtgatgacctgcatcgtgagcagacagttgtgcctgcgaccagatgtggacaatcactgggcactccgagactttgctgcccgcctggtggcccagatctgcaagcattttagcacaaccactaacaacatccagtcccggatcaccaagaccttcaccaagagctgggtggacgagaagacgccctggacgactcgttatggctccatcgcaggcttggctgagctgggacacgatgttatcaagactctgattctgccccggctgcagcaggaaggggagcggatccgcagtgtgctggacggccctgtgctgagcaacattgaccggattggagcagaccatgtgcagagcctcctgctgaaacactgtgctcctgttctggcaaagctgcgcccaccgcctgacaatcaggacgcctatcgggcagaattcgggtcccttgggcccctcctctgctcccaggtggtcaaggctcgggcccaggctgctctgcaggctcagcaggtcaacaggaccactctgaccatcacgcagccccggcccacgctgaccctctcgcaggccccacagcctggccctcgcacccctggcttgctgaaggttcctggctccatcgcacttcctgtccagacactggtgtctgcacgagcggctgccccaccacagccttcccctcctccaaccaagtttattgtaatgtcatcgtcctccagcgccccatccacccagcaggtcctgtccctcagcacctcggcccccggctcaggttccaccaccacttcgcccgtcaccaccaccgtccccagcgtgcagcccatcgtcaagttggtctccaccgccaccaccgcaccccccagcactgctccctctggtcctgggagtgtccagaagtacatcgtggtctcacttcccccaacaggggagggcaaaggaggccccacctcccatccttctccagttcctcccccggcatcgtccccgtccccactcagcggcagtgccctttgtggggggaagcaggaggctggggacagtccccctccagctccagggactccaaaagccaatggctcccagcccaactccggctcccctcagcctgctccgtgatgctccacctgccagcccccggattcccacacatgcagacatgtacacacgtgcacgtacacacatgcatgctcgctaagcggaaggaagttgtagattgcttccttcatgtcactttctttttagatattgtacagccagtttctcagaataaaagtttggtttgt

SEQ ID NO: 30920 - DNA, 321 bp, Homo sapiens
  source 1..321: mol_type = unassigned DNA
agagttttcctgctccccgcgctcgggtggcgggggcgggtctgagtggtaccccggaggagaccctttgaaggtcccttgtggggactggaaagaggacgaagtcttgctttgttgcccaggctggagtgcaatgacacagatctttgctcactgcaacctccgcctcccgggttcgagtgattcttctgcctcagcctcccgagtagctgtgattacagggtctccgtctctccaccgggggcttcatccttccagggaggagaagagggactccagaatggctgaggagaagaagctgaagcttagcaacactgtgct

SEQ ID NO: 30921 - DNA, 2318 bp, Homo sapiens
  source 1..2318: mol_type = unassigned DNA
gttctgtgtcatcgtcctcctccttcaacatcccagcccaagcctcgtgcacggccaaaaaaaggaaaagcaatattcccaaccgcacaggtcccatgacaaagcgccgtctacaaacaatcaccgcttgccttcaacttcgggaagggtctccgtctctccaccgggggcttcatccttccagggaggagaagagggactccagaatggctgaggagaagaagctgaagcttagcaacactgtgctgccctcggagtccatgaaggtggtggctgaatccatgggcatcgcccagattcaggaggagacctgccagctgctaacggatgaggtcagctaccgcatcaaagagatcgcacaggatgccttgaagttcatgcacatggggaagcggcagaagctcaccaccagtgacattgactacgccttgaagctaaagaatgtcgagccactctatggcttccacgcccaggagttcattcctttccgcttcgcctctggtgggggccgggagctttacttctatgaggagaaggaggttgatctgagcgacatcatcaatacccctctgccccgggtgcccctggacgtctgcctcaaagctcattggctgagcatcgagggctgccagccagctatccccgagaacccgcccccagctcccaaagagcaacagaaggctgaagccacagaacccctgaagtcagccaagccaggccaggaggaagacggacccctgaagggcaaaggtcaaggggccaccacagccgacggcaaagggaaagagaagaaggcgccgcccttgctggagggggcccccttgcgactgaagccccggagcatccacgagttgtctgtggagcagcagctctactacaaggagatcaccgaggcctgcgtgggctcctgcgaggccaagagggcggaagccctgcaaagcattgccacggaccctggactgtatcagatgctgccacggttcagtacctttatctcggagggggtccgtgtgaacgtggttcagaacaacctggccctactcatctacctgatgcgtatggtgaaagcgctgatggacaaccccacgctctatctagaaaaatacgtccatgagctgattccagctgtgatgacctgcatcgtgagcagacagttgtgcctgcgaccagatgtggacaatcactgggcactccgagactttgctgcccgcctggtggcccagatctgcaagcattttagcacaaccactaacaacatccagtcccggatcaccaagaccttcaccaagagctgggtggacgagaagacgccctggacgactcgttatggctccatcgcaggcttggctgagctgggacacgatgttatcaagactctgattctgccccggctgcagcaggaaggggagcggatccgcagtgtgctggacggccctgtgctgagcaacattgaccggattggagcagaccatgtgcagagcctcctgctgaaacactgtgctcctgttctggcaaagctgcgcccaccgcctgacaatcaggacgcctatcgggcagaattcgggtcccttgggcccctcctctgctcccaggtggtcaaggctcgggcccaggctgctctgcaggctcagcaggtcaacaggaccactctgaccatcacgcagccccggcccacgctgaccctctcgcaggccccacagcctggccctcgcacccctggcttgctgaaggttcctggctccatcgcacttcctgtccagacactggtgtctgcacgagcggctgccccaccacagccttcccctcctccaaccaagtttattgtaatgtcatcgtcctccagcgccccatccacccagcaggtcctgtccctcagcacctcggcccccggctcaggttccaccaccacttcgcccgtcaccaccaccgtccccagcgtgcagcccatcgtcaagttggtctccaccgccaccaccgcaccccccagcactgctccctctggtcctgggagtgtccagaagtacatcgtggtctcacttcccccaacaggggagggcaaaggaggccccacctcccatccttctccagttcctcccccggcatcgtccccgtccccactcagcggcagtgccctttgtggggggaagcaggaggctggggacagtccccctccagctccagggactccaaaagccaatggctcccagcccaactccggctcccctcagcctgctccgtgatgctccacctgccagcccccggattcccacacatgcagacatgtacacacgtgcacgtacacacatgcatgctcgcta

SEQ ID NO: 30922 - DNA, 871 bp, Homo sapiens
  source 1..871: mol_type = unassigned DNA
ctcggctgccgctagagttttcctgctccccgcgctcgggtggcgggggcgggtctgagtggtaccccggaggagaccctttgaaggtcccttgtggggactggaaagaggacgggtctccgtctctccaccgggggcttcatccttccagggaggagaagagggactccagaatggctgaggagaagaagctgaagcttagcaacactgtgctgccctcggagtccatgaaggtggtggctgaatccatgggcatcgcccagattcaggaggagacctgccagctgctaacggatgaggtcagctaccgcatcaaagagatcgcacaggatgccttgaagttcatgcacatggggaagcggcagaagctcaccaccagtgacattgactacgccttgaagctaaagaatgtcgagccactctatggcttccacgcccaggagttcattcctttccgcttcgcctctggtgggggccgggagctttacttctatgaggagaaggaggttgatctgagcgacatcatcaatacccctctgccccgggtgcccctggacgtctgcctcaaagctcccaaagagcaacagaaggctgaagccacagaacccctgaagtcagccaagccaggccaggaggaagacggacccctgaagggcaaaggtcaaggggccaccacagccgacggcaaagggaaagagaagaaggcgccgcccttgctggagggggcccccttgcgactgaagccccggagcatccacgagttgtctgtggagcagcagctctactacaaggagatcaccgaggcctgcgtgggctcctgcgaggccaagagggcggaagccctgcaaagcattgccacggaccctggact

SEQ ID NO: 30923 - DNA, 612 bp, Homo sapiens
  source 1..612: mol_type = unassigned DNA
gttttgtggcgcctcttgaaggtcctggcagccgggtagtgaaggaataaattgcagtaattacaccaagagggagtgctccttatatatagatgtagaaacaaacttttaaaatataatttcattctgcgagcctagaggacttattctgggtctccgtctctccaccgggggcttcatccttccagggaggagaagagggactccagaatggctgaggagaagaagctgaagcttagcaacactgtgctgccctcggagtccatgaaggtggtggctgaatccatgggcatcgcccagattcaggaggagacctgccagctgctaacggatgaggtcagctaccgcatcaaagagatcgcacaggatgccttgaagttcatgcacatggggaagcggcagaagctcaccaccagtgacattgactacgccttgaagctaaagaatgtcgagccactctatggcttccacgcccaggagttcattcctttccgcttcgcctctggtgggggccgggagctttacttctatgaggagaaggaggttgatctgagcgacatcatcaatacccctctgccccgggtgcccctggacgtctgcctcaaagctcat

SEQ ID NO: 30924 - DNA, 703 bp, Homo sapiens
  source 1..703: mol_type = unassigned DNA
ctgctcccacgagggggcggggccaagatggcgccgagcgccgggtgagcagcgtctcggctgccgctagagttttcctgctccccgcgctcgggtggcgggggcgggtctgagtggtaccccggaggagaccctttgaaggtcccttgtggggactggaaagaggacgggtttccgtctgttacccaggctgttgtgcagtggcaccatcttggctcactgcagcctccaactcctcagttcaagcgatcctcctgcctcagcctcctaagtagctgggatgacaggttcacaccaccagggtctccgtctctccaccgggggcttcatccttccagggaggagaagagggactccagaatggctgaggagaagaagctgaagcttagcaacactgtgctgccctcggagtccatgaaggtggtggctgaatccatgggcatcgcccagattcaggaggagacctgccagctgctaacggatgaggtcagctaccgcatcaaagagatcgcacaggatgccttgaagttcatgcacatggggaagcggcagaagctcaccaccagtgacattgactacgccttgaagctaaagaatgtcgagccactctatggcttccacgcccaggagttcattcctttccgcttcgcctctggtgggggccgggagctttacttctatgaggagaaggaggttgatctga

SEQ ID NO: 30925 - DNA, 2297 bp, Homo sapiens
  source 1..2297: mol_type = unassigned DNA
acgagggggcggggccaagatggcgccgagcgccggggtctccgtctctccaccgggggcttcatccttccagggaggagaagagggactccagaatggctgaggagaagaagctgaagcttagcaacactgtgctgccctcggagtccatgaaggtggtggctgaatccatgggcatcgcccagattcaggaggagacctgccagctgctaacggatgaggtcagctaccgcatcaaagagatcgcacaggatgccttgaagttcatgcacatggggaagcggcagaagctcaccaccagtgacattgactacgccttgaagctaaagaatgtcgagccactctatggcttccacgcccaggagttcattcctttccgcttcgcctctggtgggggccgggagctttacttctatgaggagaaggaggttgatctgagcgacatcatcaatacccctctgccccgggtgcccctggacgtctgcctcaaagctcattggctgagcatcgagggctgccagccagctatccccgagaacccgcccccagctcccaaagagcaacagaaggctgaagccacagaacccctgaagtcagccaagccaggccaggaggaagacggacccctgaagggcaaaggtcaaggggccaccacagccgacggcaaagggaaagagaagaaggcgccgcccttgctggagggggcccccttgcgactgaagccccggagcatccacgagttgtctgtggagcagcagctctactacaaggagatcaccgaggcctgcgtgggctcctgcgaggccaagagggcggaagccctgcaaagcattgccacggaccctggactgtatcagatgctgccacggttcagtacctttatctcggagggggtccgtgtgaacgtggttcagaacaacctggccctactcatctacctgatgcgtatggtgaaagcgctgatggacaaccccacgctctatctagaaaaatacgtccatgagctgattccagctgtgatgacctgcatcgtgagcagacagttgtgcctgcgaccagatgtggacaatcactgggcactccgagactttgctgcccgcctggtggcccagatctgcaagcattttagcacaaccactaacaacatccagtcccggatcaccaagaccttcaccaagagctgggtggacgagaagacgccctggacgactcgttatggctccatcgcaggcttggctgagctgggacacgatgttatcaagactctgattctgccccggctgcagcaggaaggggagcggatccgcagtgtgctggacggccctgtgctgagcaacattgaccggattggagcagaccatgtgcagagcctcctgctgaaacactgtgctcctgttctggcaaagctgcgcccaccgcctgacaatcaggacgcctatcgggcagaattcgggtcccttgggcccctcctctgctcccaggtggtcaaggctcgggcccaggctgctctgcaggctcagcaggtcaacaggaccactctgaccatcacgcagccccggcccacgctgaccctctcgcaggccccacagcctggccctcgcacccctggcttgctgaaggttcctggctccatcgcacttcctgtccagacactggtgtctgcacgagcggctgccccaccacagccttcccctcctccaaccaagtttattgtaatgtcatcgtcctccagcgccccatccacccagcaggtcctgtccctcagcacctcggcccccggctcaggttccaccaccacttcgcccgtcaccaccaccgtccccagcgtgcagcccatcgtcaagttggtctccaccgccaccaccgcaccccccagcactgctccctctggtcctgggagtgtccagaagtacatcgtggtctcacttcccccaacaggggagggcaaaggaggccccacctcccatccttctccagttcctcccccggcatcgtccccgtccccactcagcggcagtgccctttgtggggggaagcaggaggctggggacagtccccctccagctccagggactccaaaagccaatggctcccagcccaactccggctcccctcagcctgctccgtgatgctccacctgccagcccccggattcccacacatgcagacatgtacacacgtgcacgtacacacatgcatgctcgctaagcggaaggaagttgtagattgcttccttcatgtcactttctttttagatattgtacagccagtttctcagaataaaagtttggtttgta

SEQ ID NO: 30926 - DNA, 2464 bp, Homo sapiens
  source 1..2464: mol_type = unassigned DNA
gacttgctcttaggctctgccaggacctgctcccacgagggggcggggccaagatggcgccgagcgccgggtgagcagcgtctcggctgccgctagagttttcctgctccccgcgctcgggtggcgggggcgggtctgagtggtaccccggaggagaccctttgaaggtcccttgtggggactggaaagaggacgggtctccgtctctccaccgggggcttcatccttccagggaggagaagagggactccagaatggctgaggagaagaagctgaagcttagcaacactgtgctgccctcggagtccatgaaggtggtggctgaatccatgggcatcgcccagattcaggaggagacctgccagctgctaacggatgaggtcagctaccgcatcaaagagatcgcacaggatgccttgaagttcatgcacatggggaagcggcagaagctcaccaccagtgacattgactacgccttgaagctaaagaatgtcgagccactctatggcttccacgcccaggagttcattcctttccgcttcgcctctggtgggggccgggagctttacttctatgaggagaaggaggttgatctgagcgacatcatcaatacccctctgccccgggtgcccctggacgtctgcctcaaagctcattggctgagcatcgagggctgccagccagctatccccgagaacccgcccccagctcccaaagagcaacagaaggctgaagccacagaacccctgaagtcagccaagccaggccaggaggaagacggacccctgaagggcaaaggtcaaggggccaccacagccgacggcaaagggaaagagaagaaggcgccgcccttgctggagggggcccccttgcgactgaagccccggagcatccacgagttgtctgtggagcagcagctctactacaaggagatcaccgaggcctgcgtgggctcctgcgaggccaagagggcggaagccctgcaaagcattgccacggaccctggactgtatcagatgctgccacggttcagtacctttatctcggagggggtccgtgtgaacgtggttcagaacaacctggccctactcatctacctgatgcgtatggtgaaagcgctgatggacaaccccacgctctatctagaaaaatacgtccatgagctgattccagctgtgatgacctgcatcgtgagcagacagttgtgcctgcgaccagatgtggacaatcactgggcactccgagactttgctgcccgcctggtggcccagatctgcaagcattttagcacaaccactaacaacatccagtcccggatcaccaagaccttcaccaagagctgggtggacgagaagacgccctggacgactcgttatggctccatcgcaggcttggctgagctgggacacgatgttatcaagactctgattctgccccggctgcagcaggaaggggagcggatccgcagtgtgctggacggccctgtgctgagcaacattgaccggattggagcagaccatgtgcagagcctcctgctgaaacactgtgctcctgttctggcaaagctgcgcccaccgcctgacaatcaggacgcctatcgggcagaattcgggtcccttgggcccctcctctgctcccaggtggtcaaggctcgggcccaggctgctctgcaggctcagcaggtcaacaggaccactctgaccatcacgcagccccggcccacgctgaccctctcgcaggccccacagcctggccctcgcacccctggcttgctgaaggttcctggctccatcgcacttcctgtccagacactggtgtctgcacgagcggctgccccaccacagccttcccctcctccaaccaagtttattgtaatgtcatcgtcctccagcgccccatccacccagcaggtcctgtccctcagcacctcggcccccggctcaggttccaccaccacttcgcccgtcaccaccaccgtccccagcgtgcagcccatcgtcaagttggtctccaccgccaccaccgcaccccccagcactgctccctctggtcctgggagtgtccagaagtacatcgtggtctcacttcccccaacaggggagggcaaaggaggccccacctcccatccttctccagttcctcccccggcatcgtccccgtccccactcagcggcagtgccctttgtggggggaagcaggaggctggggacagtccccctccagctccagggactccaaaagccaatggctcccagcccaactccggctcccctcagcctgctccgtgatgctccacctgccagcccccggattcccacacatgcagacatgtacacacgtgcacgtacacacatgcatgctcgctaagcggaaggaagttgtagattgcttccttcatgtcactttctttttagatattgtacagccagtttctcagaataaaagtttggtttgtaagttctga

SEQ ID NO: 30927 - DNA, 471 bp, Homo sapiens
  source 1..471: mol_type = unassigned DNA
gcggggccaagatggcgccgagcgccgggtgagcagcgtctcggctgccgctagagttttcctgctccccgcgctcgggtggcgggggcgggtctgagtggtaccccggaggagaccctttgaaggtcccttgtggggactggaaagaggacgggtttccgtctgttacccaggctgttgtgcagtggcaccatcttggctcactgcagcctccaactcctcagttcaagcgatcctcctgcctcagcctcctaagtagctgggatgacaggttcacaccaccaggctggagtgcaatgacacagatctttgctcactgcaacctccgcctcccgggttcgagtgattcttctgcctcagcctcccgagtagctgtgattacagggtctccgtctctccaccgggggcttcatccttccagggaggagaagagggactccagaatggctgaggagaagaagctgaagctta

SEQ ID NO: 30928 - DNA, 2551 bp, Homo sapiens
  source 1..2551: mol_type = unassigned DNA
tagtagagatggggtttctccatgttggccaggctggtctcgaattcctgacctcaagtgatccgcccgcctcgtcctcccaaagtgctggtgggattacaggcgtgagccactgaacctggccccagcccagatttgtatctttctctgttacacctcagggctgactcacgtggggatggacataagacactcggagttcctcccctgtctccactgtcctccctttgttggccctctccctgtgtctcacgtttctttttcttctgcctgccccgttcctctgccagggtctccgtctctccaccgggggcttcatccttccagggaggagaagagggactccagaatggctgaggagaagaagctgaagcttagcaacactgtgctgccctcggagtccatgaaggtggtggctgaatccatgggcatcgcccagattcaggaggagacctgccagctgctaacggatgaggtcagctaccgcatcaaagagatcgcacaggatgccttgaagttcatgcacatggggaagcggcagaagctcaccaccagtgacattgactacgccttgaagctaaagaatgtcgagccactctatggcttccacgcccaggagttcattcctttccgcttcgcctctggtgggggccgggagctttacttctatgaggagaaggaggttgatctgagcgacatcatcaatacccctctgccccgggtgcccctggacgtctgcctcaaagctcattggctgagcatcgagggctgccagccagctatccccgagaacccgcccccagctcccaaagagcaacagaaggctgaagccacagaacccctgaagtcagccaagccaggccaggaggaagacggacccctgaagggcaaaggtcaaggggccaccacagccgacggcaaagggaaagagaagaaggcgccgcccttgctggagggggcccccttgcgactgaagccccggagcatccacgagttgtctgtggagcagcagctctactacaaggagatcaccgaggcctgcgtgggctcctgcgaggccaagagggcggaagccctgcaaagcattgccacggaccctggactgtatcagatgctgccacggttcagtacctttatctcggagggggtccgtgtgaacgtggttcagaacaacctggccctactcatctacctgatgcgtatggtgaaagcgctgatggacaaccccacgctctatctagaaaaatacgtccatgagctgattccagctgtgatgacctgcatcgtgagcagacagttgtgcctgcgaccagatgtggacaatcactgggcactccgagactttgctgcccgcctggtggcccagatctgcaagcattttagcacaaccactaacaacatccagtcccggatcaccaagaccttcaccaagagctgggtggacgagaagacgccctggacgactcgttatggctccatcgcaggcttggctgagctgggacacgatgttatcaagactctgattctgccccggctgcagcaggaaggggagcggatccgcagtgtgctggacggccctgtgctgagcaacattgaccggattggagcagaccatgtgcagagcctcctgctgaaacactgtgctcctgttctggcaaagctgcgcccaccgcctgacaatcaggacgcctatcgggcagaattcgggtcccttgggcccctcctctgctcccaggtggtcaaggctcgggcccaggctgctctgcaggctcagcaggtcaacaggaccactctgaccatcacgcagccccggcccacgctgaccctctcgcaggccccacagcctggccctcgcacccctggcttgctgaaggttcctggctccatcgcacttcctgtccagacactggtgtctgcacgagcggctgccccaccacagccttcccctcctccaaccaagtttattgtaatgtcatcgtcctccagcgccccatccacccagcaggtcctgtccctcagcacctcggcccccggctcaggttccaccaccacttcgcccgtcaccaccaccgtccccagcgtgcagcccatcgtcaagttggtctccaccgccaccaccgcaccccccagcactgctccctctggtcctgggagtgtccagaagtacatcgtggtctcacttcccccaacaggggagggcaaaggaggccccacctcccatccttctccagttcctcccccggcatcgtccccgtccccactcagcggcagtgccctttgtggggggaagcaggaggctggggacagtccccctccagctccagggactccaaaagccaatggctcccagcccaactccggctcccctcagcctgctccgtgatgctccacctgccagcccccggattcccacacatgcagacatgtacacacgtgcacgtacacacatgcatgctcgctaagcggaaggaagttgtagattgcttccttcatgtcactttctttttagatattgtacagccagtttctcagaataaaagtttggtttgta

SEQ ID NO: 30929 - DNA, 934 bp, Homo sapiens
  source 1..934: mol_type = unassigned DNA
caagatggcgccgagcgccgggtgagcagcgtctcggctgccgctagagttttcctgctccccgcgctcgggtggcgggggcgggtctgagtggtaccccggaggagaccctttgaaggtcccttgtggggactggaaagaggacgggaggagaagagggactccagaatggctgaggagaagaagctgaagcttagcaacactgtgctgccctcggagtccatgaaggtggtggctgaatccatgggcatcgcccagattcaggaggagacctgccagctgctaacggatgaggtcagctaccgcatcaaagagatcgcacaggatgccttgaagttcatgcacatggggaagcggcagaagctcaccaccagtgacattgactacgccttgaagctaaagaatgtcgagccactctatggcttccacgcccaggagttcattcctttccgcttcgcctctggtgggggccgggagctttacttctatgaggagaaggaggttgatctgagcgacatcatcaatacccctctgccccgggtgcccctggacgtctgcctcaaagctcattggctgagcatcgagggctgccagccagctatccccgagaacccgcccccagctcccaaagagcaacagaaggctgaagccacagaacccctgaagtcagccaagccaggccaggaggaagacggacccctgaagggcaaaggtcaaggggccaccacagccgacggcaaagggaaagagaagaaggcgccgcccttgctggagggggcccccttgcgactgaagccccggagcatccacgagttgtctgtggagcagcagctctactacaaggagatcaccgaggcctgcgtgggctcctgcgaggccaagagggcggaagccctgcaaagcattgccacggaccctggactgtatcagatgc

SEQ ID NO: 30930 - DNA, 2274 bp, Homo sapiens
  source 1..2274: mol_type = unassigned DNA
gcgacccggacggagggccggcgaggtgcggggtctggtgatgcgagctgcgcctctcggcaagatttcgcgctgcccatcccgggccctttcatcagtaatcggtagtggatcactctgccaagcggcaggaagaattaaggaaacgacaaggagacgctcggctctctcccgcttggctccttgcggcctcctcttcccttcgctccggcccggtgaaactgaacttataatcgtcactggattgtaagtacccgaggcgaagagagctcgctgagccctgattttttgagtgtctttgttccgggagagtttgtgagttgaaagtatctctgctgggctttctgggccgaaaaccgttccgggggagccgccatttgctttcctgttccctagctagctagctagctctctccgcgttgtccggcagcggcacctagaggttgggacttggcattgcatctgatttaatgaacttaagtctgtgaataagcctttgtgttaacgactggtattcggtcacagcatatttagagaaaagacttggagcttaaataaaaactaaggcaaaatagacgcttagctgctgatctacagagaacttcttgtaattaaaagatttcaattcatagcaaactggtgttttaaactattgcagtagctggaactttttagtgtaaccagcatttattggagaagtgaatcacaaggaaataaagatgagtaaaagcaaagatgatgctcctcacgaactggagagccagtttatcttacgtctgcctccagaatatgcctctactgtgagaagggcagtacagtctggtcatgtcaacctcaaggacagactgacaattgagttacatcctgatgggcgtcatggaatcgtcagagtggaccgtgttccattggcctcaaaattagtagacctgccctgtgttatggaaagcttgaaaaccattgataaaaaaactttttacaagacagctgatatctgtcagatgcttgtatccacagttgatggtgatctctatcctcctgtggaggagccagttgctagcactgatcctaaagcaagcaagaaaaaggataaggacaaagagaaaaagtttatctggaaccacggaattactctgcctctaaagaatgtcaggaagagaaggttccggaagacagcaaagaagaaatatattgaatctccagatgttgaaaaagaagtgaaacgattgctgagtacagatgctgaagctgttagtactcggtgggaaataattgccgaagatgaaacaaaggaggcagaaaatcaaggcctggatatctcttctccaggaatgtctggtcacaggcagggccatgactcattagaacatgatgagcttcgggagatattcaatgacctcagcagcagcagtgaggatgaagatgagacccagcatcaagatgaagaagatataaacatcattgacacggaggaagatctggagagacagctacaggacaagctaaatgaatcagatgaacagcaccaggaaaatgaaggaaccaatcagctggttatgggaattcagaagcagattgacaacatgaaaggcaagctccaagagacccaggacagggcaaaacgacaagaggatctcatcatgaaagtggaaaatctggctctcaagaacagatttcaggctgtactggatgagctcaaacaaaaggaagaccgagaaaaggagcaactcagctctttgcaagaggagctagaatcactcctagagaagtaaaaagaactgatatttaatttcagtcttcagactggtcagcattagaaaattcttggctttattgtactgggtattaagaccttgctcttcctagtccttttaatgctgtgtgttctgttaagttctttcatttgtttgtaattttgtttttcagcaaatttatattgttttgctaggtgttcatcctataagaagcaggattgtataggcagaaaaatgattgtaggaaagttgcaggattagcggaatgtatggttcaaccttaattatagcttcattgcaggactttactgtttctccattttctagaagctgctgttgctgctttgtgatgacgtgagatcaataagaagaacctagtctagagacaatgatgctagtttgcatatgttttcctatgcaataattgttttcccagttattcaaagcagctttctatatgtagagatgcaaattattaagttgtttccaatacaataaataaaagcatctgtttttcacttta

SEQ ID NO: 30931 - DNA, 2107 bp, Homo sapiens
  source 1..2107: mol_type = unassigned DNA
atttgttcatcaaattacatcatgtaatttggattgactttggaaaatctacacatattggagaggagctaaggtaacgtctagaaataattaagttatgtcaaataaggtattgtctaactgtacacacatcattctagtgaggattatgggcaagatcttgtataatttagccagtactaccagaagtggtcaggagagggagcaagaggagtttttagtgatggttttctttttgctttcatgaactcaaaatcaagacatgagtgaaagccaggatgaagttcctgatgaagttgagaaccagtttatattgcgtctgcctctggaacatgcttgtactgtcaggaacctagcacgttctcaaagtgtcaagatgaaggataaactaaaaattgacttattgcctgatgggcgccatgcagttgttgaagtagaagatgtcccactagctgctaagctggttgacttgccttgtgttattgaaagcctgagaacgcttgataaaaaaaccttttataaaacagcagacatttctcagatgcttgtgtgcactgctgatggtgatatccacctttctccagaagaaccagctgcctctactgatcctaatatagtcaggaaaaaagaaagggggagagaagaaaaatgtgtctggaagcatggcattacgccaccacttaagaatgtcagaaagaaaaggttccggaaaacacaaaaaaaggtccctgatgtcaaagaaatggaaaaaagcagctttactgagtacattgaatctccagacgtggaaaatgaagtaaagagactgctgcgttcggatgctgaagccgtaagtacccgttgggaagtcattgctgaagatggaaccaaggaaatagaaagtcaaggctccatcccaggatttttgatatcctcgggaatgagcagccacaagcagggtcatacctcgtcagtcatggaaattcagaagcagattgagaaaaaggagaaaaagctccataagattcagaataaagcacaaagacagaaggatctcatcatgaaagtggaaaacctgacactcaagaatcattttcagtctgtgctggagcagcttgagttacaggaaaaacaaaaaaatgagaagctcatttccctacaggaacagttgcagcgttttctgaagaagtgaggagagccattggcgtggcccacaaaccttggattcaccatccagactgcagattggatgaaactgtgcacgtttttgtcccttcagttgccttatgttgaatcagttatatttatctgtaccttctttgctacttaaaatatgctcacagtttgtagtcatgtagaaaaggccagtataaaaatgtagtagacttaaagaccccactcgaccatgagactttctctttgtcaatttgggaattattattattaatttagaaatggggtcttgttatgttgcccaggctgaattcagactcctgggcttaagggatccttccgcctcagcctcctgagtagctgggactacagttgtgcaccaccacaccaaacaagaattgattatattgcttctgtgctatggtaccagcagattattcagccatgcttctaaaggcagtctagcctagaggccgtacagctgtttggtttgcatatgttttagcttttcttttggtttttagtatttcctaaaacataggggaaaaaacgaggtcatttctactaagcactaggacctgccatagtgagtttaagtgcctaccttgcagcagttaatactagattgtgttctgtctctgttcaggtaacaggactgcattcctgctcaaggatgattccttgctgctgcttatgttctgttgtttttaggatggagctggttgttattcaccaactaagggaacagttagagcagagatgaagaaattatgaactgttatccttattctgagccttctcctcctaaccctcatcagttaaggttaggaagaacaagatgccataatgcctatgaagacttctttaacaatcttgtttgggtttttttctaggtatattattagtgttttatggtctatgttctttaagcaataaataaattgttcattttaaa

SEQ ID NO: 30932 - DNA, 1579 bp, Homo sapiens
  source 1..1579: mol_type = unassigned DNA
gcgttcgcctctacgttccgcgcgggagcccacgcgcggttcgtccggaacccacagaccagagacgcaggtcccagccttttcggtgtcggcgccagttcccggaggagcggacatgagtgaaagccaggatgaagttcctgatgaagttgagaaccagtttatattgcgtctgcctctggaacatgcttgtactgtcaggaacctagcacgttctcaaagtgtcaagatgaaggataaactaaaaattgacttattgcctgatgggcgccatgcagttgttgaagtagaagatgtcccactagctgctaagctggttgacttgccttgtgttattgaaagcctgagaacgcttgataaaaaaaccttttataaaacagcagacatttctcagatgcttgtgtgcactgctgatggtgatatccacctttctccagaagaaccagctgcctctactgatcctaatatagtcaggaaaaaagaaagggggagagaagaaaaatgtgtctggaagcatggcattacgccaccacttaagaatgtcagaaagaaaaggttccggaaaacacaaaaaaaggtccctgatgtcaaagaaatggaaaaaagcagctttactgagtacattgaatctccagacgtggaaaatgaagtaaagagactgctgcgttcggatgctgaagccgtaagtacccgttgggaagtcattgctgaagatggaaccaaggaaatagaaagtcaaggctccatcccaggatttttgatatcctcgggaatgagcagccacaagcagggtcatacctcgtcagaatatgatatgcttcgggagatgttcagtgattctagaagtaacaatgatgatgatgaggatgaggatgatgaagatgaggatgaggatgaggatgaggatgaagatgaagacaaagaagaggaggaggaagattgttctgaagagtatctggaaaggcagctgcaggccgagtttattgaatctggccagtatagggcaaatgaaggtaccagttcaatagtcatggaaattcagaagcagattgagaaaaaggagaaaaagctccataagattcagaataaagcacaaagacagaaggatctcatcatgaaagtggaaaacctgacactcaagaatcattttcagtctgtgctggagcagcttgagttacaggaaaaacaaaaaaatgagaagctcatttccctacaggaacagttgcagcgttttctgaagaagtgaggagagccattggcgtggcccacaaaccttggattcaccatccagactgcagattggatgaaactgtgcacgtttttgtcccttcagttgccttatgttgaatcagttatatttatctgtaccttctttgctacttaaaatatgctcacagtttgtagtcatgtagaaaaggccagtataaaaatgtagtagacttaaagaccccactcgaccatgagactttctctttgtcaatttgggaattattattattaatttagaaatggggtcttgttatgttgcccaggctgaattcagactcctgggcttaagggatccttccgcctcagcctc

SEQ ID NO: 30933 - DNA, 2132 bp, Homo sapiens
  source 1..2132: mol_type = unassigned DNA
attttacaaccccaacgaggtgggccatggagtgccccgagggacagctccccatttcttcagaaaatgattcaacaccaacagtttcaacatcggaagtaactagccaacaagaaccccaaattcttgtcgaccgtgggtctgaaaccacctatgaaagcagcgccgacattgctggcgacgaaggcacccagattcctgccgacgaggacactcaaacggatgcggacagcagcgcccaggctgctgcccaggccccagaaaacttccaggaagggaaagacatgagtgaaagccaggatgaagttcctgatgaagttgagaaccagtttatattgcgtctgcctctggaacatgcttgtactgtcaggaacctagcacgttctcaaagtgtcaagatgaaggataaactaaaaattgacttattgcctgatgggcgccatgcagttgttgaagtagaagatgtcccactagctgctaagctggttgacttgccttgtgttattgaaagcctgagaacgcttgataaaaaaaccttttataaaacagcagacatttctcagatgcttgtgtgcactgctgatggtgatatccacctttctccagaagaaccagctgcctctactgatcctaatatagtcaggaaaaaagaaagggggagagaagaaaaatgtgtctggaagcatggcattacgccaccacttaagaatgtcagaaagaaaaggttccggaaaacacaaaaaaaggtccctgatgtcaaagaaatggaaaaaagcagctttactgagtacattgaatctccagacgtggaaaatgaagtaaagagactgctgcgttcggatgctgaagccgtaagtacccgttgggaagtcattgctgaagatggaaccaaggaaatagaaagtcaaggctccatcccaggatttttgatatcctcgggaatgagcagccacaagcagggtcatacctcgtcagtcatggaaattcagaagcagattgagaaaaaggagaaaaagctccataagattcagaataaagcacaaagacagaaggatctcatcatgaaagtggaaaacctgacactcaagaatcattttcagtctgtgctggagcagcttgagttacaggaaaaacaaaaaaatgagaagctcatttccctacaggaacagttgcagcgttttctgaagaagtgaggagagccattggcgtggcccacaaaccttggattcaccatccagactgcagattggatgaaactgtgcacgtttttgtcccttcagttgccttatgttgaatcagttatatttatctgtaccttctttgctacttaaaatatgctcacagtttgtagtcatgtagaaaaggccagtataaaaatgtagtagacttaaagaccccactcgaccatgagactttctctttgtcaatttgggaattattattattaatttagaaatggggtcttgttatgttgcccaggctgaattcagactcctgggcttaagggatccttccgcctcagcctcctgagtagctgggactacagttgtgcaccaccacaccaaacaagaattgattatattgcttctgtgctatggtaccagcagattattcagccatgcttctaaaggcagtctagcctagaggccgtacagctgtttggtttgcatatgttttagcttttcttttggtttttagtatttcctaaaacataggggaaaaaacgaggtcatttctactaagcactaggacctgccatagtgagtttaagtgcctaccttgcagcagttaatactagattgtgttctgtctctgttcaggtaacaggactgcattcctgctcaaggatgattccttgctgctgcttatgttctgttgtttttaggatggagctggttgttattcaccaactaagggaacagttagagcagagatgaagaaattatgaactgttatccttattctgagccttctcctcctaaccctcatcagttaaggttaggaagaacaagatgccataatgcctatgaagacttctttaacaatcttgtttgggtttttttctaggtatattattagtgttttatggtctatgttctttaagcaataaataaattgttcattttaaatgg

SEQ ID NO: 30934 - DNA, 2341 bp, Homo sapiens
  source 1..2341: mol_type = unassigned DNA
acgaggtgggccatggagtgccccgagggacagctccccatttcttcagaaaatgattcaacaccaacagtttcaacatcggaagtaactagccaacaagaaccccaaattcttgtcgaccgtgggtctgaaaccacctatgaaagcagcgccgacattgctggcgacgaaggcacccagattcctgccgacgaggacactcaaacggatgcggacagcagcgcccaggctgctgcccaggccccagaaaacttccaggaagggaaagacatgagtgaaagccaggatgaagttcctgatgaagttgagaaccagtttatattgcgtctgcctctggaacatgcttgtactgtcaggaacctagcacgttctcaaagtgtcaagatgaaggataaactaaaaattgacttattgcctgatgggcgccatgcagttgttgaagtagaagatgtcccactagctgctaagctggttgacttgccttgtgttattgaaagcctgagaacgcttgataaaaaaaccttttataaaacagcagacatttctcagatgcttgtgtgcactgctgatggtgatatccacctttctccagaagaaccagctgcctctactgatcctaatatagtcaggaaaaaagaaagggggagagaagaaaaatgtgtctggaagcatggcattacgccaccacttaagaatgtcagaaagaaaaggttccggaaaacacaaaaaaaggtccctgatgtcaaagaaatggaaaaaagcagctttactgagtacattgaatctccagacgtggaaaatgaagtaaagagactgctgcgttcggatgctgaagccgtaagtacccgttgggaagtcattgctgaagatggaaccaaggaaatagaaagtcaaggctccatcccaggatttttgatatcctcgggaatgagcagccacaagcagggtcatacctcgtcagaatatgatatgcttcgggagatgttcagtgattctagaagtaacaatgatgatgatgaggatgaggatgatgaagatgaggatgaggatgaggatgaggatgaagatgaagacaaagaagaggaggaggaagattgttctgaagagtatctggaaaggcagctgcaggccgagtttattgaatctggccagtatagggcaaatgaaggtaccagttcaatagtcatggaaattcagaagcagattgagaaaaaggagaaaaagctccataagattcagaataaagcacaaagacagaaggatctcatcatgaaagtggaaaacctgacactcaagaatcattttcagtctgtgctggagcagcttgagttacaggaaaaacaaaaaaatgagaagctcatttccctacaggaacagttgcagcgttttctgaagaagtgaggagagccattggcgtggcccacaaaccttggattcaccatccagactgcagattggatgaaactgtgcacgtttttgtcccttcagttgccttatgttgaatcagttatatttatctgtaccttctttgctacttaaaatatgctcacagtttgtagtcatgtagaaaaggccagtataaaaatgtagtagacttaaagaccccactcgaccatgagactttctctttgtcaatttgggaattattattattaatttagaaatggggtcttgttatgttgcccaggctgaattcagactcctgggcttaagggatccttccgcctcagcctcctgagtagctgggactacagttgtgcaccaccacaccaaacaagaattgattatattgcttctgtgctatggtaccagcagattattcagccatgcttctaaaggcagtctagcctagaggccgtacagctgtttggtttgcatatgttttagcttttcttttggtttttagtatttcctaaaacataggggaaaaaacgaggtcatttctactaagcactaggacctgccatagtgagtttaagtgcctaccttgcagcagttaatactagattgtgttctgtctctgttcaggtaacaggactgcattcctgctcaaggatgattccttgctgctgcttatgttctgttgtttttaggatggagctggttgttattcaccaactaagggaacagttagagcagagatgaagaaattatgaactgttatccttattctgagccttctcctcctaaccctcatcagttaaggttaggaagaacaagatgccataatgcctatgaagacttctttaacaatcttgtttgggtttttttctaggtatattattagtgttttatggtctatgttctttaagcaataaataaattgttcattttaaatgga

SEQ ID NO: 30935 - DNA, 1283 bp, Homo sapiens
  source 1..1283: mol_type = unassigned DNA
gcggctgggccgccggggcaggctaggggcgccgcggtgggcttcggggcctttggggccgtgggcttttgctgccgcccgccccttccggctcctccctgtagagcaaagggcacgtgagcgaggcgcccgaagccgtcgcggcggggaccatgttgcttccgaacatcctgctcaccggtacaccaggggttggaaaaaccacactaggcaaagaacttgcgtcaaaatcaggactgaaatacattaatgtgggtgatttagctcgagaagtctgatcatcggatatcatggagtctggcaagacggcttctcccaagagcatgccgaaagatgcacagatgatggcacaaatcctgaaggatatggggattacagaatatgagccaagagttataaatcagatgttggagtttgccttccgatatgtgaccacaattctagatgatgcaaaaatttattcaagccatgctaagaaagctactgttgatgcagatgatgtgcgattggcaatccagtgccgcgctgatcagtcttttacctctcctcccccaagagattttttattagatattgcaaggcaaagaaatcaaacccctttgccattgatcaagccatattcaggtcctaggttgccacctgatagatactgcttaacagctccaaactataggctgaaatctttacagaaaaaggcatcaacttctgcgggaagaataacagtcccgcggttaagtgttggttcagttactagcagaccaagtactcccacactaggcacaccaaccccacagaccatgtctgtttcaactaaagtagggactcccatgtccctcacaggtcaaaggtttacagtacagatgcctacttctcagtctccagctgtaaaagcttcaattcctgcaacctcagcagttcagaatgttctgattaatccatcattaatcgggtccaaaaacattcttattaccactaatatgatgtcatcacaaaatactgccaatgaatcatcaaatgcattgaaaagaaaacgtgaagatgatgatgatgacgatgatgatgatgatgactatgataatctgtaatctagccttgctgaatgtaacatgtatacttggtcttgaattcattgtactgatattaaacatgcatgctggatgttttcaagttgtgttttagaaaactaataataatgagtaaacacagttaccatacttttcaattgaaatgaaggtttttcatcagccttaaaagtgtaagaaaaataaagttgtcattcattc

SEQ ID NO: 30936 - DNA, 1461 bp, Homo sapiens
  source 1..1461: mol_type = unassigned DNA
cccaggaaagcttgaaggcagagatagactcacgtctctaagacatatacataatatagccgcaaccgcggcggccttactttcccggagctgcatccccttttaggcgaagagcggaggcgaccagggactaccctaggtgaaagggcagccacctggccctacccgggctcaacgccgagcctctcggaggtacggcctcccggggaccttccagactggtcggcgcaagcgaagggcggggaccaccgaaggagtgtgtgacttaggcatccagcgcactgcctgacccgaagtaccgacccgagttatgcccaccctccaactttgcgacggaaatgtgtcatcgaaagccaggtacaccaggggttggaaaaaccacactaggcaaagaacttgcgtcaaaatcaggactgaaatacattaatgtgggtgatttagctcgagaagtctgatcatcggatatcatggagtctggcaagacggcttctcccaagagcatgccgaaagatgcacagatgatggcacaaatcctgaaggatatggggattacagaatatgagccaagagttataaatcagatgttggagtttgccttccgatatgtgaccacaattctagatgatgcaaaaatttattcaagccatgctaagaaagctactgttgatgcagatgatgtgcgattggcaatccagtgccgcgctgatcagtcttttacctctcctcccccaagagattttttattagatattgcaaggcaaagaaatcaaacccctttgccattgatcaagccatattcaggtcctaggttgccacctgatagatactgcttaacagctccaaactataggctgaaatctttacagaaaaaggcatcaacttctgcgggaagaataacagtcccgcggttaagtgttggttcagttactagcagaccaagtactcccacactaggcacaccaaccccacagaccatgtctgtttcaactaaagtagggactcccatgtccctcacaggtcaaaggtttacagtacagatgcctacttctcagtctccagctgtaaaagcttcaattcctgcaacctcagcagttcagaatgttctgattaatccatcattaatcgggtccaaaaacattcttattaccactaatatgatgtcatcacaaaatactgccaatgaatcatcaaatgcattgaaaagaaaacgtgaagatgatgatgatgacgatgatgatgatgatgactatgataatctgtaatctagccttgctgaatgtaacatgtatacttggtcttgaattcattgtactgatattaaacatgcatgctggatgttttcaagttgtgttttagaaaactaataataatgagtaaacacagttaccatacttttcaattgaaatgaaggtttttcatcagccttaaaagtgtaagaaaaataaagttgtcattcattcg

SEQ ID NO: 30937 - DNA, 1183 bp, Homo sapiens
  source 1..1183: mol_type = unassigned DNA
cccaggaaagcttgaaggcagagatagactcacgtctctaagacatatacataatatagccgcaaccgcggcggccttactttcccggagctgcatccccttttaggcgaagagcggaggcgaccagggactaccctaggtgaaagggcagccacctggccctacccgggctcaacgccgagcctctcggaggtacggcctcccggggaccttccagactggtcggcgcaagcgaagggcggggaccaccgaaggagtgtgtgacttaggcatccagcgcactgcctgacccgaagtaccgacccgagttatgcccaccctccaactttgcgacggaaatgtgtcatcgaaagccaggtacaccaggggttggaaaaaccacactaggcaaagaacttgcgtcaaaatcaggactgaaatacattaatgtgggtgatttagctcgagaagagcaattgtatgatggctatgatgaagagtatgactgtcccattttagatgaagacagagtagttgatgagttagataaccaaatgagagaaggtggagttattgttgattaccatggttgtgatttcttccctgaacgctggtttcatatagtttttgtgctgagaacagataccaatgtattgtacgaaagacttgaaacaaggggttataatgagaagaaactaacagacaatattcagtgtgagatttttcaagttctttatgaagaagccacagcatcctacaaggaagaaatcgtgcatcagctgcccagtaataaaccagaagagctagaaaataatgtagatcagatcttgaaatggattgagcagtggatcaaagatcataactcttgacttataaggctagctacttaataatcactcttgttgatatctctgccgacatcatagaaattgttcaagtgtcagtaacactttattaaaatcatgttgcagaaccagcaggtggatagtatataggtttatgcctgtgtttctttttctccatgagaaagctaaacatgaaatataatgaatatagtattattaaggattgagacaaaaactgtgattttaatacttaaattgctaaagaataaataaatctgacaaaatgggtggatatcttttaagtttattacagaaaaaaatgcagatgatctcttaaaataaaactaaagataaagcaa

SEQ ID NO: 30938 - DNA, 1648 bp, Homo sapiens
  source 1..1648: mol_type = unassigned DNA
gtagagcaaagggcacgtgagcgaggcgcccgaagccgtcgcggcggggaccatgttgcttccgaacatcctgctcaccggtacaccaggggttggaaaaaccacactaggcaaagaacttgcgtcaaaatcaggactgaaatacattaatgtgggtgatttagctcgagaagagcaattgtatgatggctatgatgaagagtatgactgtcccattttagatgaagacagagtagttgatgagttagataaccaaatgagagaaggtggagttattgttgattaccatggttgtgatttcttccctgaacgctggtttcatatagtttttgtgctgagaacagataccaatgtattgtacgaaagacttgaaacaaggggttataatgagaagaaactaacagacaatattcagtgtgagatttttcaagttctttatgaagaagccacagcatcctacaaggaagaaatcgtgcatcagctgcccagtaataaaccagaagagctagaaaataatgtagatcagatcttgaaatggattgagcagtggatcaaagatcataactcttgacttataaggctagctacttaataatcactcttgttgatatctctgccgacatcatagaaattgttcaagtgtcagtaacactttattaaaatcatgttgcagaaccagcaggtggatagtatataggtttatgcctgtgtttctttttctccatgagaaagctaaacatgaaatataatgaatatagtattattaaggattgagacaaaaactgtgattttaatacttaaattgctaaagaataaataaatctgacaaaatgggtggatatcttttaagtttattacagaaaaaaatgcagatgatctcttaaaataaaactaaagataaagcaacagagtattccttttttctttctttaaattagaaaaaaagttaagtgttgtactcgatacaaagttcaaaaggtacaaaagagcatgttgaaaagttaggtctcccttccagaccaccctatccccaggcaccccaggttccttccctttaggaaataatgttactggtttcctatatgtctttttagaggttttatgcctgcacagtgtatatgtacatgtgtacattttttaaagaatataacagtatattatgcacactattctgtacctttcttttttcacttactatatttgaagattatatcatctcagtacagacctccctgttcttttttttagttgagatagatatacatatcatacaataaaatttaccattttgaagtgtataatcagaaccgggtatggtggcttatgcctgtaatcccagcaaatggggaggctgaggtggagaatcgcttgaggcaggagttcaagaccagcctgggcaacatagtgagaccttagactctaaaaataaacataaataaaatttataatccgttggtttttagcttattaacaaggttatgtaactgtcaccactgtggaggaagcagtgatgataaagggaactcctataccctttagcagtcactctctattctttcctcctcatccccttgcagtcactagtctactttctgtctctatggatttgcatattctggatatttcatataaatgggattatacagta

SEQ ID NO: 30939 - DNA, 966 bp, Homo sapiens
  source 1..966: mol_type = unassigned DNA
atgttgcttccgaacatcctgctcaccggtcagggcgcgcggccgggagggactgggctggggcaggctgggggcgcagagtgctctgggcatcgggcgcccaggtgggggcccctcactgccctcttcagaggccggccgagggccacgaggcggttgtcagcgccccgggagccgaccctcgcgggcgttgcgggaggcgagggaggggacgcggaacgttaattccgttggcctgaggctccgggggggggcgggggggggtacaccaggggttggaaaaaccacactaggcaaagaacttgcgtcaaaatcaggactgaaatacattaatgtgggtgatttagctcgagaagtctgatcatcggatatcatggagtctggcaagacggcttctcccaagagcatgccgaaagatgcacagatgatggcacaaatcctgaaggatatggggattacagaatatgagccaagagttataaatcagatgttggagtttgccttccgatatgtgaccacaattctagatgatgcaaaaatttattcaagccatgctaagaaagctactgttgatgcagatgatgtgcgattggcaatccagtgccgcgctgatcagtcttttacctctcctcccccaagagattttttattagatattgcaaggcaaagaaatcaaacccctttgccattgatcaagccatattcaggtcctaggttgccacctgatagatactgcttaacagctccaaactataggctgaaatctttacagaaaaaggcatcaacttctgcgggaagaataacagtcccgcggttaagtgttggttcagttactagcagaccaagtactcccacactaggcacaccaaccccacagaccatgtctgtttcaactaaagtagggactcccatgtccctcacaggtcaaaggtttacagtacagatgcctacttctcagtctccagc

SEQ ID NO: 30940 - DNA, 588 bp, Homo sapiens
  source 1..588: mol_type = unassigned DNA
tacacgcgcgagccaccacacgtggccatgaacagtttttaaatctttataagttaaagcaaataggccaggtacaccaggggttggaaaaaccacactaggcaaagaacttgcgtcaaaatcaggactgaaatacattaatgtgggtgatttagctcgagaagtctgatcatcggatatcatggagtctggcaagacggcttctcccaagagcatgccgaaagatgcacagatgatggcacaaatcctgaaggatatggggattacagaatatgagccaagagttataaatcagatgttggagtttgccttccgatatgtgaccacaattctagatgatgcaaaaatttattcaagccatgctaagaaagctactgttgatgcagatgatgtgcgattggcaatccagtgccgcgctgatcagtcttttacctctcctcccccaagagattttttattagatattgcaaggcaaagaaatcaaacccctttgccattgatcaagccatattcaggtcctaggttgccacctgatagatactgcttaacagctccaaactataggctgaaatctttacagaaaaaggc

SEQ ID NO: 30941 - DNA, 1331 bp, Homo sapiens
  source 1..1331: mol_type = unassigned DNA
gtgccactgcactccagcctgggcgacaagagtgaaactctgtctcaaaaaaaaaattttacatatgattgctaattaggaaatttttcatttcagtcgtcaagaacttttaagggcagaggccaggtgagactctgtctcaaaaataaaaggaaaggcagaaggtggaccgcagtgtgataagtagtatttcacaaacagtatttttctgtggcttgtcttacaggtacaccaggggttggaaaaaccacactaggcaaagaacttgcgtcaaaatcaggactgaaatacattaatgtgggtgatttagctcgagaagtctgatcatcggatatcatggagtctggcaagacggcttctcccaagagcatgccgaaagatgcacagatgatggcacaaatcctgaaggatatggggattacagaatatgagccaagagttataaatcagatgttggagtttgccttccgatatgtgaccacaattctagatgatgcaaaaatttattcaagccatgctaagaaagctactgttgatgcagatgatgtgcgattggcaatccagtgccgcgctgatcagtcttttacctctcctcccccaagagattttttattagatattgcaaggcaaagaaatcaaacccctttgccattgatcaagccatattcaggtcctaggttgccacctgatagatactgcttaacagctccaaactataggctgaaatctttacagaaaaaggcatcaacttctgcgggaagaataacagtcccgcggttaagtgttggttcagttactagcagaccaagtactcccacactaggcacaccaaccccacagaccatgtctgtttcaactaaagtagggactcccatgtccctcacaggtcaaaggtttacagtacagatgcctacttctcagtctccagctgtaaaagcttcaattcctgcaacctcagcagttcagaatgttctgattaatccatcattaatcgggtccaaaaacattcttattaccactaatatgatgtcatcacaaaatactgccaatgaatcatcaaatgcattgaaaagaaaacgtgaagatgatgatgatgacgatgatgatgatgatgactatgataatctgtaatctagccttgctgaatgtaacatgtatacttggtcttgaattcattgtactgatattaaacatgcatgctggatgttttcaagttgtgttttagaaaactaataataatgagtaaacacagttaccatacttttcaattgaaatgaaggtttttcatcagccttaaaagtgtaagaaaaataaagttgtcattcattcga

SEQ ID NO: 30942 - DNA, 754 bp, Homo sapiens
  source 1..754: mol_type = unassigned DNA
atttcgtttgtaaaatgggttgttgattctttggcagggttggccttgggatttttagcgaaataacgtaaggccatatctgcttcccggtagagtcattaatggtggatgcctcactccttaggcctccgtgggccgtattttattttttctttgcttctgataaacgcctcagattagatttcggtaaacgagttcagatgtttgtgacgtgacgaaattgctgtatgcttttgttgagttacatcaaaggatccccccgccccttaaaaggaaggcatatagagcatttcgggtcgtttctcgcgtaggagtgggtctttgaagccatactcagggtacaccaggggttggaaaaaccacactaggcaaagaacttgcgtcaaaatcaggactgaaatacattaatgtgggtgatttagctcgagaagtctgatcatcggatatcatggagtctggcaagacggcttctcccaagagcatgccgaaagatgcacagatgatggcacaaatcctgaaggatatggggattacagaatatgagccaagagttataaatcagatgttggagtttgccttccgatatgtgaccacaattctagatgatgcaaaaatttattcaagccatgctaagaaagctactgttgatgcagatgatgtgcgattggcaatccagtgccgcgctgatcagtcttttacctctcctcccccaagagattttttattagatattgcaaggcaaagaaatcaaacc

SEQ ID NO: 30943 - DNA, 761 bp, Homo sapiens
  source 1..761: mol_type = unassigned DNA
ccgaccctcgcgggcgttgcgggaggcgagggaggggacgcggaacgttaattccgttggcctgaggctccgggggggggcgggggggggtggagagaggtcggcagatccagctctccagcttggcaacctgcttagtctttctgaatctggtacaccaggggttggaaaaaccacactaggcaaagaacttgcgtcaaaatcaggactgaaatacattaatgtgggtgatttagctcgagaagtctgatcatcggatatcatggagtctggcaagacggcttctcccaagagcatgccgaaagatgcacagatgatggcacaaatcctgaaggatatggggattacagaatatgagccaagagttataaatcagatgttggagtttgccttccgatatgtgaccacaattctagatgatgcaaaaatttattcaagccatgctaagaaagctactgttgatgcagatgatgtgcgattggcaatccagtgccgcgctgatcagtcttttacctctcctcccccaagagattttttattagatattgcaaggcaaagaaatcaaacccctttgccattgatcaagccatattcaggtcctaggttgccacctgatagatactgcttaacagctccaaactataggctgaaatctttacagaaaaaggcatcaacttctgcgggaagaataacagtcccgcggttaagtgttggttcagttactagcagaccaagtactcccacactaggcacaccaaccc

SEQ ID NO: 30944 - DNA, 582 bp, Homo sapiens
  source 1..582: mol_type = unassigned DNA
acatcctgctcaccggtcagggcgcgcggccgggagggactgggctggggcaggctgggggcgcagagtgctctgggcatcgggcgcccaggtacaccaggggttggaaaaaccacactaggcaaagaacttgcgtcaaaatcaggactgaaatacattaatgtgggtgatttagctcgagaagtctgatcatcggatatcatggagtctggcaagacggcttctcccaagagcatgccgaaagatgcacagatgatggcacaaatcctgaaggatatggggattacagaatatgagccaagagttataaatcagatgttggagtttgccttccgatatgtgaccacaattctagatgatgcaaaaatttattcaagccatgctaagaaagctactgttgatgcagatgatgtgcgattggcaatccagtgccgcgctgatcagtcttttacctctcctcccccaagagattttttattagatattgcaaggcaaagaaatcaaacccctttgccattgatcaagccatattcaggtcctaggttgccacctgatagatactgcttaacagctccaaactat

SEQ ID NO: 30945 - DNA, 2713 bp, Homo sapiens
  source 1..2713: mol_type = unassigned DNA
cctcctcccgctccccgcaggggtggagcctgagcgaggagcccgcgagctctcctctctcctctgtctccgcggatgacgagtggctggataacatggagtcgggcaagatggcgcctcccaagaacgctccgagagatgccttggtgatggcacagatcctgaaggatatgggaatcacagagtatgaaccaagggttataaatcaaatgttggaatttgctttccgttatgtgactacaattctggatgatgcaaaaatttattcgagccatgctaagaaacctaatgttgatgcagatgatgtgagactggcaatccagtgtcgtgctgaccaatcttttacctctcctcccccaagagattttttactggatatcgcaaggcagaaaaatcaaacccctttgccactgattaagccatatgcaggacctagactgccacctgatagatactgcttaacagctccaaactataggctgaagtccttaattaaaaagggacctaaccaagggagactagttccacgattaagtgttggtgctgttagtagcaaacctactactcctactatagcaaccccacaaacggtgtctgtcccaaataaagttgcaactccaatgtcagtgacaagccaaagatttacggtgcagattccaccttctcagtccacacctgtcaaaccagttcctgcaacaactgcagttcaaaatgttctgattaatccttcaatgattgggcccaaaaatattcttattaccaccaacatggtttcgtcacagaacacagccaatgaagcaaacccactgaagagaaaacatgaagatgatgatgacaatgatattatgtaaggaatatagtctagtctagatgcatttcaaaaggaaagttggttttgagcccagtatactgaactagaatattctagatcttgttttaccttaaaagactgaaatgtagctgcagtatttttcgtcagttaaaactgttagatctctttagtaaacatacaaatgtgtttttcagtaggcttcaattacaaacagttaagtacttgtttcttaatagtttcattaatgttgagtcctaatatggcaattctgtttttgagacacttttctgccttctatcactgatagtagcatttaagtttcagattctacagcctagtcagcagatttatctttgacagcataatttctgatctacatttaaatactactttattttataaggtaatatagttacttactgtcactagctaatttttttttttttaccaaatctctcaatataggaaacattttttggaaaggatggatttagaggagagattctaaatccattttggatgtatttgtttctttgacttccttaacttccaaactcaactccctttctagatcccattcattttctgcacctcccccataggcttgtttctctccattgctattaaatgtagaaggccatacctggaattttaaaaatattattcctggtaatacagctcagtgtcattttcctatttttaaaacatgctctacatgcctaatgttttgtgattcactttaacctgatggtttgcatttgctgtttttcactcttatgtcagagcagttgggttttaccccttagtttttatgcctgttaagctttactgtgcttttgacaggtagttttgggtcagttatattcagttttagtattgtattccaagttgataactcttccatgtttcacatttctaaatttaacagagatgctgtagcttaaaacatgttttgataagtaattacactggacctaggcaaaaccactgaagaacaagtgttcctttttaccacatacatattatgttttgatcactgctgcttgagccccgctattggtataattcagatcattttagcttgttgctgaggatgtcacatataagacaggatcaaacctgaaagacactaatggttcatcctctataaggccaacaaagaaaacaaattaatgtgatgtaacttgcatttatgtgcactctgcataggtttcccaataatactgtaatgttgctgaacacctttccctgttttccatttatacacatattaaagtcatattgggaaagatggcaaagcttttgagaatataaacacacctgttttgtttttcttaagttcaacatacttttgtagaatttgtaaaataaatgttcgtatcataattgagaatttatagccaaggatcctcaaaacagaagtttcatcttaggatagtgtttgatatatctaagaaagtccagtaacagagaagaaatgtctcaaatgtctcgtatcagttttagtgtttttcagtattagggaaaggtaatataaaaacaggtaaaatgtataaaaatagacctgatcaacatcataggagataaatattcattatatagcataggatattattacttgaatgttctcagggaggcagcaagtcagaaggcctaggttctagtcctagctccatcatttaccaactgtgtgaccttacttcacctcttagccttgttctcctcactagcagtaggaaagtaacacctaccctgcctacctcacagggctgttgtgagggttcaattggtatatgtgaaaattctttcagaattgtaaaatgctatatgactgtaaggaattattgcatttgttccaaggttaataaaaatttgagctta

SEQ ID NO: 30946 - DNA, 1890 bp, Homo sapiens
  source 1..1890: mol_type = unassigned DNA
ccgggccggggtgccagcgcccgccttcccgtttcctcccgttccgcagcgcgcccacggcctgtgaccccggcgaccgctccccagtgacgagagagcggggccgggcgctgctccggcctgacctgcgaagggacctcggtccagtcccctgttgcgccgcgccccctgtccgtccgtgcgcgggccagtcaggggccagtgtctcgagcggtcgaggtcgcagacctagaggcgccccacaggccggcccggggcgctgggagcgccggccgcgggccgggtggggatgcctctgcacgtgaagtggccgttccccgcggtgccgccgctcacctggaccctggccagcagcgtcgtcatgggcttggtgggcacctacagctgcttctggaccaagtacatgaaccacctgaccgtgcacaacagggaggtgctgtacgagctcatcgagaagcgaggcccggccacgcccctcatcaccgtgtccaatcaccagtcctgcatggacgaccctcatctctgggggatcctgaaactccgccacatctggaacctgaagttgatgcgttggacccctgcagctgcagacatctgcttcaccaaggagctacactcccacttcttcagcttgggcaagtgtgtgcctgtgtgccgaggagcagaatttttccaagcagagaatgaggggaaaggtgttctagacacaggcaggcacatgccaggtgctggaaaaagaagagagaaaggagatggcgtctaccagaaggggatggacttcattttggagaagctcaaccatggggactgggtgcatatcttcccagaagggaaagtgaacatgagttccgaattcctgcgtttcaagtggggaatcgggcgcctgattgctgagtgtcatctcaaccccatcatcctgcccctgtggcatgtcggaatgaatgacgtccttcctaacagtccgccctacttcccccgctttggacagaaaatcactgtgctgatcgggaagcccttcagtgccctgcctgtactcgagcggctccgggcggagaacaagtcggctgtggagatgcggaaagccctgacggacttcattcaagaggaattccagcatctgaagactcaggcagagcagctccacaaccacctccagcctgggagataggccttgcttgctgccttctggattcttggcccgcacagagctggggctgagggatggactgatgcttttagctcaaacgtggcttttagacagatttgttcatagaccctctcaagtgccctctccgagctggtaggcattccagctcctccgtgcttcctcagttacacaaaggacctcagctgcttctcccacttggccaagcagggaggaagaagcttaggcagggctctctttccttcttgccttcagatgttctctcccaggggctggcttcaggagggagcatagaaggcaggtgagcaaccagttggctaggggagcagggggcccaccagagctgtggagaggggaccctaagactcctcggcctggctcctacccaccgcccttgccgaaccaggagctgctcactacctcctcagggatggccgttggccacgtcttccttctgcctgagcttccccccgaccacaggccctttcctcaggcaaggtctggcctcaggtgggccgcaggcgggaaaagcagcccttggccagaagtcaagcccagccacgtggagcctagagtgagggcctgaggtctggctgcttgcccccatgctggcgccaacaacttctccatcctttctgcctctcaacatcacttgaatcctagggcctgggttttcatgtttttgaaacagaaccataaagcatatgtgttggcttgttgtaaaa

SEQ ID NO: 30947 - DNA, 1794 bp, Homo sapiens
  source 1..1794: mol_type = unassigned DNA
ccgggccggggtgccagcgcccgccttcccgtttcctcccgttccgcagcgcgcccacggcctgtgaccccggcgaccgctccccagtgacgagagagcggggccgggcgctgctccggcctgacctgcgaagggacctcggtccagtcccctgttgcgccgcgccccctgtccgtccgtgcgcgggccagtcaggggccagtgtctcgagcggtcgaggtcgcagacctagaggcgccccacaggccggcccggggcgctgggagcgccggccgcgggccgggtggggatgcctctgcacgtgaagtggccgttccccgcggtgccgccgctcacctggaccctggccagcagcgtcgtcatgggcttggtgggcacctacagctgcttctggaccaagtacatgaaccacctgaccgtgcacaacagggaggtgctgtacgagctcatcgagaagcgaggcccggccacgcccctcatcaccgtgtccaatcaccagtcctgcatggacgaccctcatctctgggggatcctgaaactccgccacatctggaacctgaagttgatgcgttggacccctgcagctgcagacatctgcttcaccaaggagctacactcccacttcttcagcttgggcaagtgtgtgcctgtgtgccgaggagatggcgtctaccagaaggggatggacttcattttggagaagctcaaccatggggactgggtgcatatcttcccagaagggaaagtgaacatgagttccgaattcctgcgtttcaagtggggaatcgggcgcctgattgctgagtgtcatctcaaccccatcatcctgcccctgtggcatgtcggaatgaatgacgtccttcctaacagtccgccctacttcccccgctttggacagaaaatcactgtgctgatcgggaagcccttcagtgccctgcctgtactcgagcggctccgggcggagaacaagtcggctgtggagatgcggaaagccctgacggacttcattcaagaggaattccagcatctgaagactcaggcagagcagctccacaaccacctccagcctgggagataggccttgcttgctgccttctggattcttggcccgcacagagctggggctgagggatggactgatgcttttagctcaaacgtggcttttagacagatttgttcatagaccctctcaagtgccctctccgagctggtaggcattccagctcctccgtgcttcctcagttacacaaaggacctcagctgcttctcccacttggccaagcagggaggaagaagcttaggcagggctctctttccttcttgccttcagatgttctctcccaggggctggcttcaggagggagcatagaaggcaggtgagcaaccagttggctaggggagcagggggcccaccagagctgtggagaggggaccctaagactcctcggcctggctcctacccaccgcccttgccgaaccaggagctgctcactacctcctcagggatggccgttggccacgtcttccttctgcctgagcttccccccgaccacaggccctttcctcaggcaaggtctggcctcaggtgggccgcaggcgggaaaagcagcccttggccagaagtcaagcccagccacgtggagcctagagtgagggcctgaggtctggctgcttgcccccatgctggcgccaacaacttctccatcctttctgcctctcaacatcacttgaatcctagggcctgggttttcatgtttttgaaacagaaccataaagcatatgtgttggcttgtt

SEQ ID NO: 30948 - DNA, 1793 bp, Homo sapiens
  source 1..1793: mol_type = unassigned DNA
cgcgcccacggcctgtgaccccggcgaccgctccccagtgacgagagagcggggccgggcgctgctccggcctgacctgcgaagggacctcggtccagtcccctgttgcgccgcgccccctgtccgtccgtgcgcgggccagtcaggggccagtgtctcgagcggtcgaggtcgcagacctagaggcgccccacaggccggcccggggcgctgggagcgccggccgcgggccgggtggggatgcctctgcacgtgaagtggccgttccccgcggtgccgccgctcacctggaccctggccagcagcgtcgtcatgggcttggtgggcacctacagctgcttctggaccaagtacatgaaccacctgaccgtgcacaacagggaggtgctgtacgagctcatcgagaagcgaggcccggccacgcccctcatcaccgtgtccaatcaccagtcctgcatggacgaccctcatctctgggggatcctgaaactccgccacatctggaacctgaagttgatgcgttggacccctgcagctgcagacatctgcttcaccaaggagctacactcccacttcttcagcttgggcaagtgtgtgcctgtgtgccgaggagcagaatttttccaagcagagaatgaggggaaaggtgttctagacacaggcaggcacatgccaggtgctggaaaaagaagagagaaaggagatggcgtctaccagaaggggatggacttcattttggagaagctcaaccatggggactgggtgcatatcttcccagaaggaatcgggcgcctgattgctgagtgtcatctcaaccccatcatcctgcccctgtggcatgtcggaatgaatgacgtccttcctaacagtccgccctacttcccccgctttggacagaaaatcactgtgctgatcgggaagcccttcagtgccctgcctgtactcgagcggctccgggcggagaacaagtcggctgtggagatgcggaaagccctgacggacttcattcaagaggaattccagcatctgaagactcaggcagagcagctccacaaccacctccagcctgggagataggccttgcttgctgccttctggattcttggcccgcacagagctggggctgagggatggactgatgcttttagctcaaacgtggcttttagacagatttgttcatagaccctctcaagtgccctctccgagctggtaggcattccagctcctccgtgcttcctcagttacacaaaggacctcagctgcttctcccacttggccaagcagggaggaagaagcttaggcagggctctctttccttcttgccttcagatgttctctcccaggggctggcttcaggagggagcatagaaggcaggtgagcaaccagttggctaggggagcagggggcccaccagagctgtggagaggggaccctaagactcctcggcctggctcctacccaccgcccttgccgaaccaggagctgctcactacctcctcagggatggccgttggccacgtcttccttctgcctgagcttccccccgaccacaggccctttcctcaggcaaggtctggcctcaggtgggccgcaggcgggaaaagcagcccttggccagaagtcaagcccagccacgtggagcctagagtgagggcctgaggtctggctgcttgcccccatgctggcgccaacaacttctccatcctttctgcctctcaacatcacttgaatcctagggcctgggttttcatgtttttgaaacagaaccataaagcatatgtgttggcttgtt

SEQ ID NO: 30949 - DNA, 1740 bp, Homo sapiens
  source 1..1740: mol_type = unassigned DNA
tttccggcggttgcaccgggccggggtgccagcgcccgccttcccgtttcctcccgttccgcagcgcgcccacggcctgtgaccccggcgaccgctccccagtgacgagagagcggggccgggcgctgctccggcctgacctgcgaagggacctcggtccagtcccctgttgcgccgcgccccctgtccgtccgtgcgcgggccagtcaggggccagtgtctcgagcggtcgaggtcgcagacctagaggcgccccacaggccggcccggggcgctgggagcgccggccgcgggccgggtggggatgcctctgcacgtgaagtggccgttccccgcggtgccgccgctcacctggaccctggccagcagcgtcgtcatgggcttggtgggcacctacagctgcttctggaccaagtacatgaaccacctgaccgtgcacaacagggaggtgctgtacgagctcatcgagaagcgaggcccggccacgcccctcatcaccgtgtccaatcaccagtcctgcatggacgaccctcatctctgggggatcctgaaactccgccacatctggaacctgaagttgatgcgttggacccctgcagctgcagacatctgcttcaccaaggagctacactcccacttcttcagcttgggcaagtgtgtgcctgtgtgccgaggagatggcgtctaccagaaggggatggacttcattttggagaagctcaaccatggggactgggtgcatatcttcccagaaggaatcgggcgcctgattgctgagtgtcatctcaaccccatcatcctgcccctgtggcatgtcggaatgaatgacgtccttcctaacagtccgccctacttcccccgctttggacagaaaatcactgtgctgatcgggaagcccttcagtgccctgcctgtactcgagcggctccgggcggagaacaagtcggctgtggagatgcggaaagccctgacggacttcattcaagaggaattccagcatctgaagactcaggcagagcagctccacaaccacctccagcctgggagataggccttgcttgctgccttctggattcttggcccgcacagagctggggctgagggatggactgatgcttttagctcaaacgtggcttttagacagatttgttcatagaccctctcaagtgccctctccgagctggtaggcattccagctcctccgtgcttcctcagttacacaaaggacctcagctgcttctcccacttggccaagcagggaggaagaagcttaggcagggctctctttccttcttgccttcagatgttctctcccaggggctggcttcaggagggagcatagaaggcaggtgagcaaccagttggctaggggagcagggggcccaccagagctgtggagaggggaccctaagactcctcggcctggctcctacccaccgcccttgccgaaccaggagctgctcactacctcctcagggatggccgttggccacgtcttccttctgcctgagcttccccccgaccacaggccctttcctcaggcaaggtctggcctcaggtgggccgcaggcgggaaaagcagcccttggccagaagtcaagcccagccacgtggagcctagagtgagggcctgaggtctggctgcttgcccccatgctggcgccaacaacttctccatcctttctgcctctcaacatcacttgaatcctagggcctgggttttcatgtttttgaaacaga

SEQ ID NO: 30950 - DNA, 798 bp, Homo sapiens
  source 1..798: mol_type = unassigned DNA
atgcctctgcacgtgaagtggccgttccccgcggtgccgccgctcacctggaccctggccagcagcgtcgtcatgggcttggtgggcacctacagctgcttctggaccaagtacatgaaccacctgaccgtgcacaacagggaggtgctgtacgagctcatcgagaagcgaggcccggccacgcccctcatcaccgtgtccaatcaccagtcctgcatggacgaccctcatctctgggggatcctgaaactccgccacatctggaacctgaagttgatgcgttggacccctgcagctgcagacatctgcttcaccaaggagctacactcccacttcttcagcttgggcaagtgtgtgcctgtgtgccgaggagcagaatttttccaagcagagaatgaggggaaaggtgttctagacacaggcaggcacatgccaggtgctggaaaaagaagagagaaagggaaagtgaacatgagttccgaattcctgcgtttcaagtggggaatcgggcgcctgattgctgagtgtcatctcaaccccatcatcctgcccctgtggcatgtcggaatgaatgacgtccttcctaacagtccgccctacttcccccgctttggacagaaaatcactgtgctgatcgggaagcccttcagtgccctgcctgtactcgagcggctccgggcggagaacaagtcggctgtggagatgcggaaagccctgacggacttcattcaagaggaattccagcatctgaagactcaggcagagcagctccacaaccacctccagcctgggagatag

SEQ ID NO: 30951 - DNA, 11650 bp, Homo sapiens
  source 1..11650: mol_type = unassigned DNA
atggtggccctgtccttaaagatttgtgtgcgccactgcaacgtggtgaagaccatgcagtttgaaccatctacagctgtgtacgatgcgtgtcgagtcattcgggaacgggtgcctgaggcacaaactgggcaagcttctgactatggactctttctttcggatgaagacccgaggaaagggatttggctggaagcgggcagaacactggattactacatgttgcggaatggggatattttggaatataaaaagaaacagagacctcagaaaatccggatgctggatggatctgtgaagacagtgatggtggatgattccaagactgtgggggagctcctggtcactatttgtagcagaataggaataacaaattatgaagaatactccttaatccaagaaactattgaagaaaagaaagaggaaggaacgggcacactcaaaaaagacaggacactgttacgagatgagaggaaaatggagaagttgaaggccaagctgcacacagatgatgacctaaattggctggatcacagccgaacattcagagaacaaggagtagatgaaaacgaaacgttgctgcttagacggaagttcttttactctgatcagaatgtagattcgagagaccccgtgcagctgaacttgctttatgttcaggcacgggatgacatcctgaatggctctcaccctgtctccttcgagaaagcttgtgagtttggtggatttcaagcccagatacaatttggacctcatgtggaacataaacacaaacctggatttttagatctgaaggaattcctgcccaaagaatatatcaagcagagaggagctgaaaagaggatctttcaggagcataagaactgcggagagatgagtgagatagaagccaaggtcaagtacgtcaaactcgcacggtccctccgcacatatggcgtgtccttcttcctggtgaaggagaagatgaaaggcaagaacaagctggtgcctcgcctgctggggatcaccaaagactcggtgatgcgcgtggatgagaagaccaaggaagtgctgcaggagtggcccctcaccaccgtcaagcgctgggcagcctcacccaagagcttcacactggattttggggagtatcaggaaagctactattcagtacaaaccaccgagggagagcagatatcccagctgattgcaggctacattgacatcatcctgaaaaagaaacaaagtaaagatcgatttggactagaaggtgatgaggagtcaaccatgttagaagagtccgtttccccaaaaaagtccaccatcttgcagcagcagttcaaccggaccgggaaggcagagcacggctcagtggcgctgccggccgtgatgcgctcgggctccagcgggcctgagaccttcaacgttggcagcatgccctcgccacagcagcaggtcatggttgggcagatgcaccgaggccacatgccgccactgacctcagcccagcaggccctgatggggaccatcaacacaagcatgcacgccgtccagcaggcccaggatgatctcagtgagctcgactcgctgccacctctcggccaggatatggcatctagggtatgggttcagaacaaagtcgacgaatccaaacacgaaatccattctcaagttgatgctatcacggccggaacggcttcagttgttaacctcacagctggtgaccctgcagacactgactacacagctgtgggatgtgcgatcaccactatttcttccaacctgacggagatgtccaagggtgtgaagctattggccgccctcatggatgatgaggtgggcagcggggaggacttgctcagagctgccaggaccctcgctggggcggtgtcagacttgctgaaagctgtgcagcctacttctggagagcctcgacagacagttttgactgctgctggcagcatcggacaagccagtggggatcttctgagacagattggagagaatgagactgatgagcgattccaggatgttttaatgagtttggccaaagctgttgccaatgcagctgccatgttggtactaaaggcaaagaatgttgcccaagtggccgaagacactgtcctacagaacagggtaattgctgctgccacccagtgtgccctctccacctcccagcttgtggcatgtgccaaggttgtgagccccactattagctcccctgtgtgccaggagcagctgattgaagcagggaagctggtggaccgctcggtggagaactgtgtccgtgcctgccaggcggccactaccgatagtgagctcctgaagcaggtcagcgcagcggccagcgtggtcagccaggccctccatgatctcctgcagcatgtgcggcagtttgccagccgaggcgagcccatcggccgctacgaccaggctactgacaccatcatgtgtgtcaccgagagcatcttcagctccatgggtgacgctggtgaaatggtgcgccaggcgcgggttctggcccaagccacatcagacctcgtcaatgccatgaggtcagatgcagaagccgaaatcgacatggagaattcaaagaagctcctggcagcagcaaaactcttagctgactccactgctcgcatggtggaagctgcaaagggggctgcagccaacccagagaatgaggaccagcagcaaaggctgagagaagctgcagaaggcctccgggtagcaaccaacgcagctgcccagaatgctattaagaaaaaaattgtcaaccgactggaggttgcagccaagcaggccgcagcggcagccacacagaccatcgccgcctcccagaatgcagctgtttccaacaagaaccctgcggcccagcagcagctggtccagagttgcaaggcagtggctgatcacatccctcagctggtccagggagtgagggggagccaagctcaagctgaagacctgagtgcccagctggctctcatcatctccagccagaacttcctccagcctggaagcaagatggtgtcctctgccaaagccgcagtgcccaccgtgagtgaccaggccgcagccatgcagctgagccagtgtgccaagaacctggccaccagcttggcggagctgcgtaccgcctcgcagaaggcccatgaagcttgtggtccgatggaaatcgattcagctctgaatacggtgcagacgcttaagaatgaactgcaggatgccaagatggcagccgtggagagccagctgaagccacttccaggggaaacgctggaaaaatgtgctcaggacctgggaagcacatccaaggcggtgggctcctccatggcacagctgctgacctgtgctgctcaaggcaacgaacactacacaggggtggctgctagagagacggcccaagctctgaaaacactggcccaggccgcccgtggagtggctgcatcgacaaccgaccccgcggccgcccatgccatgttagattctgctcgagacgtgatggagggctccgccatgctcattcaagaggccaagcaggccctgattgcacctggagatgcagagcgtcaacaaagactggctcaggtggctaaagccgtctcacactccttgaataactgcgtaaattgcctccctgggcagaaggatgtggacgtggccttgaagagcatcggggagtccagcaagaagctgcttgtggattcgctacctccaagcacgaagcctttccaggaagcccagagtgaactgaaccaggcagcagctgatctgaaccagtctgctggggaagtggtccatgccacccggggccagagtggagagttggctgcagcctctggaaagttcagtgatgattttgatgaattcctcgatgctggcattgagatggctggccaagctcagacaaaagaagaccagatccaagtgatagggaacctcaagaatatctcgatggcatccagcaagctgctgttagctgccaagtctctctctgtagatccaggagctcccaatgcgaaaaatctcctggctgcagctgcaagagctgtgacagagagcatcaatcaactcatcactctgtgtacccaacaagctccgggccagaaagagtgcgataatgccctgcgggagctcgagactgtgaaggggatgttggacaatcctaatgaacctgttagtgacctctcttactttgactgcattgagagtgtgatggaaaactccaaggttctgggtgaatcgatggcagggatttcacagaatgccaagaccggagacctccctgcctttggggaatgtgtggggattgcatccaaggctctctgtgggctgacagaggctgcagcccaggctgcatacttggttggcatctctgatccaaacagccaggcaggccaccagggcctggtggaccccatccagtttgccagggctaaccaggccatccagatggcatgccagaacttggtggaccctggcagcagcccatcacaggtcctgtcagccgccacaattgttgccaagcacacgtcagccttgtgcaatgcctgccgcatcgcctcatccaagacggccaacccagtagccaagaggcacttcgtccagtcagccaaggaagtcgccaacagcactgccaacctggtgaagaccatcaaggccctggatggggatttctctgaagacaaccgcaataagtgtcgcatcgccaccgcacccttgattgaagctgtggagaacctgacagcgttcgcctcaaaccctgagtttgtcagcattcctgcccagatcagctccgagggttcccaggcacaggaaccaatcctggtctcagccaagaccatgctggagagttcatcgtacctcattcgcactgcacgctctctggccatcaaccccaaagacccacccacctggtctgtactggctggacattcccatacagtgtccgactccatcaagagtctcatcacttctatcagggacaaggcccctggacagagggagtgtgattactccatcgatggcatcaaccggtgcatccgggacatcgagcaggcctcgctggccgccgtcagccagagcctggccacgagggacgacatctctgtggaggccctgcaggagcagctgacttcggtggtccaggaaatcggacaccttatcgatcccatcgccacagcggctcggggagaagcagctcagctgggacataaggtgacacaactggcaagctattttgagcccttgatcttagccgcagttggtgtggcctccaagattcttgatcatcagcagcagatgacggtgctggaccagaccaagactctcgcagagtctgccttgcagatgttgtatgcagccaaagaaggtggcggaaaccccaaggcacaacacacccatgacgccatcacagaggccgcccagttgatgaaggaagccgtggatgacatcatggtgacgctgaacgaagctgccagtgaagtggggctggttgggggcatggtggacgccattgcagaagccatgagcaagctggatgaaggcactcctccagaaccaaagggaacatttgtcgactatcagacgactgtggttaaatactccaaagccattgcggtgacagctcaggaaatgatgactaagtcggttactaacccggaggagttgggaggactggcttcacaaatgaccagtgactatgggcacctggctttccagggccagatggcagcagccacggcggaaccagaggagatcggattccagattcgcactcgtgtgcaggacctgggccacggctgtatcttcctggtgcagaaggcaggggccctccaggtctgccccacagacagctacaccaagagggagctgatcgaatgcgcccgtgccgtcacggaaaaggtctccttggtgctctcggctctccaggccgggaacaaaggaacccaggcatgcattacagccgccaccgctgtgtctgggatcattgccgacctggacaccaccattatgtttgcaacagcggggacgctgaatgcagagaacagtgagaccttcgcagaccacagggagaacattctcaagacggccaaggccttggtagaagacacgaaactacttgtgtcaggagctgcgtccactcctgacaagctggcccaggcggcccagtcctcagcagccaccatcacccagctcgcagaagtggtcaagctgggggcagccagcctgggctccgacgaccccgagacccaggtggttttgatcaatgccatcaaagatgtggccaaggccctttctgatctcatcagtgctaccaagggagctgccagcaagccagtggacgacccttccatgtaccagctcaagggggctgccaaggtgatggtgaccaatgtcacctcgctcctcaagactgtaaaggcagtggaggatgaggccacccggggcaccagggcgcttgaggccacaattgaatgcataaagcaggagcttacggtgttccagtcaaaagacgtacctgaaaagacatcatcacctgaagaatccataaggatgacgaaaggcatcaccatggcaacagccaaagccgtggcagctgggaactcatgtagacaggaggacgtgattgctactgccaacctgagccggaaagccgtgtcagatatgttgacggcttgcaagcaagcatccttccaccccgatgtcagtgacgaggtgagaaccagagccttgcgtttcgggacggagtgcacccttggctacttggacctcctggagcacgtcttggtgattcttcagaaaccaaccccagaattcaagcagcagctggccgctttctccaagcgagtcgccggcgctgtgacagagctcatccaggcggcggaagccatgaaaggaacagagtgggtggatccagaagacccaactgtcattgcagaaacagagttactgggggctgcagcatccatcgaagctgctgctaagaagttagagcaactgaagccaagagcaaaaccaaaacaagcggatgagaccctggactttgaggaacagatcttggaagctgctaaatccattgctgctgccacaagcgccctggtcaaatcggcctcagcagcccagagggagctggtggcccaaggaaaggtgggctccatccctgccaatgctgcagacgacggacagtggtcacaggggctgatttctgctgcccggatggtggcggctgcgaccagcagtctctgtgaggcggccaatgcctccgttcagggacacgccagcgaggagaagctcatctcatctgccaagcaggtcgccgcttccacggctcagctgctggtggcctgcaaggtgaaggccgaccaggattcagaggccatgaggcggctacaggcggcaggaaatgctgtgaaaagagcctcagacaatcttgtccgtgcagcccagaaggcagcttttggcaaagctgatgacgacgatgttgtagtgaaaaccaagtttgtggggggcattgctcagatcatcgccgcccaggaagaaatgctaaagaaagagcgagaactggaagaagcaaggaaaaaactggcccaaatccgccagcagcagtataagtttttacccaccgagctgagggaagatgagggctaaaggtgcgagcccagatggcgagccccaggggatggccctggctgaactggacagacagtgttcctgagaggctgggcacttagctggaaaccgcccacctccctcccgggtgagcctggagccctgcgtgcttgttctcacatctctgtcccgtcggcactggctgcatgatcgtgatgtcacacggtacaatgtcctacccacaactcctctgccgcctcccctcatgcctcaccgtgtctcaggagagaggggtgcacgtttcatggactgttaccaacaaagaaaagtcagtattatgttgttctcagacactttggcttttgttggtccttctcttaggcctgctcctggacctctttatgatattgtgatagggaaaaaaatcattgacgtcatagaatattcttcttcctctcaggagaagacggaagctggagttggacatggttcataaaagccagaaacacaaacccgtgtggactccgggagggtgactcaggtcctccttccatgtcttgagcactggctcacccagggggtgaaaaattcccgcccctgtttgcacgctttcttgcctccgtgtgtaagctccttgtacaacccagacccatcttgtattttgtggcccagaaaactgaacgattattttgttcctccgtagtccaaagggcagagttgcggaaggccgtcggggcttggtgagcaggggctgtaatacagtctgtgggctccttaccctgcagaggctgtttcagctcacacagagtcatccacacaaacccacggctcccagttgacagtcagtggaatgctcgtctccttagcgtccagggtggggattctgctggaataaagagcttcctcagtgactcatctttaggtcccacgctggtttctgtgccttcagaatggtcacaagcccggattggaaaggatctgcttacaaacctgtcccctgtcctccaacccaaaacgcctttttttctgtcttaatatccagaaaatctaaatgcatcctaaaatcaatgtgaacctttaacaagatagttttacttattatcacataagacataagatgttttcattttctggatgtcacacttccagaatttcatatttttcccctcttttctttccccttttcagagccctcccataggaagggaagggcttgaatttacccttaatctgcacctttagccaaggcagtgcatggaagatgaatggctcgtgggacagaatctaatgccagggagcaggagtgtttgaaagaattcatagtggggaaggtaaaagttaatggaagtacatgattttcaaaactggtaacagttaaaggcactcaccctccgcctctctctctctctctctctctggtgtgctatcatgtcttggactccatccacactatagtttcaaagttccactgacgggggaaagttggtgctttggtcctccgaagatgtcacctttcgaccttgcccgatcttgtttcaccagactctagcccatgtcatggttttaaaatacataaacttctgacagcttcccatatttataagttacttataagtgctgcacgtattagaatttttttttttcagaccagtaaagttagagaaaagacgctgtaaaggaaaagcaagtgagagtatgtgtaggacactgacagtgtgtgggcaccagttctgaagaggaggggagctgctggagccctagcctgttggggaaaagctggcacactcttggctcgccctctttgagtggagctgatccaacacctcatgcctgccttggccggacactgagaggaggggcacacgtgcttccagagacactcaggagtcagaccccaatgctcagagtcacaatgtgttcatggcctcctgtaacaggactctggggatcccctctgtggcccagcccaccccaccctctgctcttctatgctgtgcccagggcagctgccctcttctgcctgtgccccatcccatcctgaaaacccaggaccaaggcaggggcaggcagccagttcttccaccttgcctcagagtcatttaaaacctttactgcatttgataccagaaaagcctccagagacaaaccaaatgcaaaggcctttcctttataactctaaagaacaggcatcgaaagtttatttttgtaggagctatataaatactcacctttctggagtcgtccagtgctgggagctttggggagtttggttctcagttatcacctggtatggtcccagtttctcatctgtcctttcctcatccaccctgcacatgtgtatgtgaacggcttcgtggccggtgtggtggtttctcatttcataagatagttgaagggccatgccttgtctggatgttatttaataggcactactgcggtgtcctcagatggtactgagggggccttctggtccttcaaaggaaaataacacaggcatgagttcatttgggagtgtgaactttcagaacacctaataagagagtggtgtcagagtaaaaacggccccaggtctggagcatagaagtgtatctctgtgaagagagagccggtgtgttgacatgtggttcttctcacacccctctactcctcgagggctttgaatccttgggctgatttttgtgccagaaattgctgttcccgatggccaaaaggggaacctgaactggatttcagaactgcccagtgatttgaaaatttagattttacttgggcctttcaggagtctttagatagggatgctgaggtcatatttagttcaatgaacagcccttgtttaagttttgccagtgtccagccagctgtggccctggccatctgtgcaggcaggttcctcaattcctggttggccctgcagtcggtcaacacagtccctccaggtcggctgcagaggcagctgcccagcctgcagtctatgcacgggccttaagaaatgagctgcctgtagcctcacggcatatgcttttatcagggaaaacccttcgagcttcttctgattctcacctgcttgctttctggctgtcttagtcagtgtgtttacaggcaactaaagcctgttcctaatttatcaaaaaattataaccaaaattcaccatagcctaagagagtaaaccccacctccaaagtgatgccaaggccaaaacctcatcaaggaaccagacacaggtcaaaagtggtgagcaagccatggtctctgctcctggggaactcacacgctgacccccgaggagccttggtttcctccctggcagatagtccccagaatcttctctcccagctttgaggttctgggctctggaaaggcctctgggatgctggccttaagatctcagcacagactatcagcatgttccattctcagattcctggaggaaaggtaccctctgttgaccaaggggctggctgcttctgagacttaccaacccaagaaatttggagacattcccctcaggctaaaaggcagcggtccccagagttcagaaagcaaaagatcttgacaactgtgccagtagtggctctggtcctatctctccacagtgctggcctctgctggggaaggcatctttcccaaaggtatccccaagtaccatgttgaaaatgtcctcagtctgttgctccatctttctgagcctctgcttggtatgtcatgtttatggtcactacggatgagtgtgtgcagagtttgggttgattcttttaaatgctacaaacaagagctatttcttttcaataaaaaaggtttggattcggcctcttcctctgagcccacctcccagccctccagggagcatcagtgtacctgagtcactttgtctgcatctcttcatcccacaaaacacgaggctgggtctcattcagcggcctctcaccaaccttcaagatccagaagaaaacaggaacgttcagctctgccctgtgtcgtatctaatcacatacattaatttatctaaccacataagttatttttttttatttgccagaaataaacctttaaaggaacaaa

SEQ ID NO: 30952 - DNA, 11880 bp, Homo sapiens
  source 1..11880: mol_type = unassigned DNA
cttcatttcctcaagctccctccttaacagctaacgccttcgcgagaggagctgagggccctatgcggaataattaagatgccttctttagggtctctgccttggggccattttacaggtgctgcaggaggcttctcacatgctttgggatatcttcagggaaatacgctcttaatagaaactgagaatttaagacattctaagtgagactgtccacatcatctaggaaaatggtggccctgtccttaaagatttgtgtgcgccactgcaacgtggtgaagaccatgcagtttgaaccatctacagctgtgtacgatgcgtgtcgagtcattcgggaacgggtgcctgaggcacaaactgggcaagcttctgactatggactctttctttcggatgaagacccgaggaaagggatttggctggaagcgggcagaacactggattactacatgttgcggaatggggatattttggaatataaaaagaaacagagacctcagaaaatccggatgctggatggatctgtgaagacagtgatggtggatgattccaagactgtgggggagctcctggtcactatttgtagcagaataggaataacaaattatgaagaatactccttaatccaagaaactattgaagaaaagaaagaggaaggaacgggcacactcaaaaaagacaggacactgttacgagatgagaggaaaatggagaagttgaaggccaagctgcacacagatgatgacctaaattggctggatcacagccgaacattcagagaacaaggagtagatgaaaacgaaacgttgctgcttagacggaagttcttttactctgatcagaatgtagattcgagagaccccgtgcagctgaacttgctttatgttcaggcacgggatgacatcctgaatggctctcaccctgtctccttcgagaaagcttgtgagtttggtggatttcaagcccagatacaatttggacctcatgtggaacataaacacaaacctggatttttagatctgaaggaattcctgcccaaagaatatatcaagcagagaggagctgaaaagaggatctttcaggagcataagaactgcggagagatgagtgagatagaagccaaggtcaagtacgtcaaactcgcacggtccctccgcacatatggcgtgtccttcttcctggtgaaggagaagatgaaaggcaagaacaagctggtgcctcgcctgctggggatcaccaaagactcggtgatgcgcgtggatgagaagaccaaggaagtgctgcaggagtggcccctcaccaccgtcaagcgctgggcagcctcacccaagagcttcacactggattttggggagtatcaggaaagctactattcagtacaaaccaccgagggagagcagatatcccagctgattgcaggctacattgacatcatcctgaaaaagaaacaaagtaaagatcgatttggactagaaggtgatgaggagtcaaccatgttagaagagtccgtttccccaaaaaagtccaccatcttgcagcagcagttcaaccggaccgggaaggcagagcacggctcagtggcgctgccggccgtgatgcgctcgggctccagcgggcctgagaccttcaacgttggcagcatgccctcgccacagcagcaggtcatggttgggcagatgcaccgaggccacatgccgccactgacctcagcccagcaggccctgatggggaccatcaacacaagcatgcacgccgtccagcaggcccaggatgatctcagtgagctcgactcgctgccacctctcggccaggatatggcatctagggtatgggttcagaacaaagtcgacgaatccaaacacgaaatccattctcaagttgatgctatcacggccggaacggcttcagttgttaacctcacagctggtgaccctgcagacactgactacacagctgtgggatgtgcgatcaccactatttcttccaacctgacggagatgtccaagggtgtgaagctattggccgccctcatggatgatgaggtgggcagcggggaggacttgctcagagctgccaggaccctcgctggggcggtgtcagacttgctgaaagctgtgcagcctacttctggagagcctcgacagacagttttgactgctgctggcagcatcggacaagccagtggggatcttctgagacagattggagagaatgagactgatgagcgattccaggatgttttaatgagtttggccaaagctgttgccaatgcagctgccatgttggtactaaaggcaaagaatgttgcccaagtggccgaagacactgtcctacagaacagggtaattgctgctgccacccagtgtgccctctccacctcccagcttgtggcatgtgccaaggttgtgagccccactattagctcccctgtgtgccaggagcagctgattgaagcagggaagctggtggaccgctcggtggagaactgtgtccgtgcctgccaggcggccactaccgatagtgagctcctgaagcaggtcagcgcagcggccagcgtggtcagccaggccctccatgatctcctgcagcatgtgcggcagtttgccagccgaggcgagcccatcggccgctacgaccaggctactgacaccatcatgtgtgtcaccgagagcatcttcagctccatgggtgacgctggtgaaatggtgcgccaggcgcgggttctggcccaagccacatcagacctcgtcaatgccatgaggtcagatgcagaagccgaaatcgacatggagaattcaaagaagctcctggcagcagcaaaactcttagctgactccactgctcgcatggtggaagctgcaaagggggctgcagccaacccagagaatgaggaccagcagcaaaggctgagagaagctgcagaaggcctccgggtagcaaccaacgcagctgcccagaatgctattaagaaaaaaattgtcaaccgactggaggttgcagccaagcaggccgcagcggcagccacacagaccatcgccgcctcccagaatgcagctgtttccaacaagaaccctgcggcccagcagcagctggtccagagttgcaaggcagtggctgatcacatccctcagctggtccagggagtgagggggagccaagctcaagctgaagacctgagtgcccagctggctctcatcatctccagccagaacttcctccagcctggaagcaagatggtgtcctctgccaaagccgcagtgcccaccgtgagtgaccaggccgcagccatgcagctgagccagtgtgccaagaacctggccaccagcttggcggagctgcgtaccgcctcgcagaaggcccatgaagcttgtggtccgatggaaatcgattcagctctgaatacggtgcagacgcttaagaatgaactgcaggatgccaagatggcagccgtggagagccagctgaagccacttccaggggaaacgctggaaaaatgtgctcaggacctgggaagcacatccaaggcggtgggctcctccatggcacagctgctgacctgtgctgctcaaggcaacgaacactacacaggggtggctgctagagagacggcccaagctctgaaaacactggcccaggccgcccgtggagtggctgcatcgacaaccgaccccgcggccgcccatgccatgttagattctgctcgagacgtgatggagggctccgccatgctcattcaagaggccaagcaggccctgattgcacctggagatgcagagcgtcaacaaagactggctcaggtggctaaagccgtctcacactccttgaataactgcgtaaattgcctccctgggcagaaggatgtggacgtggccttgaagagcatcggggagtccagcaagaagctgcttgtggattcgctacctccaagcacgaagcctttccaggaagcccagagtgaactgaaccaggcagcagctgatctgaaccagtctgctggggaagtggtccatgccacccggggccagagtggagagttggctgcagcctctggaaagttcagtgatgattttgatgaattcctcgatgctggcattgagatggctggccaagctcagacaaaagaagaccagatccaagtgatagggaacctcaagaatatctcgatggcatccagcaagctgctgttagctgccaagtctctctctgtagatccaggagctcccaatgcgaaaaatctcctggctgcagctgcaagagctgtgacagagagcatcaatcaactcatcactctgtgtacccaacaagctccgggccagaaagagtgcgataatgccctgcgggagctcgagactgtgaaggggatgttggacaatcctaatgaacctgttagtgacctctcttactttgactgcattgagagtgtgatggaaaactccaaggttctgggtgaatcgatggcagggatttcacagaatgccaagaccggagacctccctgcctttggggaatgtgtggggattgcatccaaggctctctgtgggctgacagaggctgcagcccaggctgcatacttggttggcatctctgatccaaacagccaggcaggccaccagggcctggtggaccccatccagtttgccagggctaaccaggccatccagatggcatgccagaacttggtggaccctggcagcagcccatcacaggtcctgtcagccgccacaattgttgccaagcacacgtcagccttgtgcaatgcctgccgcatcgcctcatccaagacggccaacccagtagccaagaggcacttcgtccagtcagccaaggaagtcgccaacagcactgccaacctggtgaagaccatcaaggccctggatggggatttctctgaagacaaccgcaataagtgtcgcatcgccaccgcacccttgattgaagctgtggagaacctgacagcgttcgcctcaaaccctgagtttgtcagcattcctgcccagatcagctccgagggttcccaggcacaggaaccaatcctggtctcagccaagaccatgctggagagttcatcgtacctcattcgcactgcacgctctctggccatcaaccccaaagacccacccacctggtctgtactggctggacattcccatacagtgtccgactccatcaagagtctcatcacttctatcagggacaaggcccctggacagagggagtgtgattactccatcgatggcatcaaccggtgcatccgggacatcgagcaggcctcgctggccgccgtcagccagagcctggccacgagggacgacatctctgtggaggccctgcaggagcagctgacttcggtggtccaggaaatcggacaccttatcgatcccatcgccacagcggctcggggagaagcagctcagctgggacataaggtgacacaactggcaagctattttgagcccttgatcttagccgcagttggtgtggcctccaagattcttgatcatcagcagcagatgacggtgctggaccagaccaagactctcgcagagtctgccttgcagatgttgtatgcagccaaagaaggtggcggaaaccccaaggcacaacacacccatgacgccatcacagaggccgcccagttgatgaaggaagccgtggatgacatcatggtgacgctgaacgaagctgccagtgaagtggggctggttgggggcatggtggacgccattgcagaagccatgagcaagctggatgaaggcactcctccagaaccaaagggaacatttgtcgactatcagacgactgtggttaaatactccaaagccattgcggtgacagctcaggaaatgatgactaagtcggttactaacccggaggagttgggaggactggcttcacaaatgaccagtgactatgggcacctggctttccagggccagatggcagcagccacggcggaaccagaggagatcggattccagattcgcactcgtgtgcaggacctgggccacggctgtatcttcctggtgcagaaggcaggggccctccaggtctgccccacagacagctacaccaagagggagctgatcgaatgcgcccgtgccgtcacggaaaaggtctccttggtgctctcggctctccaggccgggaacaaaggaacccaggcatgcattacagccgccaccgctgtgtctgggatcattgccgacctggacaccaccattatgtttgcaacagcggggacgctgaatgcagagaacagtgagaccttcgcagaccacagggagaacattctcaagacggccaaggccttggtagaagacacgaaactacttgtgtcaggagctgcgtccactcctgacaagctggcccaggcggcccagtcctcagcagccaccatcacccagctcgcagaagtggtcaagctgggggcagccagcctgggctccgacgaccccgagacccaggtggttttgatcaatgccatcaaagatgtggccaaggccctttctgatctcatcagtgctaccaagggagctgccagcaagccagtggacgacccttccatgtaccagctcaagggggctgccaaggtgatggtgaccaatgtcacctcgctcctcaagactgtaaaggcagtggaggatgaggccacccggggcaccagggcgcttgaggccacaattgaatgcataaagcaggagcttacggtgttccagtcaaaagacgtacctgaaaagacatcatcacctgaagaatccataaggatgacgaaaggcatcaccatggcaacagccaaagccgtggcagctgggaactcatgtagacaggaggacgtgattgctactgccaacctgagccggaaagccgtgtcagatatgttgacggcttgcaagcaagcatccttccaccccgatgtcagtgacgaggtgagaaccagagccttgcgtttcgggacggagtgcacccttggctacttggacctcctggagcacgtcttggtgattcttcagaaaccaaccccagaattcaagcagcagctggccgctttctccaagcgagtcgccggcgctgtgacagagctcatccaggcggcggaagccatgaaaggaacagagtgggtggatccagaagacccaactgtcattgcagaaacagagttactgggggctgcagcatccatcgaagctgctgctaagaagttagagcaactgaagccaagagcaaaaccaaaacaagcggatgagaccctggactttgaggaacagatcttggaagctgctaaatccattgctgctgccacaagcgccctggtcaaatcggcctcagcagcccagagggagctggtggcccaaggaaaggtgggctccatccctgccaatgctgcagacgacggacagtggtcacaggggctgatttctgctgcccggatggtggcggctgcgaccagcagtctctgtgaggcggccaatgcctccgttcagggacacgccagcgaggagaagctcatctcatctgccaagcaggtcgccgcttccacggctcagctgctggtggcctgcaaggtgaaggccgaccaggattcagaggccatgaggcggctacaggcggcaggaaatgctgtgaaaagagcctcagacaatcttgtccgtgcagcccagaaggcagcttttggcaaagctgatgacgacgatgttgtagtgaaaaccaagtttgtggggggcattgctcagatcatcgccgcccaggaagaaatgctaaagaaagagcgagaactggaagaagcaaggaaaaaactggcccaaatccgccagcagcagtataagtttttacccaccgagctgagggaagatgagggctaaaggtgcgagcccagatggcgagccccaggggatggccctggctgaactggacagacagtgttcctgagaggctgggcacttagctggaaaccgcccacctccctcccgggtgagcctggagccctgcgtgcttgttctcacatctctgtcccgtcggcactggctgcatgatcgtgatgtcacacggtacaatgtcctacccacaactcctctgccgcctcccctcatgcctcaccgtgtctcaggagagaggggtgcacgtttcatggactgttaccaacaaagaaaagtcagtattatgttgttctcagacactttggcttttgttggtccttctcttaggcctgctcctggacctctttatgatattgtgatagggaaaaaaatcattgacgtcatagaatattcttcttcctctcaggagaagacggaagctggagttggacatggttcataaaagccagaaacacaaacccgtgtggactccgggagggtgactcaggtcctccttccatgtcttgagcactggctcacccagggggtgaaaaattcccgcccctgtttgcacgctttcttgcctccgtgtgtaagctccttgtacaacccagacccatcttgtattttgtggcccagaaaactgaacgattattttgttcctccgtagtccaaagggcagagttgcggaaggccgtcggggcttggtgagcaggggctgtaatacagtctgtgggctccttaccctgcagaggctgtttcagctcacacagagtcatccacacaaacccacggctcccagttgacagtcagtggaatgctcgtctccttagcgtccagggtggggattctgctggaataaagagcttcctcagtgactcatctttaggtcccacgctggtttctgtgccttcagaatggtcacaagcccggattggaaaggatctgcttacaaacctgtcccctgtcctccaacccaaaacgcctttttttctgtcttaatatccagaaaatctaaatgcatcctaaaatcaatgtgaacctttaacaagatagttttacttattatcacataagacataagatgttttcattttctggatgtcacacttccagaatttcatatttttcccctcttttctttccccttttcagagccctcccataggaagggaagggcttgaatttacccttaatctgcacctttagccaaggcagtgcatggaagatgaatggctcgtgggacagaatctaatgccagggagcaggagtgtttgaaagaattcatagtggggaaggtaaaagttaatggaagtacatgattttcaaaactggtaacagttaaaggcactcaccctccgcctctctctctctctctctctctggtgtgctatcatgtcttggactccatccacactatagtttcaaagttccactgacgggggaaagttggtgctttggtcctccgaagatgtcacctttcgaccttgcccgatcttgtttcaccagactctagcccatgtcatggttttaaaatacataaacttctgacagcttcccatatttataagttacttataagtgctgcacgtattagaatttttttttttcagaccagtaaagttagagaaaagacgctgtaaaggaaaagcaagtgagagtatgtgtaggacactgacagtgtgtgggcaccagttctgaagaggaggggagctgctggagccctagcctgttggggaaaagctggcacactcttggctcgccctctttgagtggagctgatccaacacctcatgcctgccttggccggacactgagaggaggggcacacgtgcttccagagacactcaggagtcagaccccaatgctcagagtcacaatgtgttcatggcctcctgtaacaggactctggggatcccctctgtggcccagcccaccccaccctctgctcttctatgctgtgcccagggcagctgccctcttctgcctgtgccccatcccatcctgaaaacccaggaccaaggcaggggcaggcagccagttcttccaccttgcctcagagtcatttaaaacctttactgcatttgataccagaaaagcctccagagacaaaccaaatgcaaaggcctttcctttataactctaaagaacaggcatcgaaagtttatttttgtaggagctatataaatactcacctttctggagtcgtccagtgctgggagctttggggagtttggttctcagttatcacctggtatggtcccagtttctcatctgtcctttcctcatccaccctgcacatgtgtatgtgaacggcttcgtggccggtgtggtggtttctcatttcataagatagttgaagggccatgccttgtctggatgttatttaataggcactactgcggtgtcctcagatggtactgagggggccttctggtccttcaaaggaaaataacacaggcatgagttcatttgggagtgtgaactttcagaacacctaataagagagtggtgtcagagtaaaaacggccccaggtctggagcatagaagtgtatctctgtgaagagagagccggtgtgttgacatgtggttcttctcacacccctctactcctcgagggctttgaatccttgggctgatttttgtgccagaaattgctgttcccgatggccaaaaggggaacctgaactggatttcagaactgcccagtgatttgaaaatttagattttacttgggcctttcaggagtctttagatagggatgctgaggtcatatttagttcaatgaacagcccttgtttaagttttgccagtgtccagccagctgtggccctggccatctgtgcaggcaggttcctcaattcctggttggccctgcagtcggtcaacacagtccctccaggtcggctgcagaggcagctgcccagcctgcagtctatgcacgggccttaagaaatgagctgcctgtagcctcacggcatatgcttttatcagggaaaacccttcgagcttcttctgattctcacctgcttgctttctggctgtcttagtcagtgtgtttacaggcaactaaagcctgttcctaatttatcaaaaaattataaccaaaattcaccatagcctaagagagtaaaccccacctccaaagtgatgccaaggccaaaacctcatcaaggaaccagacacaggtcaaaagtggtgagcaagccatggtctctgctcctggggaactcacacgctgacccccgaggagccttggtttcctccctggcagatagtccccagaatcttctctcccagctttgaggttctgggctctggaaaggcctctgggatgctggccttaagatctcagcacagactatcagcatgttccattctcagattcctggaggaaaggtaccctctgttgaccaaggggctggctgcttctgagacttaccaacccaagaaatttggagacattcccctcaggctaaaaggcagcggtccccagagttcagaaagcaaaagatcttgacaactgtgccagtagtggctctggtcctatctctccacagtgctggcctctgctggggaaggcatctttcccaaaggtatccccaagtaccatgttgaaaatgtcctcagtctgttgctccatctttctgagcctctgcttggtatgtcatgtttatggtcactacggatgagtgtgtgcagagtttgggttgattcttttaaatgctacaaacaagagctatttcttttcaataaaaaaggtttggattcggcctcttcctctgagcccacctcccagccctccagggagcatcagtgtacctgagtcactttgtctgcatctcttcatcccacaaaacacgaggctgggtctcattcagcggcctctcaccaaccttcaagatccagaagaaaacaggaacgttcagctctgccctgtgtcgtatctaatcacatacattaatttatctaaccacataagttatttttttttatttgccagaaataaacctttaaaggaacaaa

SEQ ID NO: 30953 - DNA, 5795 bp, Homo sapiens
  source 1..5795: mol_type = unassigned DNA
gcggcggcggcggcggtagcagcggcggcggcggcggggactggcatcggggccccgagccgagcggagccggaccccgggcgagcgcgtctgcagccaccccagctcatacctctctgcctccccgctctcaaggagggtctgccgcatgtgatgaaagtgtctactctcagggaaagctcagccatggcttccccactgccccgggagatggaggaggagctggtgcctactggctctgagccaggtgacactcgggccaaaccccctgtcaagcccaaaccccgggccctgcctgccaagccagccctgcctgccaaacccagcctgctggtgcctgttgggcctcggcctccccggggtcccctggctgagttgccttctgccaggaagatgaacatgctggcaggaccccagccctatggtggcagcaagcgcccccttccctttgcaccaaggcctgcggttgaggcctccactggaggagaagccacccaagagactgggaaagaggaggctgggaaagaggagccaccccctttgacacccccagctcgatgtgcagccccagggggtgtacggaaggcccctgcccctttccgcccagcctcagagcgcttcgcggccaccacggtggaagagatcctggccaagatggagcagcctcggaaggaggtccttgccagccccgaccgcctgtggggttcccgcctcacctttaaccacgatggcagctcgcgatatggccccaggacctatggcacgaccactgctcccagggatgaggatggcagcaccctcttcaggggatggtcccaggaggggccagtaaagtctccagcagagtgccgggaagagcacagcaagacccctgaggagaggagccttccttccgacctggccttcaacggggacctggctaaggcagccagctcggagctacctgctgatatttccaagccctggattccctcaagtccagccccctcctcagagaatggaggccctgccagcccaggcctccccgcagaagcctcaggctcaggccctggctctccccatcttcacccgcctgataagagttctccctgccactcacagcttctggaagcccagactcctgaagcttcccaggcttctccctgccccgctgtgactccatcagctccaagtgcagccctgcctgacgagggctcccgccacacccccagcccggggctccctgccgagggggctccagaggcccccagacccagcagcccaccccctgaggtcttggagccccatagcctggatcagccccctgccacctcaccccggcccctgatcgaggtgggtgagttgctggatctcactcggacgtttccatctggcggggaggaggaggccaagggtgacgcacacctccgccccaccagcctggttcagcgccgattctctgaaggtgtgctccagtcacccagtcaggaccaggagaagctggggggctcgctggctgccctgccccaaggccaggggagccagttggccctggatcgtccctttggggcagagtccaactggagcttatcacagtccttcgaatggaccttccccacgaggccctcgggtctgggcgtgtggcggctggactccccgcctccctcccccatcactgaagccagtgaggccgccgaggctgctgaggctggcaacttggccgtttccagcagggaagaaggagtgtctcagcaggggcaaggggctgggtcagctccaagtgggtcaggaagttcctgggtgcagggggatgatccaagcatgtccctcacccagaagggcgatggggagagtcaacctcaattcccagctgttccccttgagcccctgcctacaactgagggcacacctggattacctttgcagcaggcagaggagagatacgagtcgcaggagcccttggctggacaggagtcccctctccccctggctaccagggaggcagccttgcccatcctggagccagtcctggggcaggagcagccagcagcccctgaccagccctgtgttctctttgctgatgcccctgagcctggacaggcactgcctgttgaggaggaggccgtgaccctagcccgggctgagaccacccaagccaggacagaggctcaagacttgtgtagggcatcccccgagcctccaggccctgaaagcagctcccgctggctggacgacctcctggcttcaccaccacccagtggtggcggtgcaaggcggggagctggagctgagctgaaggacacacagtccccaagtacctgctctgagggactccttggctggtcccagaaagatctgcagagtgaatttgggatcacaggagacccacagcccagcagtttcagtccttccagctggtgtcaaggtgcttctcaggactatggccttgggggtgcaagccctagaggagacccaggtctcggagagagggactggaccagcaagtatgggcaaggagcaggggaagggagcaccagggagtgggccagcaggtgtggcatcggccaggaggagatggaggccagcagcagccaagaccagagtaaagtgtctgccccaggggtgctcacagcccaggaccgggtagttggaaagccagcccagcttggcactcagcggagccaggaggcagatgttcaggactgggagttcagaaagagggattcccagggcacttactccagccgggatgcagaactccaggaccaggaattcggaaagagagattcactgggtacctacagtagtcgagatgtaagccttggggactgggaatttgggaagagagattctctgggtgcttatgccagccaagatgccaacgagcagggccaagatttggggaagagggaccaccatggtaggtacagcagccaggatgccgatgagcaggactgggagtttcagaagagagatgtgtcactcggcacctatggcagccgggctgcggagccacaggaacaggagtttgggaagagcgcttggataagggactacagcagtggtggcagctccaggacccttgacgcccaggacagaagctttggaacgagacccctgagctctgggttcagccccgaggaagcccagcaacaggatgaggaatttgagaagaagattccaagtgtggaagacagccttggagagggcagcagggatgctggccggccaggagagagaggatccgggggcttgttcagtcctagcactgcccacgtgccggatggggcactcgggcagagagaccagagcagctggcaaaacagtgatgctagccaggaggtgggagggcatcaggagagacagcaggcaggggctcagggccctggcagtgctgacctggaagatggggagatgggaaagcgaggctgggtcggtgagtttagcctcagtgttggcccccagcgagaggcagcatttagcccagggcagcaggactggagccgggacttctgcatcgaggccagtgagaggagctatcagtttggcatcattggcaacgacagagtgagtggtgctggctttagcccttctagcaagatggaaggtggtcactttgtgcctcctgggaagaccacagctggctcggtggactggactgaccagctgggtctcaggaacttggaagtgtccagctgtgtgggttctgggggctcgagcgaggccagggagagtgccgtgggacagatgggctggtcaggtggcctgagcttgagagacatgaacctgaccggctgtttggaaagtggagggtctgaagagccggggggaatcggagttggggagaaggactggacttctgatgttaatgtgaagagcaaagatttggctgaggtcggggagggaggaggccacagccaggccagagagagtggcgtggggcagactgactggtcaggtgtggaggccggagagttccttaaatcaagggagcgtggagttggacaggcagactggacacctgaccttgggctgagaaacatggccccaggggcagtctgcagtcctggagagtccaaagagcttggggtgggccagatggactggggtaacaatctgggcctgagggatttggaggtgacctgtgacccagactctggaggttctcaggggctacggggatgtggagtggggcagatggactggacccaggacttggcgccccagaatgtggagctctttggggctccaagtgaagccagggagcatggggtgggcggggtgagccagtgcccagagcccggcctgaggcacaatggcagcttgtctcctggcctggaggccagagaccccttggaggccagggagctgggggttggtgagacaagtgggccagagacccagggtgaagattactcctcgtcttccttggagccacaccctgcagaccctggaatggagacaggagaagccctcagcttcggagcaagccctggcaggtgcccggcccgccccccaccctccggctcccagggcctgctggaggagatgctggcagccagcagctccaaggcggtggctcggagggagtcagcggcctcgggccttgggggcctgttggaggaggaaggagccggggcaggtgctgcccaagaggaggtgctggagcctggcagggactctccaccctcctggaggccgcagcctgatggtgaggccagccagacagaagacgtggatggcacctggggctcttcagcagccaggtggagcgatcaggggccagcacagacttctcggcgaccctcccaaggccctcctgccagatcccccagtcaggacttctccttcattgaggacaccgagatcctcgacagtgccatgtatcggagccgtgccaacttggggcgcaagcgtgggcaccgggccccggtcattcggcctgggggtaccttgggcctgtcggaggcagcagactcggatgcacacctgttccaggactctacagagccacgggcatctcgggtgccatcttcagatgaagaggtagtggaggaacctcagagccgccggacacggatgtcgttgggcaccaaggggctgaaagtcaacctctttcctggcctgagcccctcagccctgaaggccaagctgcgcccccggaatcgctcagctgaggagggagagctggctgagagcaagtcgagccagaaggagtccgcggtccagcgttcgaaatcctgcaaggtcccaggactgggaaagcccctcacgttacctcccaagccagagaaatcctcagggtcagaaggatcgtcgcccaactggcttcaagccctgaaactgaagaagaagaaggtctgagaagtcactgaggttcttcccacctggcagtctcaggcagtgcccattcctgtggggtccctgggtgaggagacggctggagccccaccatgccccaggctgcagcctctgtcccctccacctctgaggagcgtctggggaggcacatttatgcactttgtatcaccctccgaactccccccacaccttcccttccctggatttcatcactagtggttgaaggttttgtcccttcctctcctccttccctctccctctctgcttcctcctccagcctcccttgggttttcttttgataccaatttatagcattttttataaaagcctttgatttttataatgggtgggactgtatccctgcctcaccccaggtctccgtctgccccgccaggtaccccacagagaccaatgacattttgccacttgaaacaataaataaagttttttgggaa

SEQ ID NO: 30954 - DNA, 594 bp, Homo sapiens
  source 1..594: mol_type = unassigned DNA
gtgattcacagacagacttcatactttgcagctctctagctctgctttgagtagacacctccagcggggccgtcctacccaaggggcactgtggggactgtctgcagccaccccagctcatacctctctgcctccccgctctcaaggagggtctgccgcatgtgatgaaagtgtctactctcagggaaagctcagccatggcttccccactgccccgggagatggaggaggagctggtgcctactggctctgagccaggtgacactcgggccaaaccccctgtcaagcccaaaccccgggccctgcctgccaagccagccctgcctgccaaacccagcctgctggtgcctgttgggcctcggcctccccggggtcccctggctgagttgccttctgccaggaagatgaacatgctggcaggaccccagccctatggtggcagcaagcgcccccttccctttgcaccaaggcctgcggttgaggcctccactggaggagaagccacccaagagactgggaaagaggaggctgggaaagaggagccaccccctttgacacccccagctcgatgtgcagccccagggggtgtacgga

SEQ ID NO: 30955 - DNA, 5952 bp, Homo sapiens
  source 1..5952: mol_type = unassigned DNA
cagtgagtgactccctgaagcgctaggactttggggttaggagataagagttggggaggatctttgaagagttgaggatatggctgttgggaacctcccttgacctcctcctacccccccccccccactccaagttctctcttcctgtcccacactctgcctctgttagaaataggagacttctctctgctaaacctactggcaacgcccaactctttttttccttctcttctctctcttttcctaggtctgcagccaccccagctcatacctctctgcctccccgctctcaaggagggtctgccgcatgtgatgaaagtgtctactctcagggaaagctcagccatggcttccccactgccccgggagatggaggaggagctggtgcctactggctctgagccaggtgacactcgggccaaaccccctgtcaagcccaaaccccgggccctgcctgccaagccagccctgcctgccaaacccagcctgctggtgcctgttgggcctcggcctccccggggtcccctggctgagttgccttctgccaggaagatgaacatgctggcaggaccccagccctatggtggcagcaagcgcccccttccctttgcaccaaggcctgcggttgaggcctccactggaggagaagccacccaagagactgggaaagaggaggctgggaaagaggagccaccccctttgacacccccagctcgatgtgcagccccagggggtgtacggaaggcccctgcccctttccgcccagcctcagagcgcttcgcggccaccacggtggaagagatcctggccaagatggagcagcctcggaaggaggtccttgccagccccgaccgcctgtggggttcccgcctcacctttaaccacgatggcagctcgcgatatggccccaggacctatggcacgaccactgctcccagggatgaggatggcagcaccctcttcaggggatggtcccaggaggggccagtaaagtctccagcagagtgccgggaagagcacagcaagacccctgaggagaggagccttccttccgacctggccttcaacggggacctggctaaggcagccagctcggagctacctgctgatatttccaagccctggattccctcaagtccagccccctcctcagagaatggaggccctgccagcccaggcctccccgcagaagcctcaggctcaggccctggctctccccatcttcacccgcctgataagagttctccctgccactcacagcttctggaagcccagactcctgaagcttcccaggcttctccctgccccgctgtgactccatcagctccaagtgcagccctgcctgacgagggctcccgccacacccccagcccggggctccctgccgagggggctccagaggcccccagacccagcagcccaccccctgaggtcttggagccccatagcctggatcagccccctgccacctcaccccggcccctgatcgaggtgggtgagttgctggatctcactcggacgtttccatctggcggggaggaggaggccaagggtgacgcacacctccgccccaccagcctggttcagcgccgattctctgaaggtgtgctccagtcacccagtcaggaccaggagaagctggggggctcgctggctgccctgccccaaggccaggggagccagttggccctggatcgtccctttggggcagagtccaactggagcttatcacagtccttcgaatggaccttccccacgaggccctcgggtctgggcgtgtggcggctggactccccgcctccctcccccatcactgaagccagtgaggccgccgaggctgctgaggctggcaacttggccgtttccagcagggaagaaggagtgtctcagcaggggcaaggggctgggtcagctccaagtgggtcaggaagttcctgggtgcagggggatgatccaagcatgtccctcacccagaagggcgatggggagagtcaacctcaattcccagctgttccccttgagcccctgcctacaactgagggcacacctggattacctttgcagcaggcagaggagagatacgagtcgcaggagcccttggctggacaggagtcccctctccccctggctaccagggaggcagccttgcccatcctggagccagtcctggggcaggagcagccagcagcccctgaccagccctgtgttctctttgctgatgcccctgagcctggacaggcactgcctgttgaggaggaggccgtgaccctagcccgggctgagaccacccaagccaggacagaggctcaagacttgtgtagggcatcccccgagcctccaggccctgaaagcagctcccgctggctggacgacctcctggcttcaccaccacccagtggtggcggtgcaaggcggggagctggagctgagctgaaggacacacagtccccaagtacctgctctgagggactccttggctggtcccagaaagatctgcagagtgaatttgggatcacaggagacccacagcccagcagtttcagtccttccagctggtgtcaaggtgcttctcaggactatggccttgggggtgcaagccctagaggagacccaggtctcggagagagggactggaccagcaagtatgggcaaggagcaggggaagggagcaccagggagtgggccagcaggtgtggcatcggccaggaggagatggaggccagcagcagccaagaccagagtaaagtgtctgccccaggggtgctcacagcccaggaccgggtagttggaaagccagcccagcttggcactcagcggagccaggaggcagatgttcaggactgggagttcagaaagagggattcccagggcacttactccagccgggatgcagaactccaggaccaggaattcggaaagagagattcactgggtacctacagtagtcgagatgtaagccttggggactgggaatttgggaagagagattctctgggtgcttatgccagccaagatgccaacgagcagggccaagatttggggaagagggaccaccatggtaggtacagcagccaggatgccgatgagcaggactgggagtttcagaagagagatgtgtcactcggcacctatggcagccgggctgcggagccacaggaacaggagtttgggaagagcgcttggataagggactacagcagtggtggcagctccaggacccttgacgcccaggacagaagctttggaacgagacccctgagctctgggttcagccccgaggaagcccagcaacaggatgaggaatttgagaagaagattccaagtgtggaagacagccttggagagggcagcagggatgctggccggccaggagagagaggatccgggggcttgttcagtcctagcactgcccacgtgccggatggggcactcgggcagagagaccagagcagctggcaaaacagtgatgctagccaggaggtgggagggcatcaggagagacagcaggcaggggctcagggccctggcagtgctgacctggaagatggggagatgggaaagcgaggctgggtcggtgagtttagcctcagtgttggcccccagcgagaggcagcatttagcccagggcagcaggactggagccgggacttctgcatcgaggccagtgagaggagctatcagtttggcatcattggcaacgacagagtgagtggtgctggctttagcccttctagcaagatggaaggtggtcactttgtgcctcctgggaagaccacagctggctcggtggactggactgaccagctgggtctcaggaacttggaagtgtccagctgtgtgggttctgggggctcgagcgaggccagggagagtgccgtgggacagatgggctggtcaggtggcctgagcttgagagacatgaacctgaccggctgtttggaaagtggagggtctgaagagccggggggaatcggagttggggagaaggactggacttctgatgttaatgtgaagagcaaagatttggctgaggtcggggagggaggaggccacagccaggccagagagagtggcgtggggcagactgactggtcaggtgtggaggccggagagttccttaaatcaagggagcgtggagttggacaggcagactggacacctgaccttgggctgagaaacatggccccaggggcagtctgcagtcctggagagtccaaagagcttggggtgggccagatggactggggtaacaatctgggcctgagggatttggaggtgacctgtgacccagactctggaggttctcaggggctacggggatgtggagtggggcagatggactggacccaggacttggcgccccagaatgtggagctctttggggctccaagtgaagccagggagcatggggtgggcggggtgagccagtgcccagagcccggcctgaggcacaatggcagcttgtctcctggcctggaggccagagaccccttggaggccagggagctgggggttggtgagacaagtgggccagagacccagggtgaagattactcctcgtcttccttggagccacaccctgcagaccctggaatggagacaggagaagccctcagcttcggagcaagccctggcaggtgcccggcccgccccccaccctccggctcccagggcctgctggaggagatgctggcagccagcagctccaaggcggtggctcggagggagtcagcggcctcgggccttgggggcctgttggaggaggaaggagccggggcaggtgctgcccaagaggaggtgctggagcctggcagggactctccaccctcctggaggccgcagcctgatggtgaggccagccagacagaagacgtggatggcacctggggctcttcagcagccaggtggagcgatcaggggccagcacagacttctcggcgaccctcccaaggccctcctgccagatcccccagtcaggacttctccttcattgaggacaccgagatcctcgacagtgccatgtatcggagccgtgccaacttggggcgcaagcgtgggcaccgggccccggtcattcggcctgggggtaccttgggcctgtcggaggcagcagactcggatgcacacctgttccaggactctacagagccacgggcatctcgggtgccatcttcagatgaagaggtagtggaggaacctcagagccgccggacacggatgtcgttgggcaccaaggggctgaaagtcaacctctttcctggcctgagcccctcagccctgaaggccaagctgcgcccccggaatcgctcagctgaggagggagagctggctgagagcaagtcgagccagaaggagtccgcggtccagcgttcgaaatcctgcaaggtcccaggactgggaaagcccctcacgttacctcccaagccagagaaatcctcagggtcagaaggatcgtcgcccaactggcttcaagccctgaaactgaagaagaagaaggtctgagaagtcactgaggttcttcccacctggcagtctcaggcagtgcccattcctgtggggtccctgggtgaggagacggctggagccccaccatgccccaggctgcagcctctgtcccctccacctctgaggagcgtctggggaggcacatttatgcactttgtatcaccctccgaactccccccacaccttcccttccctggatttcatcactagtggttgaaggttttgtcccttcctctcctccttccctctccctctctgcttcctcctccagcctcccttgggttttcttttgataccaatttatagcattttttataaaagcctttgatttttataatgggtgggactgtatccctgcctcaccccaggtctccgtctgccccgccaggtaccccacagagaccaatgacattttgccacttgaaacaataaataaagttttttggg

SEQ ID NO: 30956 - DNA, 4662 bp, Homo sapiens
  source 1..4662: mol_type = unassigned DNA
cccctcctcctcctcactcctcaccctccagggtagcggctaccggagcgctgcagggggctgcgcctgcctgctccgccccagacctgtcggcgaaaggtagtttatgccaacgtgacttcattcatacagatgaaccaaggatcgggatagcagtataaaattagaatcaagacagctgactgctcagcaggatgccatcaactaacagagcaggcagcctgaaggaccctgaaattgcagagctcttcttcaaagaagatccagagaagctcttcacagatctcagagaaattggccatggaagctttggagcagtgtattttgcacgagatgtgcgtaccaatgaagtggtggccatcaagaaaatgtcttatagtggaaagcagtctactgagaaatggcaggatattattaaggaagtcaagtttctacaaagaataaaacatcccaacagtatagaatacaaaggctgttatttacgtgaacacacagcatggcttgtaatggaatattgtttaggatctgcttcggatttactagaagttcacaaaaagccattacaagaagtggaaatagcagcaattacacatggtgctcttcagggattagcctacttacattctcatactatgattcatagagatatcaaagcaggaaatatccttctgacagaaccaggccaggtgaaacttgctgactttggctctgcttccatggcatcacctgccaattcctttgtgggaacgccgtattggatggccccagaagtaattttagccatggatgaaggacaatatgatggcaaagtagatgtgtggtctcttggaataacatgtattgaactagcggaaaggaagcctcctttatttaatatgaatgcaatgagtgccttatatcacatagcccaaaatgaatcccctacactacagtctaatgaatggtctgattattttcgcaactttgtagattcttgcctccagaaaatccctcaagatcgacctacatcagaggaacttttaaagcacatatttgttcttcgggagcgccctgaaaccgtgttaatagatctcattcagaggacaaaggatgcagtaagagagctggacaatctgcagtatcgaaagatgaagaaactccttttccaggaggcacataatggaccagcagtagaagcacaggaagaagaagaggaacaagatcatggtgttggccggacaggaacagttaatagtgttggaagtaatcaatccattcccagcatgtccatcagtgccagcagccaaagcagtagtgttaacagtcttccagatgtctcagatgacaagagtgagctagacatgatggagggagaccacacagtgatgtctaacagttctgttatccatttaaaaccagaggaagaaaattacagagaagagggagatcctagaacaagagcatcagatccacaatctccaccccaagtatctcgtcacaaatcacactatcgtaatcgagaacactttgctactatacggacagcatcactggttacgaggcaaatgcaagaacatgagcaggactctgagcttagagaacaaatgtctggctataagcgaatgaggcgacaacatcaaaagcaactgatgactctggaaaacaagctaaaggctgagatggatgaacatcgcctcagattagacaaagatcttgaaactcagcgtaacaattttgctgcagaaatggagaaacttatcaagaaacaccaggctgccatggagaaagaggctaaagtgatgtccaatgaagagaaaaaatttcagcaacatattcaggcccaacagaagaaagaactgaatagttttctcgagtcccagaaaagagagtataaacttcgaaaagagcagcttaaagaggagctaaatgaaaaccagagtacccccaaaaaagaaaaacaggagtggctttcaaagcagaaggagaatatacagcatttccaagcagaagaagaagctaaccttcttcgacgtcaaagacaatacctagagctggaatgccgtcgcttcaagagaagaatgttacttgggcgtcataacttagagcaggaccttgtcagggaggagttaaacaaaagacagactcagaaggacttagagcatgccatgctactccgacagcatgaatctatgcaagaactggagttccgccacctcaacacaattcagaagatgcgctgtgagttgatcagattacagcatcaaactgagctcactaaccagctggaatataataagcgaagagaacgagaactaagacgaaagcatgtcatggaagttcgacaacagcctaagagtttgaagtctaaagaactccaaataaaaaagcagtttcaggatacctgcaaaatccaaaccagacagtacaaagcattaagaaatcacctgctggagactacaccaaagagtgagcacaaagctgttctgaaacggctcaaggaggaacagacccggaaattagctatcttggctgagcagtatgatcacagcattaatgaaatgctctccacacaagccctgcgtttggatgaagcacaggaagcagagtgccaggttttgaagatgcagctgcagcaggaactggagctgttgaatgcgtatcagagcaaaatcaagatgcaagctgaggcacaacatgatcgagagcttcgcgagcttgaacagagggtctccctccggagggcactcttagaacaaaagattgaagaagagatgttggctttgcagaatgagcgcacagaacgaatacgaagcctgttggaacgtcaagccagagagattgaagcttttgactctgaaagcatgagactaggttttagtaatatggtcctttctaatctctcccctgaggcattcagccacagctacccgggagcttctggttggtcacacaaccctactgggggtccaggacctcactggggtcatcccatgggtggcccaccacaagcttggggccatccaatgcaaggtggaccccagccatggggtcacccttcagggccaatgcaaggggtacctcgaggtagcagtatgggagtccgcaatagcccccaggctctgaggcggacagcttctgggggacggacggagcagggcatgagcagaagcacgagtgtcacttcacaaatatccaatgggtcacacatgtcttatacataacttaataattgagagtggcaattccgctggagctgtctgccaaaagaaactgcctacagacatcatcacagcagcctcctcacttgggtactacagtgtggaagctgagtgcatatggtatattttattcatttttgtaaagcgttctgttttgtgtttactaattgggatgtcatagtacttggctgccgggtttgtttgtttttggggaaattttgaaaagtggagttgatattaaaaataaatgtgtatgtgtgtacatatatatacacacacatacacatatattatgcatgtggtgaaaagaattggctagataggggatttttctgaacactgcaaaaatagaacgtagcaaaatggcttcagttatcacttttgggtgtctgtatcctaagaagtttctgaaaagatctaaagcctttttatcccatatcccaaattcttatgagccactcacagcaggcagcatatgttgaaataagttattactggtacacacctgcattgcctcaccagtgtatttatttgttattaaattgatctgacttctcagcctcatttggactaaaaaaagaaagcagaaatccatgaacacattgcttctcggccttttggctaagatcaagtgtagaaatccatgaacactaaaggacttcattgattttttcagagagtagaaaacaacttagtttttcttttttcctgaatgcgtcataggcttgtgagtgatttttgtccattcaattgtgccttctttgtattatgataagatgggggtacttaaggagatcacaagttgtgtgaggattgcattaacaaacctatgagccttcaatggggaagaccagaagggtgagaggggccctgaaagttcatatggtgggtatgtcccgcagcagagtgaggagatgaagcttacgtgtcctgacgttttgttgcttatactgtgatatctcatcctagctaagctctataatgcccaagaccccaaacagtacttttactttgtttgtacaaaaacaaagacatatagccaatacaaatcaaatgccggaggtgtttgatgccatatttgcaaattgccatctattgaaattctcgtcacactacatagacataattgttatctccttttggcttatgtgattttctgtttacaagtagaatagccaattatttaaatgtttagttgccacagtgaaccaggagtcactgagccaatgactttaccagctgctgactaatcttcatcaccactgtagattttgctgcatgtgcaggtcctctatttttaattgctgttttcgttgctgcagtactttacaaacttctagttcgttgagacttagtgaccatttggcatcaagttaacatcacacaataggaaacaccacttccacaagtctcaagcctcagtgctaaagtactactgaaaaggaactaggaagtttggccaatt

SEQ ID NO: 30957 - DNA, 4068 bp, Homo sapiens
  source 1..4068: mol_type = unassigned DNA
ctcctcctcactcctcaccctccagggtagcggctaccggagcgctgcagggggctgcgcctgcctgctccgccccagacctgtcggcgaaaggtagtttatgccaacgtgacttcattcatacagatgaaccaaggatcgggatagcagtataaaattagaatcaagacagctgactgctcagcaggatgccatcaactaacagagcaggcagcctgaaggaccctgaaattgcagagctcttcttcaaagaagatccagagaagctcttcacagatctcagagaaattggccatggaagctttggagcagtgtattttgcacgagatgtgcgtaccaatgaagtggtggccatcaagaaaatgtcttatagtggaaagcagtctactgagaaatggcaggatattattaaggaagtcaagtttctacaaagaataaaacatcccaacagtatagaatacaaaggctgttatttacgtgaacacacagcatggcttgtaatggaatattgtttaggatctgcttcggatttactagaagttcacaaaaagccattacaagaagtggaaatagcagcaattacacatggtgctcttcagggattagcctacttacattctcatactatgattcatagagatatcaaagcaggaaatatccttctgacagaaccaggccaggtgaaacttgctgactttggctctgcttccatggcatcacctgccaattcctttgtgggaacgccgtattggatggccccagaagtaattttagccatggatgaaggacaatatgatggcaaagtagatgtgtggtctcttggaataacatgtattgaactagcggaaaggaagcctcctttatttaatatgaatgcaatgagtgccttatatcacatagcccaaaatgaatcccctacactacagtctaatgaatggtctgattattttcgcaactttgtagattcttgcctccagaaaatccctcaagatcgacctacatcagaggaacttttaaagcacatatttgttcttcgggagcgccctgaaaccgtgttaatagatctcattcagaggacaaaggatgcagtaagagagctggacaatctgcagtatcgaaagatgaagaaactccttttccaggaggcacataatggaccagcagtagaagcacaggaagaagaagaggaacaagatcatggtgttggccggacaggaacagttaatagtgttggaagtaatcaatccattcccagcatgtccatcagtgccagcagccaaagcagtagtgttaacagtcttccagatgtctcagatgacaagagtgagctagacatgatggagggagaccacacagtgatgtctaacagttctgttatccatttaaaaccagaggaagaaaattacagagaagagggagatcctagaacaagagcatcagatccacaatctccaccccaagtatctcgtcacaaatcacactatcgtaatcgagaacactttgctactatacggacagcatcactggttacgaggcaaatgcaagaacatgagcaggactctgagcttagagaacaaatgtctggctataagcgaatgaggcgacaacatcaaaagcaactgatgactctggaaaacaagctaaaggctgagatggatgaacatcgcctcagattagacaaagatcttgaaactcagcgtaacaattttgctgcagaaatggagaaacttatcaagaaacaccaggctgccatggagaaagaggctaaagtgatgtccaatgaagagaaaaaatttcagcaacatattcaggcccaacagaagaaagaactgaatagttttctcgagtcccagaaaagagagtataaacttcgaaaagagcagcttaaagagtctaaagaactccaaataaaaaagcagtttcaggatacctgcaaaatccaaaccagacagtacaaagcattaagaaatcacctgctggagactacaccaaagagtgagcacaaagctgttctgaaacggctcaaggaggaacagacccggaaattagctatcttggctgagcagtatgatcacagcattaatgaaatgctctccacacaagccctgcgtttggatgaagcacaggaagcagagtgccaggttttgaagatgcagctgcagcaggaactggagctgttgaatgcgtatcagagcaaaatcaagatgcaagctgaggcacaacatgatcgagagcttcgcgagcttgaacagagggtctccctccggagggcactcttagaacaaaagattgaagaagagatgttggctttgcagaatgagcgcacagaacgaatacgaagcctgttggaacgtcaagccagagagattgaagcttttgactctgaaagcatgagactaggttttagtaatatggtcctttctaatctctcccctgaggcattcagccacagctacccgggagcttctggttggtcacacaaccctactgggggtccaggacctcactggggtcatcccatgggtggcccaccacaagcttggggccatccaatgcaaggtggaccccagccatggggtcacccttcagggccaatgcaaggggtacctcgaggtagcagtatgggagtccgcaatagcccccaggctctgaggcggacagcttctgggggacggacggagcagggcatgagcagaagcacgagtgtcacttcacaaatatccaatgggtcacacatgtcttatacataacttaataattgagagtggcaattccgctggagctgtctgccaaaagaaactgcctacagacatcatcacagcagcctcctcacttgggtactacagtgtggaagctgagtgcatatggtatattttattcatttttgtaaagcgttctgttttgtgtttactaattgggatgtcatagtacttggctgccgggtttgtttgtttttggggaaattttgaaaagtggagttgatattaaaaataaatgtgtatgtgtgtacatatatatacacacacatacacatatattatgcatgtggtgaaaagaattggctagataggggatttttctgaacactgcaaaaatagaacgtagcaaaatggcttcagttatcacttttgggtgtctgtatcctaagaagtttctgaaaagatctaaagcctttttatcccatatcccaaattcttatgagccactcacagcaggcagcatatgttgaaataagttattactggtacacacctgcattgcctcaccagtgtatttatttgttattaaattgatctgacttctcagcctcatttggactaaaaaaagaaagcagaaatccatgaacacattgcttctcggccttttggctaagatcaagtgtagaaatccatgaacactaaaggacttcattgattttttcagagagtagaaaacaacttagtttttcttttttcctgaatgcgtcataggcttgtgagtgatttttgtccattcaattgtgccttctttgtattatgataagatgggggtacttaaggagatcacaagttgtgtgaggattgcattaacaaacctatgagccttcaatggggaagaccagaagggtgagaggggccctgaaagttcatatggtgggtatgtcccgcagcagagtgaggagatgaagcttacgtgtcctgacgttttgttgcttatactgtgatatctcatcctagctaagctctataatgcccaagaccccaaacagtacttttactttgtttgtacaaaaacaaagacatatagccaatacaaatcaaatgccggaggtgtttgatgccatatttgcaaattgccatctattgaaattctcgtcacactacatagacataattgttatctccttttggcttatgtgattttctgtttacaagtagaatagccaattatttaaatgtttagttgccacagtgaaccaggagtcactgagccaatgactttaccagctgctgactaatcttcatcaccactgtagattttgctgcatgtgcaggtcctctatttttaattgctgttttcgttgctgca

SEQ ID NO: 30958 - DNA, 4246 bp, Homo sapiens
  source 1..4246: mol_type = unassigned DNA
agaatttcaaatatcaggttcaggcccctgcgtgcaccagtatccggggttcattccccgggcgttcaaatatcggattcagtctccatcccgttcagatattcggggttcagaccccacaatcagaaatccggaattcggcagctgtcgccctcgacgagggggaggactggaccgcgaggtcagattaggttgtcaccccctcccctccaggggaggcttcccgggcccgcccctcaggaagggcgaaagccgaggaagaggtggcaaggggaaaggtctccttgcccctctccctgcttggcagagccgctggaggaccccaggcggaagcggaggcgctggggcaccatagtgacccctaccaggccaggccccactctcagggcccccaggggccaccatgccagctgggggccgggccgggagcctgaaggacccagatgtggctgagctcttcttcaaggatgacccagaaaagctcttctctgacctccgggaaattggccatggcagctttggagccgtatactttgcccgggatgtccggaatagtgaggtggtggccatcaagaagatgtcctacagtgggaagcagtccaatgagaaatggcaagacatcatcaaggaggtgcggttcttacagaagctccggcatcccaacaccattcagtaccggggctgttacctgagggagcacacggcttggctggtaatggagtattgcctgggctcagcttctgaccttctagaagtgcacaagaaaccccttcaggaggtagagatcgcagctgtgacccacggggcgcttcagggcctggcatatctgcactcccacaacatgatccatagggatgtgaaggctggaaacatcctgctgtcagagccagggttagtgaagctaggggactttggttctgcgtccatcatggcacctgccaactccttcgtgggcaccccatactggatggcacccgaggtgatcctggccatggatgaggggcagtacgatggcaaagtggacgtctggtccttggggataacctgcatcgagctggctgaacggaaaccaccgctctttaacatgaatgcgatgagtgccttataccacattgcacagaacgaatcccccgtgctccagtcaggacactggtctgagtacttccggaattttgtcgactcctgtcttcagaaaatccctcaagacagaccaacctcagaggttctcctgaagcaccgctttgtgctccgggagcggccacccacagtcatcatggacctgatccagaggaccaaggatgccgtgcgggagctggacaacctgcagtaccgcaagatgaagaagatcctgttccaagaggcacccaacggccctggtgccgaggccccagaggaggaagaggaggccgagccctacatgcaccgggccgggactctgaccagcctcgagagtagccactcagtgcccagcatgtccatcagcgcctccagccagagcagctccgtcaacagcctagcagatgcctcagacaacgaggaagaggaggaggaggaggaggaagaggaggaggaggaagaaggccctgaagcccgggagatggccatgatgcaggagggggagcacacagtcacctctcacagctccattatccaccggctgccgggctctgacaacctatatgatgacccctaccagccagagataacccccagccctctccagccgcctgcagccccagctcccacttccaccacctcttccgcccgccgccgggcctactgccgtaaccgagaccactttgccaccatccgaaccgcctccctggtcagccgtcagatccaggagcatgagcaggactctgcgctgcgggagcagctgagcggctataagcggatgcgacgacagcaccagaagcagctgctggccctggagtcacggctgaggggtgaacgggaggagcacagtgcacggctgcagcgggagcttgaggcgcagcgggctggctttggggcagaggcagaaaagctggcccggcggcaccaggccataggtgagaaggaggcacgagctgcccaggccgaggagcggaagttccagcagcacatccttgggcagcagaagaaggagctggctgccctgctggaggcacagaagcggacctacaaacttcgcaaggaacagctgaaggaggagctccaggagaaccccagcactcccaagcgggagaaggccgagtggctgctgcggcagaaggagcagctccagcagtgccaggcggaggaggaagcagggctgctgcggcggcagcgccagtactttgagctgcagtgtcgccagtacaagcgcaagatgttgctggctcggcacagcctggaccaggacctgctgcgggaggacctgaacaagaagcagacccagaaggacttggagtgtgcactgctgcttcggcagcacgaggccacgcgggagctggagctgcggcagctccaggccgtgcagcgcacgcgggctgagctcacccgcctgcagcaccagacggagctgggcaaccagctggagtacaacaagcggcgtgagcaagagttgcggcagaagcatgcggcccaggttcgccagcagcccaagagcctcaaatctaaggagctgcagatcaagaagcagttccaggagacgtgtaagatccagactcggcagtacaaggctctgcgagcacacttgctggagaccacgcccaaagctcagcacaagagcctccttaagcggctcaaggaagagcagacccgcaagctggcgatcttggcggagcagtatgaccagtccatctcagagatgctcagctcacaggcgctgcggcttgatgagacccaggaggcagagttccaggcccttcggcagcagcttcaacaggagctggagctgctcaacgcttaccagagcaagatcaagatccgcacagagagccagcacgagagggagctgcgggagctggagcagagggtcgcgctgcggcgggcactgctggagcagcgggtggaagaggagctgctggccctgcagacaggacgctccgagcgaatccgcagtctgcttgagcggcaggcccgtgagatcgaggccttcgatgcggaaagcatgaggctgggcttctccagcatggctctggggggcatcccggctgaagctgctgcccagggctatcctgctccaccccctgccccagcctggccctcccgtcccgttccccgttctggggcacactggagccatggccctcctccaccaggcatgccccctccagcctggcgtcagccgtctctgctggctcccccaggccccccaaactggctggggccccccacacaaagtgggacaccccgtggcggagccctgctgctgctaagaaacagcccccagcccctgcggcgggcagcctcggggggcagtggcagtgagaatgtgggcccccctgctgccgcggtgcccgggcccctgagccgcagcaccagtgtcgcttcccacatcctcaatggttcttcccacttctattcctgaggtgcagcggggaggagcagatgagctgggcagggcaggggtgggtggagcctgaccctggagggcactgagctggaggcccctgcaagggtaggggacaagatgtaggctccagctcccctcagacctcctcatctcatgagcttcttggggctggccagtggcccagggccagcttggcgataggtgcctcaaggctgcctgggagccccgcctccctaccatggtgccaggggtctccctccgccacctaggaaaggagggagatgtgcgtgtcaaatattcatctagtcccctgggggaggggaagggtgggtctagacatactatattcagagaactatactaccctcacagtgaggccctcagacctgccacagggcagagcaggtctggggcctgaggcagggagaatgagaggccaccttactggcaggaaggatcaggatggggtcttggggtcaggatgcctgggtctcttcccgtaactgtctgacgtcctgtgccgtcttgtcctttatctttttttttttttttttaattgggatcagggctggggcggggaaacaagggaaggaccttggaaggggctgctcccaggcctggggggcagtcgtgggagcccctctcagctgtggggctggcacagagccccaggcaagcttttaataaactgttggttattctaacaga

SEQ ID NO: 30959 - DNA, 4871 bp, Homo sapiens
  source 1..4871: mol_type = unassigned DNA
gctgagacggagaagaggagaggcagagagggcgcggggaccgtcagcagcaccttagctacaatcgttcagctattctcggaagagagaagggagagggaggaggccggggcgggagtgggggctgtcaccctcggaccccggcgtgagaggggccgtgcggccggacgtcctcggggtgggcccccagtcggtggccgaagacctacagctcaggcccctgggtcccaaatttccaggctttgcccctcctcctttctcagatacccgggtaacagtcctcatagtccagatatccgggactcgggtcccaacctctctaaacctgggtctctgtttcatagaatttcaaatatcaggttcaggcccctgcgtgcaccagtatccggggttcattccccgggcgttcaaatatcggattcagtctccatcccgttcagatattcggggttcagaccccacaatcagaaatccggaattcggcagctgtcgccctcgacgagggggaggactggaccgcgaggtcagattaggttgtcaccccctcccctccaggggaggcttcccgggcccgcccctcaggaagggcgaaagccgaggaagaggtggcaaggggaaaggtctccttgcccctctccctgcttggcagagccgctggaggaccccaggcggaagcggaggcgctggggcaccatagtgacccctaccaggccaggccccactctcagggcccccaggggccaccatgccagctgggggccgggccgggagcctgaaggacccagatgtggctgagctcttcttcaaggatgacccagaaaagctcttctctgacctccgggaaattggccatggcagctttggagccgtatactttgcccgggatgtccggaatagtgaggtggtggccatcaagaagatgtcctacagtgggaagcagtccaatgagaaatggcaagacatcatcaaggaggtgcggttcttacagaagctccggcatcccaacaccattcagtaccggggctgttacctgagggagcacacggcttggctggtaatggagtattgcctgggctcagcttctgaccttctagaagtgcacaagaaaccccttcaggaggtagagatcgcagctgtgacccacggggcgcttcagggcctggcatatctgcactcccacaacatgatccatagggatgtgaaggctggaaacatcctgctgtcagagccagggttagtgaagctaggggactttggttctgcgtccatcatggcacctgccaactccttcgtgggcaccccatactggatggcacccgaggtgatcctggccatggatgaggggcagtacgatggcaaagtggacgtctggtccttggggataacctgcatcgagctggctgaacggaaaccaccgctctttaacatgaatgcgatgagtgccttataccacattgcacagaacgaatcccccgtgctccagtcaggacactggtctgagtacttccggaattttgtcgactcctgtcttcagaaaatccctcaagacagaccaacctcagaggttctcctgaagcaccgctttgtgctccgggagcggccacccacagtcatcatggacctgatccagaggaccaaggatgccgtgcgggagctggacaacctgcagtaccgcaagatgaagaagatcctgttccaagaggcacccaacggccctggtgccgaggccccagaggaggaagaggaggccgagccctacatgcaccgggccgggactctgaccagcctcgagagtagccactcagtgcccagcatgtccatcagcgcctccagccagagcagctccgtcaacagcctagcagatgcctcagacaacgaggaagaggaggaggaggaggaggaagaggaggaggaggaagaaggccctgaagcccgggagatggccatgatgcaggagggggagcacacagtcacctctcacagctccattatccaccggctgccgggctctgacaacctatatgatgacccctaccagccagagataacccccagccctctccagccgcctgcagccccagctcccacttccaccacctcttccgcccgccgccgggcctactgccgtaaccgagaccactttgccaccatccgaaccgcctccctggtcagccgtcagatccaggagcatgagcaggactctgcgctgcgggagcagctgagcggctataagcggatgcgacgacagcaccagaagcagctgctggccctggagtcacggctgaggggtgaacgggaggagcacagtgcacggctgcagcgggagcttgaggcgcagcgggctggctttggggcagaggcagaaaagctggcccggcggcaccaggccataggtgagaaggaggcacgagctgcccaggccgaggagcggaagttccagcagcacatccttgggcagcagaagaaggagctggctgccctgctggaggcacagaagcggacctacaaacttcgcaaggaacagctgaaggaggagctccaggagaaccccagcactcccaagcgggagaaggccgagtggctgctgcggcagaaggagcagctccagcagtgccaggcggaggaggaagcagggctgctgcggcggcagcgccagtactttgagctgcagtgtcgccagtacaagcgcaagatgttgctggctcggcacagcctggaccaggacctgctgcgggaggacctgaacaagaagcagacccagaaggacttggagtgtgcactgctgcttcggcagcacgaggccacgcgggagctggagctgcggcagctccaggccgtgcagcgcacgcgggctgagctcacccgcctgcagcaccagacggagctgggcaaccagctggagtacaacaagcggcgtgagcaagagttgcggcagaagcatgcggcccaggttcgccagcagcccaagagcctcaaagtacgtgcaggccagcgccccccgggccttccactccccattcctggggctctgggcccacccaacacaggcacccctatagaacagcagccctgctcacctggccaggaggcagtcctggaccaaagaatgcttggcgaggaggaggaagcagttggagagagaaggattctgggaaaggaaggggccactttggagcccaagcagcagaggattctgggggaagaatcaggagcccctagtcccagtccacaaaaacatgggagcctggttgatgaggaagtttggggtctgcctgaggagatagaggagcttagggtgccctcccttgtaccccaggagaggagcattgttggccaggaggaggctgggacatggagcttgtgggggaaggaggatgagagtcttctggatgaggagtttgagcttggctgggtccagggcccagcactgactcccgtccctgaggaggaggaagaagaggaagagggggctccgattgggacccctagggatcctggagatggttgtccttcccccgacatccctcctgaaccccctccaacacacctgaggccctgccctgccagccagctccctggactcctgtcccatggcctcctggccggcctctcctttgcagtggggtcctcctctggcctcctgcccctcctgctgctgctgctgcttccattgctggcagcccagggtgggggtggcctgcaggcagcgctgctggcccttgaggtggggctggtgggtctgggggcctcctacctgctcctttgtacagccctgcacctgccctccagtcttttcctactcctggcccagggtaccgcactgggggccgtcctgggcctgagctggcgccgaggcctcatgggtgttcccctgggccttggagctgcctggctcttagcttggccaggcctagctctacctctggtggctatggcagcggggggcagatgggtgcggcagcagggcccccgggtgcgccggggcatatctcgactctggttgcgggttctgctgcgcctgtcacccatggccttccgggccctgcagggctgtggggctgtgggggaccggggtctgtttgcactgtaccccaaaaccaacaaggatggcttccgcagccgcctgcccgtccctgggccccggcggcgtaatccccgcaccacccaacacccattagctctgttggcaagggtctgggtcctgtgcaagggctggaactggcgtctggcacgggccagccagggtttagcatcccacttgcccccgtgggccatccacacactggccagctggggcctgcttcggggtgaacggcccacccgaatcccccggctactaccacgcagccagcgccagctagggccccctgcctcccgccagccactgccagggactctagccgggcggaggtcacgcacccgccagtcccgggccctgcccccctggaggtagctgactccagcccttccagcccaaatctagagcattgagcactttatctcccacgactcagtgaagtttctccagtccctagtcctctcttttcacccaccttcctcagtttgctcacttaccccaggcccagcccttcggacctctagacaggcagcctcctcagctgtggagtccagcagtcactctgtgttctcctggcgctcctcccctaagttattgctgttcgcccgctgtgtgtgctcatcctcaccctcattgactcaggcctggggccaggggtggtggagggtgggaagagtcatgttttttttctcctctttgattttgtttttctgtctcccttccaacctgtccccttccccccaccaaaaaaagaaaaagacaaacacaaataaaatatctgagcggaactgtg

SEQ ID NO: 30960 - DNA, 3048 bp, Homo sapiens
  source 1..3048: mol_type = unassigned DNA
gagaccgggacgagaccggggctgtggtgcggagagaggctgagacggagaagaggagaggcagagagggcgcggggaccgtcagcagcaccttagctacaatcgttcagctattctcggaagagagaagggagagggaggaggccggggcgggagtgggggctgtcaccctcggaccccggcgtgagaggggccgtgcggccggacgtcctcggggtgggcccccagtcggtggccgaagacctacagctcaggcccctgggtcccaaatttccaggctttgcccctcctcctttctcagatacccgggtaacagtcctcatagtccagatatccgggactcgggtcccaacctctctaaacctgggtctctgtttcatagaatttcaaatatcaggttcaggcccctgcgtgcaccagtatccggggttcattccccgggcgttcaaatatcggattcagtctccatcccgttcagatattcggggttcagaccccacaatcagaaatccggaattcggcagctgtcgccctcgacgagggggaggactggaccgcgaggtcagattaggttgtcaccccctcccctccaggggaggcttcccgggcccgcccctcaggaagggcgaaagccgaggaagaggtggcaaggggaaaggtctccttgcccctctccctgcttggcagagccgctggaggaccccaggcggaagcggaggcgctggggcaccatagtgacccctaccaggccaggccccactctcagggcccccaggggccaccatgccagctgggggccgggccgggagcctgaaggacccagatgtggctgagctcttcttcaaggatgacccagaaaagctcttctctgacctccgggaaattggccatggcagctttggagccgtatactttgcccgggatgtccggaatagtgaggtggtggccatcaagaagatgtcctacagtgggaagcagtccaatgagaaatggcaagacatcatcaaggaggtgcggttcttacagaagctccggcatcccaacaccattcagtaccggggctgttacctgagggagcacacggcttggctggtaatggagtattgcctgggctcagcttctgaccttctagaagtgcacaagaaaccccttcaggaggtagagatcgcagctgtgacccacggggcgcttcagggcctggcatatctgcactcccacaacatgatccatagggatgtgaaggctggaaacatcctgctgtcagagccagggttagtgaagctaggggactttggttctgcgtccatcatggcacctgccaactccttcgtgggcaccccatactggatggcacccgaggtgatcctggccatggatgaggggcagtacgatggcaaagtggacgtctggtccttggggataacctgcatcgagctggctgaacggaaaccaccgctctttaacatgaatgcgatgagtgccttataccacattgcacagaacgaatcccccgtgctccagtcaggacactggtctgagtacttccggaattttgtcgactcctgtcttcagaaaatccctcaagacagaccaacctcagaggttctcctgaagcaccgctttgtgctccgggagcggccacccacagtcatcatggacctgatccagaggaccaaggatgccgtgcgggagctggacaacctgcagtaccgcaagatgaagaagatcctgttccaagaggcacccaacggccctggtgccgaggccccagaggaggaagaggaggccgagccctacatgcaccgggccgggactctgaccagcctcgagagtagccactcagtgcccagcatgtccatcagcgcctccagccagagcagctccgtcaacagcctagcagatgcctcagacaacgaggaagaggaggaggaggaggaggaagaggaggaggaggaagaaggccctgaagcccgggagatggccatgatgcaggagggggagcacacagtcacctctcacagctccattatccaccggctgccgggctctgacaacctatatgatgacccctaccagccagagataacccccagccctctccagccgcctgcagccccagctcccacttccaccacctcttccgcccgccgccgggcctactgccgtaaccgagaccactttgccaccatccgaaccgcctccctggtcagccgtcagatccaggagcatgagcaggactctgcgctgcgggagcagctgagcggctataagcggatgcgacgacagcaccagaagcagctgctggccctggagtcacggctgaggggtgaacgggaggagcacagtgcacggctgcagcgggagcttgaggcgcagcgggctggctttggggcagaggcagaaaagctggcccggcggcaccaggccataggtgagaaggaggcacgagctgcccaggccgaggagcggaagttccagcagcacatccttgggcagcagaagaaggagctggctgccctgctggaggcacagaagcggacctacaaacttcgcaaggaacagctgaaggaggagctccaggagaaccccagcactcccaagcgggagaaggccgagtggctgctgcggcagaaggagcagctccagcagtgccaggcggaggaggaagcagggctgctgcggcggcagcgccagtactttgagctgcagtgtcgccagtacaagcgcaagatgttgctggctcggcacagcctggaccaggacctgctgcgggaggacctgaacaagaagcagacccagaaggacttggagtgtgcactgctgcttcggcagcacgaggccacgcgggagctggagctgcggcagctccaggccgtgcagcgcacgcgggctgagctcacccgcctgcagcaccagacggagctgggcaaccagctggagtacaacaagcggcgtgagcaagagttgcggcagaagcatgcggcccaggttcgccagcagcccaagagcctcaaaaaaaagacaaacacaaataaaatatctgagcgg

SEQ ID NO: 30961 - DNA, 4072 bp, Homo sapiens
  source 1..4072: mol_type = unassigned DNA
tgcccctcctcctttctcagatacccgggtaacagtcctcatagtccagatatccgggactcgggtcccaacctctctaaacctgggtctctgtttcatagaatttcaaatatcaggttcaggcccctgcgtgcaccagtatccggggttcattccccgggcgttcaaatatcggattcagtctccatcccgttcagatattcggggttcagaccccacaatcagaaatccggaattcggcagctgtcgccctcgacgagggggaggactggaccgcgaggtcagattaggttgtcaccccctcccctccaggggaggcttcccgggcccgcccctcaggaagggcgaaagccgaggaagaggtggcaaggggaaaggtctccttgcccctctccctgcttggcagagccgctggaggaccccaggcggaagcggaggcgctggggcaccatagtgacccctaccaggccaggccccactctcagggcccccaggggccaccatgccagctgggggccgggccgggagcctgaaggacccagatgtggctgagctcttcttcaaggatgacccagaaaagctcttctctgacctccgggaaattggccatggcagctttggagccgtatactttgcccgggatgtccggaatagtgaggtggtggccatcaagaagatgtcctacagtgggaagcagtccaatgagaaatggcaagacatcatcaaggaggtgcggttcttacagaagctccggcatcccaacaccattcagtaccggggctgttacctgagggagcacacggcttggctggtaatggagtattgcctgggctcagcttctgaccttctagaagtgcacaagaaaccccttcaggaggtagagatcgcagctgtgacccacggggcgcttcagggcctggcatatctgcactcccacaacatgatccatagggatgtgaaggctggaaacatcctgctgtcagagccagggttagtgaagctaggggactttggttctgcgtccatcatggcacctgccaactccttcgtgggcaccccatactggatggcacccgaggtgatcctggccatggatgaggggcagtacgatggcaaagtggacgtctggtccttggggataacctgcatcgagctggctgaacggaaaccaccgctctttaacatgaatgcgatgagtgccttataccacattgcacagaacgaatcccccgtgctccagtcaggacactggtctgagtacttccggaattttgtcgactcctgtcttcagaaaatccctcaagacagaccaacctcagaggttctcctgaagcaccgctttgtgctccgggagcggccacccacagtcatcatggacctgatccagaggaccaaggatgccgtgcgggagctggacaacctgcagtaccgcaagatgaagaagatcctgttccaagaggcacccaacggccctggtgccgaggccccagaggaggaagaggaggccgagccctacatgcaccgggccgggactctgaccagcctcgagagtagccactcagtgcccagcatgtccatcagcgcctccagccagagcagctccgtcaacagcctagcagatgcctcagacaacgaggaagaggaggaggaggaggaggaagaggaggaggaggaagaaggccctgaagcccgggagatggccatgatgcaggagggggagcacacagtcacctctcacagctccattatccaccggctgccgggctctgacaacctatatgatgacccctaccagccagagataacccccagccctctccagccgcctgcagccccagctcccacttccaccacctcttccgcccgccgccgggcctactgccgtaaccgagaccactttgccaccatccgaaccgcctccctggtcagccgtcagatccaggagcatgagcaggactctgcgctgcgggagcagctgagcggctataagcggatgcgacgacagcaccagaagcagctgctggccctggagtcacggctgaggggtgaacgggaggagcacagtgcacggctgcagcgggagcttgaggcgcagcgggctggctttggggcagaggcagaaaagctggcccggcggcaccaggccataggtgagaaggaggcacgagctgcccaggccgaggagcggaagttccagcagcacatccttgggcagcagaagaaggagctggctgccctgctggaggcacagaagcggacctacaaacttcgcaaggaacagctgaaggaggagctccaggagaaccccagcactcccaagcgggagaaggccgagtggctgctgcggcagaaggagcagctccagcagtgccaggcggaggaggaagcagggctgctgcggcggcagcgccagtactttgagctgcagtgtcgccagtacaagcgcaagatgttgctggctcggcacagcctggaccaggacctgctgcgggaggacctgaacaagaagcagacccagaaggacttggagtgtgcactgctgcttcggcagcacgaggccacgcgggagctggagctgcggcagctccaggccgtgcagcgcacgcgggctgagctcacccgcctgcagcaccagacggagctgggcaaccagctggagtacaacaagcggcgtgagcaagagttgcggcagaagcatgcggcccaggttcgccagcagcccaagagcctcaaagagaggagcattgttggccaggaggaggctgggacatggagcttgtgggggaaggaggatgagagtcttctggatgaggagtttgagcttggctgggtccagggcccagcactgactcccgtccctgaggaggaggaagaagaggaagagggggctccgattgggacccctagggatcctggagatggttgtccttcccccgacatccctcctgaaccccctccaacacacctgaggccctgccctgccagccagctccctggactcctgtcccatggcctcctggccggcctctcctttgcagtggggtcctcctctggcctcctgcccctcctgctgctgctgctgcttccattgctggcagcccagggtgggggtggcctgcaggcagcgctgctggcccttgaggtggggctggtgggtctgggggcctcctacctgctcctttgtacagccctgcacctgccctccagtcttttcctactcctggcccagggtaccgcactgggggccgtcctgggcctgagctggcgccgaggcctcatgggtgttcccctgggccttggagctgcctggctcttagcttggccaggcctagctctacctctggtggctatggcagcggggggcagatgggtgcggcagcagggcccccgggtgcgccggggcatatctcgactctggttgcgggttctgctgcgcctgtcacccatggccttccgggccctgcagggctgtggggctgtgggggaccggggtctgtttgcactgtaccccaaaaccaacaaggatggcttccgcagccgcctgcccgtccctgggccccggcggcgtaatccccgcaccacccaacacccattagctctgttggcaagggtctgggtcctgtgcaagggctggaactggcgtctggcacgggccagccagggtttagcatcccacttgcccccgtgggccatccacacactggccagctggggcctgcttcggggtgaacggcccacccgaatcccccggctactaccacgcagccagcgccagctagggccccctgcctcccgccagccactgccagggactctagccgggcggaggtcacgcacccgccagtcccgggccctgcccccctggaggtagctgactccagcccttccagcccaaatctagagcattgagcactttatctcccacgactcagtgaagtttctccagtccctagtcctctcttttcacccaccttcctcagtttgctcacttaccccaggcccagcccttcggacctctagacaggcagcctcctcagctgtggagtccagcagtcactctgtgttctcctgg

SEQ ID NO: 30962 - DNA, 3684 bp, Homo sapiens
  source 1..3684: mol_type = unassigned DNA
ccaggagggcgcggtaaggctggggtatcctggtgagaactggagaggatctacccgggtccctgcctggccagtggggaaacaccggtcccccaggcaccttcacctaaccagagcggggatttccaccgcccctcatgccgccctttggaggaaagtgaaagtgaaaggaggaagaggaggctaaatggctgaggaggtcgcagcgccatgaagtccctgtctctgctcctcgctgtggctttgggcctggcgaccgccgtctcagcaggacccgcggtgatcgagtgttggttcgtggaggatgcgagcggaaagggcctggccaagagacccggtgcactgctgttgcgccagggaccgggggaaccgccgccccggccggacctcgaccctgagctctatctcagtgtacacgaccccgcgggcgccctccaggctgccttcaggcggtatccccggggcgcccccgcaccacactgcgagatgagccgcttcgtgcctctccccgcctctgcgaaatgggccagcggcctgacccccgcgcagaactgcccgcgggccctggatggggcttggctgatggtcagcatatccagcccagtcctcagcctctccagcctcttgcgaccacagccagagcctcagcaggagcctgttctcatcaccatggcaacagtagagatggggtttcaccatgttggccaggctgctctcgaactcctgacctcagtggtactgactgtcctcacccacacccctgcccctcgagtgagactgggacaagatgctctgctggacttgagctttgcctacatgccccccacctccgaggccgcctcatctctggctccgggtccccctccctttgggctagagtggcgacgccagcacctgggtaagggacatctgctcctggctgcaactcctgggctgaatggccagatgccagcagcccaagaaggggccgtggcatttgctgcttgggatgatgatgagccatggggcccatggaccggaaatgggaccttctggctgcctagagttcaaccctttcaggagggcacctatctggccaccatacacctgccatacctgcaaggacaggtcaccctggagcttgctgtgtacaaaccccccaaagtgtccctgatgccagcaacccttgcacgggccgccccaggggaggcacccccggaattgctctgccttgtgtcccacttctacccttctgggggcctggaggtggagtgggaactccggggtggcccagggggccgctctcagaaggccgaggggcagaggtggctctcggccctgcgccaccattccgatggctctgtcagcctctctgggcacttgcagccgcccccagtcaccactgagcagcatggggcacgctatgcctgtcgaattcaccatcccagcctgcctgcctcggggcgcagcgctgaggtcaccctggaggtagcaggtctttcagggccctcccttgaggacagcgtaggccttttcctgtctgcctttcttctgcttgggctcttcaaggcactgggctgggctgctgtctacctgtccacctgcaaggattcaaagaagaaagcagagtgagggcactcactgccatcctgtggaagccaccatcatctctggcccaagcttctgtagtagctccctaaaataataccctatcatctgctcctaatccctccaatctctctccactgagtggctggaatgcttttttttttttctttcacttatataagggataatttttcttttttttttttttttgagacggagtctcactcttccgcccaggctgcagtgcagtggcatgatcttggcttactgcaacctccgcctcctgggttcaagcaattctgtggcttcagcctccggagtagctgggattacaggcacatgccaccacacccagtgaatttttgtatttttagtagagacggggtttcaccatgttggccaggctggtcttgaattcctgacctcaggtgatctgcccacctcagcctcccaaagtgctgggattacaggcgtgagccaccacaccaggcccgagaaatgcttttttaaaaaacacacatcttatggcattcaccttcttggagctctaggacagtggttctcaaaatttttttctctcaggacctcttaaaaatcatcaaggaccccaaaaagcttttgggtatgtgggttatagctatcaatatttatggtactagaacttaaaagtgagaaaaatttaaaacacgagaatacataggcacacattctattcatcgtgggaaccatggtgtcaatacatatcatgtagcttctgaaaaactccactgtacacttatagaatgaagaaggcaaaaaactttttttttttttttttgagactgagtctcgctctgtcgcccaggctggagtgcagtggcgcgatctcggctcactgcaagctccgcctctcgggttcacgccattctcctgcctcagcctcccaagtagctcggactacaggcgtcctccaccatgcctggctaatattttgtattttttagtagagacggggtttcaccgtgttagccaggatggtctcgatctcctaacctggtgatccgcccgcctcggcctcccaaagtattgggattacccgcgtgagccaccgcgcccggctgcaaataatctttctttttttctttttttctgagacagagtctcgctctgttgcccaggctggagtgcagtggcacgatctcggctcacggcacgctccgcctcccgggttcacgccattctcctgcctcagcttcccgagtagctgggactacaggggcccgccaccacgcccggctaactttttgtgtttttagtagagacggggtttcaccgtgttagccaggatggtctcgatctcctgaccttgtgatctgcccgcctcggcctcccaaagtgctgggattacaggcgtgagccaccgcgcccggcggcgaaacacgatattgtactaacatcttaattttgttataaaatctcacaaaccccctgacatagtctcagagatctgtagggccgaggttacatttggagaacccgtactctagggccaaatccattcttcttgccctggctcacttgtcccccccaccgccccgcgctggagccactgcctagttcttcagccctagatggtgctcgccagacctcctctcaatgctcatcacacacagggctattcctttcctccaatgaaccaaacgcctcccgcccacctccaggtcccagtcctctgttccctttgcctggtccacccttgccctccctgggtcgcagacgaggtcggcctcgtcattccccgcagaccgccgcgcgtccctcttgtgcggttcaccacagttgtatttaagtgatcgtgtgagtcgtcgttaaatgcctgtctccccgcggatcatgggctcctcgaggacagggaccggcctgtctgtccactgctgtaaccccgcgccggcatagggacctaaggcccactggagggcgctcatcaagtagctgctggatgttgacgaaggaagcggcggcgcagctcagggatctccgagtcaggacggtcggccagacccacggggtaacgggtctaatcgtgtaggaataaagctgtattccagtgcttccaaa

SEQ ID NO: 30963 - DNA, 3766 bp, Homo sapiens
  source 1..3766: mol_type = unassigned DNA
ggggacgcggcacagatagggggaagccggagtaatggttttcgggcaagtggatgttggagagcacacacaggagttggggggcgggggagggcctggggttggggagggctcgaactcggggctgctgggtagtccaggagggcgcggtaaggctggggtatcctggtgagaactggagaggatctacccgggtccctgcctggccagtggggaaacaccggtcccccaggcaccttcacctaaccagagcggggatttccaccgcccctcatgccgccctttggaggaaagtgaaagtgaaaggaggaagaggaggctaaatggctgaggaggtcgcagcgccatgaagtccctgtctctgctcctcgctgtggctttgggcctggcgaccgccgtctcagcaggacccgcggtgatcgagtgttggttcgtggaggatgcgagcggaaagggcctggccaagagacccggtgcactgctgttgcgccagggaccgggggaaccgccgccccggccggacctcgaccctgagctctatctcagtgtacacgaccccgcgggcgccctccaggctgccttcaggcggtatccccggggcgcccccgcaccacactgcgagatgagccgcttcgtgcctctccccgcctctgcgaaatgggccagcggcctgacccccgcgcagaactgcccgcgggccctggatggggcttggctgatggtcagcatatccagcccagtcctcagcctctccagcctcttgcgaccacagccagagcctcagcaggagcctgttctcatcaccatggcaacagtggtactgactgtcctcacccacacccctgcccctcgagtgagactgggacaagatgctctgctggacttgagctttgcctacatgccccccacctccgaggccgcctcatctctggctccgggtccccctccctttgggctagagtggcgacgccagcacctgggtaagggacatctgctcctggctgcaactcctgggctgaatggccagatgccagcagcccaagaaggggccgtggcatttgctgcttgggatgatgatgagccatggggcccatggaccggaaatgggaccttctggctgcctagagttcaaccctttcaggagggcacctatctggccaccatacacctgccatacctgcaaggacaggtcaccctggagcttgctgtgtacaaaccccccaaagtgtccctgatgccagcaacccttgcacgggccgccccaggggaggcacccccggaattgctctgccttgtgtcccacttctacccttctgggggcctggaggtggagtgggaactccggggtggcccagggggccgctctcagaaggccgaggggcagaggtggctctcggccctgcgccaccattccgatggctctgtcagcctctctgggcacttgcagccgcccccagtcaccactgagcagcatggggcacgctatgcctgtcgaattcaccatcccagcctgcctgcctcggggcgcagcgctgaggtcaccctggaggtagcaggtctttcagggccctcccttgaggacagcgtaggccttttcctgtctgcctttcttctgcttgggctcttcaaggcactgggctgggctgctgtctacctgtccacctgcaaggattcaaagaagaaagcagagtgagggcactcactgccatcctgtggaagccaccatcatctctggcccaagcttctgtagtagctccctaaaataataccctatcatctgctcctaatccctccaatctctctccactgagtggctggaatgcttttttttttttctttcacttatataagggataatttttcttttttttttttttttgagacggagtctcactcttccgcccaggctgcagtgcagtggcatgatcttggcttactgcaacctccgcctcctgggttcaagcaattctgtggcttcagcctccggagtagctgggattacaggcacatgccaccacacccagtgaatttttgtatttttagtagagacggggtttcaccatgttggccaggctggtcttgaattcctgacctcaggtgatctgcccacctcagcctcccaaagtgctgggattacaggcgtgagccaccacaccaggcccgagaaatgcttttttaaaaaacacacatcttatggcattcaccttcttggagctctaggacagtggttctcaaaatttttttctctcaggacctcttaaaaatcatcaaggaccccaaaaagcttttgggtatgtgggttatagctatcaatatttatggtactagaacttaaaagtgagaaaaatttaaaacacgagaatacataggcacacattctattcatcgtgggaaccatggtgtcaatacatatcatgtagcttctgaaaaactccactgtacacttatagaatgaagaaggcaaaaaactttttttttttttttttgagactgagtctcgctctgtcgcccaggctggagtgcagtggcgcgatctcggctcactgcaagctccgcctctcgggttcacgccattctcctgcctcagcctcccaagtagctcggactacaggcgtcctccaccatgcctggctaatattttgtattttttagtagagacggggtttcaccgtgttagccaggatggtctcgatctcctaacctggtgatccgcccgcctcggcctcccaaagtattgggattacccgcgtgagccaccgcgcccggctgcaaataatctttctttttttctttttttctgagacagagtctcgctctgttgcccaggctggagtgcagtggcacgatctcggctcacggcacgctccgcctcccgggttcacgccattctcctgcctcagcttcccgagtagctgggactacaggggcccgccaccacgcccggctaactttttgtgtttttagtagagacggggtttcaccgtgttagccaggatggtctcgatctcctgaccttgtgatctgcccgcctcggcctcccaaagtgctgggattacaggcgtgagccaccgcgcccggcggcgaaacacgatattgtactaacatcttaattttgttataaaatctcacaaaccccctgacatagtctcagagatctgtagggccgaggttacatttggagaacccgtactctagggccaaatccattcttcttgccctggctcacttgtcccccccaccgccccgcgctggagccactgcctagttcttcagccctagatggtgctcgccagacctcctctcaatgctcatcacacacagggctattcctttcctccaatgaaccaaacgcctcccgcccacctccaggtcccagtcctctgttccctttgcctggtccacccttgccctccctgggtcgcagacgaggtcggcctcgtcattccccgcagaccgccgcgcgtccctcttgtgcggttcaccacagttgtatttaagtgatcgtgtgagtcgtcgttaaatgcctgtctccccgcggatcatgggctcctcgaggacagggaccggcctgtctgtccactgctgtaaccccgcgccggcatagggacctaaggcccactggagggcgctcatcaagtagctgctggatgttgacgaaggaagcggcggcgcagctcagggatctccgagtcaggacggtcggccagacccacggggtaacgggtctaatcgtgtaggaataaagctgtattccagtgcttccaaa

SEQ ID NO: 30964 - DNA, 1824 bp, Homo sapiens
  source 1..1824: mol_type = unassigned DNA
ctggagaggatctacccgggtccctgcctggccagtggggaaacaccggtcccccaggcaccttcacctaaccagagcggggatttccaccgcccctcatgccgccctttggaggaaagtgaaagtgaaaggaggaagaggaggcttcatggctgaggaggtcgcagcgccatgaagtccctgtctctgctcctcgctgtggctttgggcctggcgaccgccgtctcagcaggacccgcggtgatcgagtgttggttcgtggaggatgcgagcggaaagggcctggccaagagacccggtgcactgctgttgcgccagggaccgggggaaccgccgccccggccggacctcgaccctgagctctatctcagtgtacacgaccccgcgggcgccctccaggctgccttcaggcggtatccccggggcgcccccgcaccacactgcgagatgagccgcttcgtgcctctccccgcctctgcgaaatgggccagcggcctgacccccgcgcagaactgcccgcgggccctggatggggcttggctgatggtcagcatatccagcccagtcctcagcctctccagcctcttgcgaccacagccagagcctcagcaggagcctgttctcatcaccatggcaacagtggtactgactgtcctcacccacacccctgcccctcgagtgagactgggacaagatgctctgctggacttgagctttgcctacatgccccccacctccgaggccgcctcatctctggctccgggtccccctccctttgggctagagtggcgacgccagcacctgggtaagggacatctgctcctggctgcaactcctgggctgaatggccagatgccagcagcccaagaaggggccgtggcatttgctgcttgggatgatgatgagccatggggcccatggaccggaaatgggaccttctggctgcctacagttcaaccctttcaggagggcacctatctggccaccatacacctgccatacctgcaaggacaggtcaccctggagcttgctgtgtacaaaccccccaaagtgtccctgatgccagcaacccttgcacgggccgccccaggggaggcacccccggaattgctctgccttgtgtcccacttctacccttctgggggcctggaggtggagtgggaactccggggtggcccagggggccgctctcagaaggccgaggggcagaggtggctctcggccctgcgccaccattccgatggctctgtcagcctctctgggcacttgcagccgcccccagtcaccactgagcagcatggggcacgctatgcctgtcgaattcaccatcccagcctgcctgcctcggggcgcagcgctgaggtcaccctggaggtagcaggtctttcagggccctcccttgaggacagcgtaggccttttcctgtctgcctttcttctgcttgggctcttcaaggcactgggctgggctgctgtctacctgtccacctgcaaggattcaaagaaggtacagtgctccacctctctgtatctttcccttgtcactttatctcctcatcctatctcaaaacccatggagggaggctgctggtgtggtaggcagaacctaggcttggaattcacactgatctgggttaaaacctggcactatatcctaactgtaggactctttgagcatgctacttaatctatatgtttccttgggtgtagggattttaaaaagttacttaggcagtgctgtccaatagaaagataatgcaagccacatatgtaaatttaaatactctagtactcacattaaaaaaataagcagaaacaggtaaaa

SEQ ID NO: 30965 - DNA, 3759 bp, Homo sapiens
  source 1..3759: mol_type = unassigned DNA
ggggacgcggcacagatagggggaagccggagtaatggttttcgggcaagtggatgttggagagcacacacaggagttggggggcgggggagggcctggggttggggagggctcgaactcggggctgctgggtagtccaggagggcgcggtaaggctggggtgtcctggtgagaactggagaggatctacccgggtccctgcctggccagtggggaaacaccggtcccccaggcaccttcacctaaccagagcggggatttccaccgcccctcatgccgccctttggaggaaagtgaaagtgaaaggaggaagaggaggcttcatggctgaggaggtcgcagcgccatgaagtccctgtctctgctcctcgctgtggctttgggcctggcgaccgccgtctcagcaggacccgcggtgatcgagtgttggttcgtggaggatgcgagcggaaagggcctggccaagagacccggtgcactgctgttgcgccagggaccgggggaaccgccgccccggccggacctcgaccctgagctctatctcagtgtacacgaccccgcgggcgccctccaggctgccttcaggcggtatccccggggcgcccccgcaccacactgcgagatgagccgcttcgtgcctctccccgcctctgcgaaatgggccagcggcctgacccccgcgcagaactgcccgcgggccctggatggggcttggctgatggtcagcatatccagcccagtcctcagcctctccagcctcttgcgaccacagccagagcctcagcaggagcctgttctcatcaccatggcaacagtggtactgactgtcctcacccacacccctgcccctcgagtgagactgggacaagatgctctgctggacttgagctttgcctacatgccccccacctccgaggccgcctcatctctggctccgggtccccctccctttgggctagagtggcgacgccagcacctgggtaagggacatctgctcctggctgcaactcctgggctgaatggccagatgccagcagcccaagaaggggccgtggcatttgctgcttgggatgatgatgagccatggggcccatggaccggaaatgggaccttctggctgcctacagttcaaccctttcaggagggcacctatctggccaccatacacctgccatacctgcaaggacaggtcaccctggagcttgctgtgtacaaaccccccaaagtgtccctgatgccagcaacccttgcacgggccgccccaggggaggcacccccggaattgctctgccttgtgtcccacttctacccttctgggggcctggaggtggagtgggaactccggggtggcccagggggccgctctcagaaggccgaggggcagaggtggctctcggccctgcgccaccattccgatggctctgtcagcctctctgggcacttgcagccgcccccagtcaccactgagcagcatggggcacgctatgcctgtcgaattcaccatcccagcctgcctgcctcggggcgcagcgctgaggtcaccctggaggtagcaggtctttcagggccctcccttgaggacagcgtaggccttttcctgtctgcctttcttctgcttgggctcttcaaggcactgggctgggctgctgtctacctgtccacctgcaaggattcaaagaagaaagcagagtgagggcactcactgccatcctgtggaagccaccatcatctctggcccaagcttctgtagtagctccctaaaataataccctatcatctgctcctaatccctccaatctctctccactgagtggctggaatgcttttttttttttctttcacttatataagggataatttttcttttttttttttttttgagacggagtctcactcttccgcccaggctgcagtgcagtggcatgatcttggcttactgcaacctccgcctcctgggttcaagcaattctgtggcttcagcctccggagtagctgggattacaggcacatgccaccacacccagtgaatttttgtatttttagtagagacggggtttcaccatgttggccaggctggtcttgaattcctgacctcaggtgatctgcccacctcagcctcccaaagtgctgggattacaggcgtgagccaccacaccaggcccgagaaatgcttttttaaaaaacacacatcttatggcattcaccttcttggagctctaggacagtggttctcaaaatttttttctctcaggacctcttaaaaatcatcaaggaccccaaaaagcttttgggtatgtgggttatagctatcaatatttatggtactagaacttaaaagtgagaaaaatttaaaacacgagaatacataggcacacattctattcatcgtgggaaccatggtgtcaatacatatcatgtagcttctgaaaaactccactgtacacttatagaatgaagaaggcaaaaaacttttttttttttttttttgagacggagtctcgctctgtcgcccaggctggagtgcagtggcgcgatctcggctcactgcaagctccgcctctcgggttcacgccattctcctgcctcagcctcccaagtagctcggactacaggcgtcctccaccatgcctggctaatattttgtattttttagtagagacggggtttcaccgtgttagccaggatggtctcgatctcctaacctggtgatccgcccgcctcggcctcccaaagtattgggattacccgcgtgagccaccgcgcccggctgcaaataatctttctttttttctgagacagagtctcgctctgttgcccaggctggagtgcagtggcacgatctcggctcacggcacgctccgcctcccgggttcacgccattctcctgcctcagcttcccgagtagctgggactacaggggcccgccaccacgcccggctaactttttgtgtttttagtagagacggggtttcaccgtgttagccaggatggtctcgatctcctgaccttgtgatctgcccgcctcggcctcccaaagtgctgggattacaggcgtgagccaccgcgcccggcggcgaaacacgatattgtactaacatcttaattttgttataaaatctcacaaaccccctgacatagtctcagagatctgtagggccgaggttacatttggagaacccgtactctagggccaaatccattcttcttgccctggctcacttgtcccccccaccgccccgcgctggagccactgcctagttcttcagccctagatggtgctcgccagacctcctctcaatgctcatcacacacagggctattcctttcctccaatgaaccaaacgcctcccgcccacctccaggtcccagtcctctgttccctttgcctggtccacccttgccctccctgggtcgcagacgaggtcggcctcgtcattccccgcagaccgccgcgcgtccctcttgtgcggttcaccacagttgtatttaagtgatcgtgtgagtcgtcgttaaatgcctgtctccccgcggatcatgggctcctcgaggacagggactggcctgtctgtccactgctgtaaccccgcgccggcatagggacctaaggcccactggagggcgctcatcaagtagctgctggatgttgacgaaggaagcggcggcgcagctcagggatctccgagtcaggacggtcggccagacccacggggtaacgggtctaatcgtgtaggaataaagctgtattccagtgcttccaaa

SEQ ID NO: 30966 - DNA, 3677 bp, Homo sapiens
  source 1..3677: mol_type = unassigned DNA
ccaggagggcgcggtaaggctggggtgtcctggtgagaactggagaggatctacccgggtccctgcctggccagtggggaaacaccggtcccccaggcaccttcacctaaccagagcggggatttccaccgcccctcatgccgccctttggaggaaagtgaaagtgaaaggaggaagaggaggcttcatggctgaggaggtcgcagcgccatgaagtccctgtctctgctcctcgctgtggctttgggcctggcgaccgccgtctcagcaggacccgcggtgatcgagtgttggttcgtggaggatgcgagcggaaagggcctggccaagagacccggtgcactgctgttgcgccagggaccgggggaaccgccgccccggccggacctcgaccctgagctctatctcagtgtacacgaccccgcgggcgccctccaggctgccttcaggcggtatccccggggcgcccccgcaccacactgcgagatgagccgcttcgtgcctctccccgcctctgcgaaatgggccagcggcctgacccccgcgcagaactgcccgcgggccctggatggggcttggctgatggtcagcatatccagcccagtcctcagcctctccagcctcttgcgaccacagccagagcctcagcaggagcctgttctcatcaccatggcaacagtagagatggggtttcaccatgttggccaggctgctctcgaactcctgacctcagtggtactgactgtcctcacccacacccctgcccctcgagtgagactgggacaagatgctctgctggacttgagctttgcctacatgccccccacctccgaggccgcctcatctctggctccgggtccccctccctttgggctagagtggcgacgccagcacctgggtaagggacatctgctcctggctgcaactcctgggctgaatggccagatgccagcagcccaagaaggggccgtggcatttgctgcttgggatgatgatgagccatggggcccatggaccggaaatgggaccttctggctgcctacagttcaaccctttcaggagggcacctatctggccaccatacacctgccatacctgcaaggacaggtcaccctggagcttgctgtgtacaaaccccccaaagtgtccctgatgccagcaacccttgcacgggccgccccaggggaggcacccccggaattgctctgccttgtgtcccacttctacccttctgggggcctggaggtggagtgggaactccggggtggcccagggggccgctctcagaaggccgaggggcagaggtggctctcggccctgcgccaccattccgatggctctgtcagcctctctgggcacttgcagccgcccccagtcaccactgagcagcatggggcacgctatgcctgtcgaattcaccatcccagcctgcctgcctcggggcgcagcgctgaggtcaccctggaggtagcaggtctttcagggccctcccttgaggacagcgtaggccttttcctgtctgcctttcttctgcttgggctcttcaaggcactgggctgggctgctgtctacctgtccacctgcaaggattcaaagaagaaagcagagtgagggcactcactgccatcctgtggaagccaccatcatctctggcccaagcttctgtagtagctccctaaaataataccctatcatctgctcctaatccctccaatctctctccactgagtggctggaatgcttttttttttttctttcacttatataagggataatttttcttttttttttttttttgagacggagtctcactcttccgcccaggctgcagtgcagtggcatgatcttggcttactgcaacctccgcctcctgggttcaagcaattctgtggcttcagcctccggagtagctgggattacaggcacatgccaccacacccagtgaatttttgtatttttagtagagacggggtttcaccatgttggccaggctggtcttgaattcctgacctcaggtgatctgcccacctcagcctcccaaagtgctgggattacaggcgtgagccaccacaccaggcccgagaaatgcttttttaaaaaacacacatcttatggcattcaccttcttggagctctaggacagtggttctcaaaatttttttctctcaggacctcttaaaaatcatcaaggaccccaaaaagcttttgggtatgtgggttatagctatcaatatttatggtactagaacttaaaagtgagaaaaatttaaaacacgagaatacataggcacacattctattcatcgtgggaaccatggtgtcaatacatatcatgtagcttctgaaaaactccactgtacacttatagaatgaagaaggcaaaaaacttttttttttttttttttgagacggagtctcgctctgtcgcccaggctggagtgcagtggcgcgatctcggctcactgcaagctccgcctctcgggttcacgccattctcctgcctcagcctcccaagtagctcggactacaggcgtcctccaccatgcctggctaatattttgtattttttagtagagacggggtttcaccgtgttagccaggatggtctcgatctcctaacctggtgatccgcccgcctcggcctcccaaagtattgggattacccgcgtgagccaccgcgcccggctgcaaataatctttctttttttctgagacagagtctcgctctgttgcccaggctggagtgcagtggcacgatctcggctcacggcacgctccgcctcccgggttcacgccattctcctgcctcagcttcccgagtagctgggactacaggggcccgccaccacgcccggctaactttttgtgtttttagtagagacggggtttcaccgtgttagccaggatggtctcgatctcctgaccttgtgatctgcccgcctcggcctcccaaagtgctgggattacaggcgtgagccaccgcgcccggcggcgaaacacgatattgtactaacatcttaattttgttataaaatctcacaaaccccctgacatagtctcagagatctgtagggccgaggttacatttggagaacccgtactctagggccaaatccattcttcttgccctggctcacttgtcccccccaccgccccgcgctggagccactgcctagttcttcagccctagatggtgctcgccagacctcctctcaatgctcatcacacacagggctattcctttcctccaatgaaccaaacgcctcccgcccacctccaggtcccagtcctctgttccctttgcctggtccacccttgccctccctgggtcgcagacgaggtcggcctcgtcattccccgcagaccgccgcgcgtccctcttgtgcggttcaccacagttgtatttaagtgatcgtgtgagtcgtcgttaaatgcctgtctccccgcggatcatgggctcctcgaggacagggactggcctgtctgtccactgctgtaaccccgcgccggcatagggacctaaggcccactggagggcgctcatcaagtagctgctggatgttgacgaaggaagcggcggcgcagctcagggatctccgagtcaggacggtcggccagacccacggggtaacgggtctaatcgtgtaggaataaagctgtattccagtgcttccaaa

SEQ ID NO: 30967 - DNA, 1824 bp, Homo sapiens
  source 1..1824: mol_type = unassigned DNA
ctggagaggatctacccgggtccctgcctggccagtggggaaacaccggtcccccaggcaccttcacctaaccagagcggggatttccaccgcccctcatgccgccctttggaggaaagtgaaagtgaaaggaggaagaggaggcttcatggctgaggaggtcgcagcgccatgaagtccctgtctctgctcctcgctgtggctttgggcctggcgaccgccgtctcagcaggacccgcggtgatcgagtgttggttcgtggaggatgcgagcggaaagggcctggccaagagacccggtgcactgctgttgcgccagggaccgggggaaccgccgccccggccggacctcgaccctgagctctatctcagtgtacacgaccccgcgggcgccctccaggctgccttcaggcggtatccccggggcgcccccgcaccacactgcgagatgagccgcttcgtgcctctccccgcctctgcgaaatgggccagcggcctgacccccgcgcagaactgcccgcgggccctggatggggcttggctgatggtcagcatatccagcccagtcctcagcctctccagcctcttgcgaccacagccagagcctcagcaggagcctgttctcatcaccatggcaacagtggtactgactgtcctcacccacacccctgcccctcgagtgagactgggacaagatgctctgctggacttgagctttgcctacatgccccccacctccgaggccgcctcatctctggctccgggtccccctccctttgggctagagtggcgacgccagcacctgggtaagggacatctgctcctggctgcaactcctgggctgaatggccagatgccagcagcccaagaaggggccgtggcatttgctgcttgggatgatgatgagccatggggcccatggaccggaaatgggaccttctggctgcctagagttcaaccctttcaggagggcacctatctggccaccatacacctgccatacctgcaaggacaggtcaccctggagcttgctgtgtacaaaccccccaaagtgtccctgatgccagcaacccttgcacgggccgccccaggggaggcacccccggaattgctctgccttgtgtcccacttctacccttctgggggcctggaggtggagtgggaactccggggtggcccagggggccgctctcagaaggccgaggggcagaggtggctctcggccctgcgccaccattccgatggctctgtcagcctctctgggcacttgcagccgcccccagtcaccactgagcagcatggggcacgctatgcctgtcgaattcaccatcccagcctgcctgcctcggggcgcagcgctgaggtcaccctggaggtagcaggtctttcagggccctcccttgaggacagcgtaggccttttcctgtctgcctttcttctgcttgggctcttcaaggcactgggctgggctgctgtctacctgtccacctgcaaggattcaaagaaggtacagtgctccacctctctgtatctttcccttgtcactttatctcctcatcctatctcaaaacccatggagggaggctgctggtgtggtaggcagaacctaggcttggaattcacactgatctgggttaaaacctggcactatatcctaactgtaggactctttgagcatgctacttaatctatatgtttccttgggtgtagggattttaaaaagttacttaggcagtgctgtccaatagaaagataatgcaagccacatatgtaaatttaaatactctagtactcacattaaaaaaataagcagaaacaggtaaaa

SEQ ID NO: 30968 - DNA, 3766 bp, Homo sapiens
  source 1..3766: mol_type = unassigned DNA
ggggacgcggcacagatagggggaagccggagtaatggttttcgggcaagtggatgttggagagcacacacaggagttggggggcgggggagggcctggggttggggagggctcgaactcggggctgctgggtagtccaggagggcgcggtaaggctggggtatcctggtgagaactggagaggatctacccgggtccctgcctggccagtggggaaacaccggtcccccaggcaccttcacctaaccagagcggggatttccaccgcccctcatgccgccctttggaggaaagtgaaagtgaaaggaggaagaggaggcttcatggctgaggaggtcgcagcgccatgaagtccctgtctctgctcctcgctgtggctttgggcctggcgaccgccgtctcagcaggacccgcggtgatcgagtgttggttcgtggaggatgcgagcggaaagggcctggccaagagacccggtgcactgctgttgcgccagggaccgggggaaccgccgccccggccggacctcgaccctgagctctatctcagtgtacacgaccccgcgggcgccctccaggctgccttcaggcggtatccccggggcgcccccgcaccacactgcgagatgagccgcttcgtgcctctccccgcctctgcgaaatgggccagcggcctgacccccgcgcagaactgcccgcgggccctggatggggcttggctgatggtcagcatatccagcccagtcctcagcctctccagcctcttgcgaccacagccagagcctcagcaggagcctgttctcatcaccatggcaacagtggtactgactgtcctcacccacacccctgcccctcgagtgagactgggacaagatgctctgctggacttgagctttgcctacatgccccccacctccgaggccgcctcatctctggctccgggtccccctccctttgggctagagtggcgacgccagcacctgggtaagggacatctgctcctggctgcaactcctgggctgaatggccagatgccagcagcccaagaaggggccgtggcatttgctgcttgggatgatgatgagccatggggcccatggaccggaaatgggaccttctggctgcctagagttcaaccctttcaggagggcacctatctggccaccatacacctgccatacctgcaaggacaggtcaccctggagcttgctgtgtacaaaccccccaaagtgtccctgatgccagcaacccttgcacgggccgccccaggggaggcacccccggaattgctctgccttgtgtcccacttctacccttctgggggcctggaggtggagtgggaactccggggtggcccagggggccgctctcagaaggccgaggggcagaggtggctctcggccctgcgccaccattccgatggctctgtcagcctctctgggcacttgcagccgcccccagtcaccactgagcagcatggggcacgctatgcctgtcgaattcaccatcccagcctgcctgcctcggggcgcagcgctgaggtcaccctggaggtagcaggtctttcagggccctcccttgaggacagcgtaggccttttcctgtctgcctttcttctgcttgggctcttcaaggcactgggctgggctgctgtctacctgtccacctgcaaggattcaaagaagaaagcagagtgagggcactcactgccatcctgtggaagccaccatcatctctggcccaagcttctgtagtagctccctaaaataataccctatcatctgctcctaatccctccaatctctctccactgagtggctggaatgcttttttttttttctttcacttatataagggataatttttctttttttttttttttgagacggagtctcactcttccgcccaggctgcagtgcagtggcatgatcttggcttactgcaacctccgcctcctgggttcaagcaattctgtggcttcagcctccggagtagctgggattacaggcacatgccaccacacccagtgaatttttgtatttttagtagagacggggtttcaccatgttggccaggctggtcttgaattcctgacctcaggtgatctgcccacctcagcctcccaaagtgctgggattacaggcgtgagccaccacaccaggcccgagaaatgcttttttaaaaaacacacatcttatggcattcaccttcttggagctctaggacagtggttctcaaaatttttttctctcaggacctcttaaaaatcatcaaggaccccaaaaagcttttgggtatgtgggttatagctatcaatatttatggtactagaacttaaaagtgagaaaaatttaaaacacgagaatacataggcacacattctattcatcgtgggaaccatggtgtcaatacatatcatgtagcttctgaaaaactccactgtacacttatagaatgaagaaggcaaaaaacttttttttttttttttttgagacggagtctcgctctgtcgcccaggctggagtgcagtggcgcgatctcggctcactgcaagctccgcctctcgggttcacgccattctcctgcctcagcctcccaagtagctcggactacaggcgtcctccaccatgcctggctaatattttgtattttttagtagagacggggtttcaccgtgttagccaggatggtctcgatctcctaacctggtgatccgcccgcctcggcctcccaaagtattgggattacccgcgtgagccaccgcgcccggctgcaaataatctttctttttttctttttttctgagacagagtctcgctctgttgcccaggctggagtgcagtggcacgatctcggctcacggcacgctccgcctcccgggttcacgccattctcctgcctcagcttcccgagtagctgggactacaggggcccgccaccacgcccggctaactttttgtgtttttagtagagacggggtttcaccgtgttagccaggatggtctcgatctcctgaccttgtgatctgcccgcctcggcctcccaaagtgctgggattacaggcgtgagccaccgcgcccggcggcgaaacacgatattgtactaacatcttaattttgttataaaatctcacaaaccccctgacatagtctcagagatctgtagggccgaggttacatttggagaacccgtactctagggccaaatccattcttcttgccctggctcacttgtcccccccaccgccccgcgctggagccactgcctagttcttcagccctagatggtgctcgccagacctcctctcaatgctcatcacacacagggctattcctttcctccaatgaaccaaacgcctcccgcccacctccaggtcccagtcctctgttccctttgcctggtccacccttgccctccctgggtcgcagacgaggtcggcctcgtcattccccgcagaccgccgcgcgtccctcttgtgcggttcaccacagttgtatttaagtgatcgtgtgagtcgtcgttaaatgcctgtctccccgcggatcatgggctcctcgaggacagggaccggcctgtctgtccactgctgtaaccccgcgccggcatagggacctaaggcccactggagggcgctcatcaagtagctgctggatgttgacgaaggaagcggcggcgcagctcagggatctccgagtcaggacggtcggccagacccacggggtaacgggtctaatcgtgtaggaataaagctgtattccagtgcttccaaa

SEQ ID NO: 30969 - DNA, 1824 bp, Homo sapiens
  source 1..1824: mol_type = unassigned DNA
ctggagaggatctacccgggtccctgcctggccagtggggaaacaccggtcccccaggcaccttcacctaaccagagcggggatttccaccgcccctcatgccgccctttggaggaaagtgaaagtgaaaggaggaagaggaggctaaatggctgaggaggtcgcagcgccatgaagtccctgtctctgctcctcgctgtggctttgggcctggcgaccgccgtctcagcaggacccgcggtgatcgagtgttggttcgtggaggatgcgagcggaaagggcctggccaagagacccggtgcactgctgttgcgccagggaccgggggaaccgccgccccggccggacctcgaccctgagctctatctcagtgtacacgaccccgcgggcgccctccaggctgccttcaggcggtatccccggggcgcccccgcaccacactgcgagatgagccgcttcgtgcctctccccgcctctgcgaaatgggccagcggcctgacccccgcgcagaactgcccgcgggccctggatggggcttggctgatggtcagcatatccagcccagtcctcagcctctccagcctcttgcgaccacagccagagcctcagcaggagcctgttctcatcaccatggcaacagtggtactgactgtcctcacccacacccctgcccctcgagtgagactgggacaagatgctctgctggacttgagctttgcctacatgccccccacctccgaggccgcctcatctctggctccgggtccccctccctttgggctagagtggcgacgccagcacctgggtaagggacatctgctcctggctgcaactcctgggctgaatggccagatgccagcagcccaagaaggggccgtggcatttgctgcttgggatgatgatgagccatggggcccatggaccggaaatgggaccttctggctgcctagagttcaaccctttcaggagggcacctatctggccaccatacacctgccatacctgcaaggacaggtcaccctggagcttgctgtgtacaaaccccccaaagtgtccctgatgccagcaacccttgcacgggccgccccaggggaggcacccccggaattgctctgccttgtgtcccacttctacccttctgggggcctggaggtggagtgggaactccggggtggcccagggggccgctctcagaaggccgaggggcagaggtggctctcggccctgcgccaccattccgatggctctgtcagcctctctgggcacttgcagccgcccccagtcaccactgagcagcatggggcacgctatgcctgtcgaattcaccatcccagcctgcctgcctcggggcgcagcgctgaggtcaccctggaggtagcaggtctttcagggccctcccttgaggacagcgtaggccttttcctgtctgcctttcttctgcttgggctcttcaaggcactgggctgggctgctgtctacctgtccacctgcaaggattcaaagaaggtacagtgctccacctctctgtatctttcccttgtcactttatctcctcatcctatctcaaaacccatggagggaggctgctggtgtggtaggcagaacctaggcttggaattcacactgatctgggttaaaacctggcactatatcctaactgtaggactctttgagcatgctacttaatctatatgtttccttgggtgtagggattttaaaaagttacttaggcagtgctgtccaatagaaagataatgcaagccacatatgtaaatttaaatactctagtactcacattaaaaaaataagcagaaacaggtaaaa

SEQ ID NO: 30970 - DNA, 3684 bp, Homo sapiens
  source 1..3684: mol_type = unassigned DNA
ccaggagggcgcggtaaggctggggtatcctggtgagaactggagaggatctacccgggtccctgcctggccagtggggaaacaccggtcccccaggcaccttcacctaaccagagcggggatttccaccgcccctcatgccgccctttggaggaaagtgaaagtgaaaggaggaagaggaggcttcatggctgaggaggtcgcagcgccatgaagtccctgtctctgctcctcgctgtggctttgggcctggcgaccgccgtctcagcaggacccgcggtgatcgagtgttggttcgtggaggatgcgagcggaaagggcctggccaagagacccggtgcactgctgttgcgccagggaccgggggaaccgccgccccggccggacctcgaccctgagctctatctcagtgtacacgaccccgcgggcgccctccaggctgccttcaggcggtatccccggggcgcccccgcaccacactgcgagatgagccgcttcgtgcctctccccgcctctgcgaaatgggccagcggcctgacccccgcgcagaactgcccgcgggccctggatggggcttggctgatggtcagcatatccagcccagtcctcagcctctccagcctcttgcgaccacagccagagcctcagcaggagcctgttctcatcaccatggcaacagtagagatggggtttcaccatgttggccaggctgctctcgaactcctgacctcagtggtactgactgtcctcacccacacccctgcccctcgagtgagactgggacaagatgctctgctggacttgagctttgcctacatgccccccacctccgaggccgcctcatctctggctccgggtccccctccctttgggctagagtggcgacgccagcacctgggtaagggacatctgctcctggctgcaactcctgggctgaatggccagatgccagcagcccaagaaggggccgtggcatttgctgcttgggatgatgatgagccatggggcccatggaccggaaatgggaccttctggctgcctagagttcaaccctttcaggagggcacctatctggccaccatacacctgccatacctgcaaggacaggtcaccctggagcttgctgtgtacaaaccccccaaagtgtccctgatgccagcaacccttgcacgggccgccccaggggaggcacccccggaattgctctgccttgtgtcccacttctacccttctgggggcctggaggtggagtgggaactccggggtggcccagggggccgctctcagaaggccgaggggcagaggtggctctcggccctgcgccaccattccgatggctctgtcagcctctctgggcacttgcagccgcccccagtcaccactgagcagcatggggcacgctatgcctgtcgaattcaccatcccagcctgcctgcctcggggcgcagcgctgaggtcaccctggaggtagcaggtctttcagggccctcccttgaggacagcgtaggccttttcctgtctgcctttcttctgcttgggctcttcaaggcactgggctgggctgctgtctacctgtccacctgcaaggattcaaagaagaaagcagagtgagggcactcactgccatcctgtggaagccaccatcatctctggcccaagcttctgtagtagctccctaaaataataccctatcatctgctcctaatccctccaatctctctccactgagtggctggaatgcttttttttttttctttcacttatataagggataatttttctttttttttttttttgagacggagtctcactcttccgcccaggctgcagtgcagtggcatgatcttggcttactgcaacctccgcctcctgggttcaagcaattctgtggcttcagcctccggagtagctgggattacaggcacatgccaccacacccagtgaatttttgtatttttagtagagacggggtttcaccatgttggccaggctggtcttgaattcctgacctcaggtgatctgcccacctcagcctcccaaagtgctgggattacaggcgtgagccaccacaccaggcccgagaaatgcttttttaaaaaacacacatcttatggcattcaccttcttggagctctaggacagtggttctcaaaatttttttctctcaggacctcttaaaaatcatcaaggaccccaaaaagcttttgggtatgtgggttatagctatcaatatttatggtactagaacttaaaagtgagaaaaatttaaaacacgagaatacataggcacacattctattcatcgtgggaaccatggtgtcaatacatatcatgtagcttctgaaaaactccactgtacacttatagaatgaagaaggcaaaaaacttttttttttttttttttgagacggagtctcgctctgtcgcccaggctggagtgcagtggcgcgatctcggctcactgcaagctccgcctctcgggttcacgccattctcctgcctcagcctcccaagtagctcggactacaggcgtcctccaccatgcctggctaatattttgtattttttagtagagacggggtttcaccgtgttagccaggatggtctcgatctcctaacctggtgatccgcccgcctcggcctcccaaagtattgggattacccgcgtgagccaccgcgcccggctgcaaataatctttctttttttctttttttctgagacagagtctcgctctgttgcccaggctggagtgcagtggcacgatctcggctcacggcacgctccgcctcccgggttcacgccattctcctgcctcagcttcccgagtagctgggactacaggggcccgccaccacgcccggctaactttttgtgtttttagtagagacggggtttcaccgtgttagccaggatggtctcgatctcctgaccttgtgatctgcccgcctcggcctcccaaagtgctgggattacaggcgtgagccaccgcgcccggcggcgaaacacgatattgtactaacatcttaattttgttataaaatctcacaaaccccctgacatagtctcagagatctgtagggccgaggttacatttggagaacccgtactctagggccaaatccattcttcttgccctggctcacttgtcccccccaccgccccgcgctggagccactgcctagttcttcagccctagatggtgctcgccagacctcctctcaatgctcatcacacacagggctattcctttcctccaatgaaccaaacgcctcccgcccacctccaggtcccagtcctctgttccctttgcctggtccacccttgccctccctgggtcgcagacgaggtcggcctcgtcattccccgcagaccgccgcgcgtccctcttgtgcggttcaccacagttgtatttaagtgatcgtgtgagtcgtcgttaaatgcctgtctccccgcggatcatgggctcctcgaggacagggaccggcctgtctgtccactgctgtaaccccgcgccggcatagggacctaaggcccactggagggcgctcatcaagtagctgctggatgttgacgaaggaagcggcggcgcagctcagggatctccgagtcaggacggtcggccagacccacggggtaacgggtctaatcgtgtaggaataaagctgtattccagtgcttccaaa

SEQ ID NO: 30971 - DNA, 3766 bp, Homo sapiens; identical to SEQ ID NO: 30963
  source 1..3766: mol_type = unassigned DNA

SEQ ID NO: 30972 - DNA, 1888 bp, Homo sapiens
  source 1..1888: mol_type = unassigned DNA
ctggagaggatctacccgggtccctgcctggccagtggggaaacaccggtcccccaggcaccttcacctaaccagagcggggatttccaccgcccctcatgccgccctttggaggaaagtgaaagtgaaaggaggaagaggaggcttcatggctgaggaggtcgcagcgccatgaagtccctgtctctgctcctcgctgtggctttgggcctggcgaccgccgtctcagcaggacccgcggtgatcgagtgttggttcgtggaggatgcgagcggaaagggcctggccaagagacccggtgcactgctgttgcgccagggaccgggggaaccgccgccccggccggacctcgaccctgagctctatctcagtgtacacgaccccgcgggcgccctccaggctgccttcaggcggtatccccggggcgcccccgcaccacactgcgagatgagccgcttcgtgcctctccccgcctctgcgaaatgggccagcggcctgacccccgcgcagaactgcccgcgggccctggatggggcttggctgatggtcagcatatccagcccagtcctcagcctctccagcctcttgcgaccacagccagagcctcagcaggagcctgttctcatcaccatggcaacagtggtactgactgtcctcacccacacccctgcccctcgagtgagactgggacaagatgctctgctggacttgagctttgcctacatgccccccacctccgaggccgcctcatctctggctccgggtccccctccctttgggctagagtggcgacgccagcacctgggtaagggacatctgctcctggctgcaactcctgggctgaatggccagatgccagcagcccaagaaggggccgtggcatttgctgcttgggatgatgatgagccatggggcccatggaccggaaatgggaccttctggctgcctacagttcaaccctttcaggagggcacctatctggccaccatacacctgccatacctgcaaggacaggtcaccctggagcttgctgtgtacaaaccccccaaagtgtccctgatgccagcaacccttgcacgggccgccccaggggaggcacccccggaattgctctgccttgtgtcccacttctacccttctgggggcctggaggtggagtgggaactccggggtggcccagggggccgctctcagaaggccgaggggcagaggtggctctcggccctgcgccaccattccgatggctctgtcagcctctctgggcacttgcagccgcccccagtcaccactgagcagcatggggcacgctatgcctgtcgaattcaccatcccagcctgcctgcctcggggcgcagcgctgaggtcaccctggaggtagcaggtctttcagggccctcccttgaggacagcgtaggccttttcctgtctgcctttcttctgcttgggctcttcaaggcactgggctgggctgctgtctacctgtccacctgcaaggattcaaagaaggtacagtgctccacctctctgtatctttcccttgtcactttatctcctcatcctatctcaaaacccatggagggaggctgctggtgtggtaggcagaacctaggcttggaattcacactgatctgggttaaaacctggcactatatcctaactgtaggactctttgagcatgctacttaatctatatgtttccttgggtgtagggattttaaaaagttacttaggcagtgctgtccaatagaaagataatgcaagccacatatgtaaatttaaatactctagtactcacattaaaaaaataagcagaaacaggtaaaattaacttaataatataccttatttaatctaataattctggtcccttatctgaaatgcttgggtc

SEQ ID NO: 30973 - DNA, 612 bp, Homo sapiens
  source 1..612: mol_type = unassigned DNA
gcgccatgaagtccctgtctctgctcctcgctgtggctttgggcctggcgaccgccgtctcagcaggacccgcggtgatcgagtgttggttcgtggaggatgcgagcggaaagggcctggccaagagacccggtgcactgctgttgcgccagggaccgggggaaccgccgccccggccggacctcgaccctgagctctatctcagtgtacacgtggtactgactgtcctcacccacacccctgcccctcgagtgagactgggacaagatgctctgctggacttgagctttgcctacatgccccccacctccgaggccgcctcatctctggctccgggtccccctccctttgggctagagtggcgacgccagcacctgggtaagggacatctgctcctggctgcaactcctgggctgaatggccagatgccagcagcccaagaaggggccgtggcatttgctgcttgggatgatgatgagccatggggcccatggaccggaaatgggaccttctggctgcctagagttcaaccctttcaggagggcacctatctggccaccatacacctgccatacctgcaaggacaggtcaccctggagcttgctgtgtaca

SEQ ID NO: 30974 - DNA, 3759 bp, Homo sapiens; identical to SEQ ID NO: 30965
  source 1..3759: mol_type = unassigned DNA

SEQ ID NO: 30975 - DNA, 3684 bp, Homo sapiens; identical to SEQ ID NO: 30962
  source 1..3684: mol_type = unassigned DNA

SEQ ID NO: 30976 - DNA, 612 bp, Homo sapiens
  source 1..612: mol_type = unassigned DNA
gcgccatgaagtccctgtctctgctcctcgctgtggctttgggcctggcgaccgccgtctcagcaggacccgcggtgatcgagtgttggttcgtggaggatgcgagcggaaagggcctggccaagagacccggtgcactgctgttgcgccagggaccgggggaaccgccgccccggccggacctcgaccctgagctctatctcagtgtacacgtggtactgactgtcctcacccacacccctgcccctcgagtgagactgggacaagatgctctgctggacttgagctttgcctacatgccccccacctccgaggccgcctcatctctggctccgggtccccctccctttgggctagagtggcgacgccagcacctgggtaagggacatctgctcctggctgcaactcctgggctgaatggccagatgccagcagcccaagaaggggccgtggcatttgctgcttgggatgatgatgagccatggggcccatggaccggaaatgggaccttctggctgcctacagttcaaccctttcaggagggcacctatctggccaccatacacctgccatacctgcaaggacaggtcaccctggagcttgctgtgtaca

SEQ ID NO: 30977 - DNA, 612 bp, Homo sapiens; identical to SEQ ID NO: 30973
  source 1..612: mol_type = unassigned DNA

SEQ ID NO: 30978 - DNA, 612 bp, Homo sapiens; identical to SEQ ID NO: 30973
  source 1..612: mol_type = unassigned DNA

SEQ ID NO: 30979 - DNA, 1693 bp, Homo sapiens
  source 1..1693: mol_type = unassigned DNA
ggggacgcggcacagatagggggaagccggagtaatggttttcgggcaagtggatgttggagagcacacacaggagttggggggcgggggagggcctggggttggggagggctcgaactcggggctgctgggtagtccaggagggcgcggtaaggctggggtgtcctggtgagaactggagaggatctacccgggtccctgcctggccagtggggaaacaccggtcccccaggcaccttcacctaaccagagcggggatttccaccgcccctcatgccgccctttggaggaaagtgaaagtgaaaggaggaagaggaggcttcatggctgaggaggtcgcagcgccatgaagtccctgtctctgctcctcgctgtggctttgggcctggcgaccgccgtctcagcaggacccgcggtgatcgagtgttggttcgtggaggatgcgagcggaaagggcctggccaagagacccggtgcactgctgttgcgccagggaccgggggaaccgccgccccggccggacctcgaccctgagctctatctcagtgtacacgaccccgcgggcgccctccaggctgccttcaggcggtatccccggggcgcccccgcaccacactgcgagatgagccgcttcgtgcctctccccgcctctgcgaaatgggccagcggcctgacccccgcgcagaactgcccgcgggccctggatggggcttggctgatggtcagcatatccagcccagtcctcagcctctccagcctcttgcgaccacagccagagcctcagcaggagcctgttctcatcaccatggcaacagtggtactgactgtcctcacccacacccctgcccctcgagtgagactgggacaagatgctctgctggacttgagctttgcctacatgccccccacctccgaggccgcctcatctctggctccgggtccccctccctttgggctagagtggcgacgccagcacctgggtaagggacatctgctcctggctgcaactcctgggctgaatggccagatgccagcagcccaagaaggggccgtggcatttgctgcttgggatgatgatgagccatggggcccatggaccggaaatgggaccttctggctgcctacagttcaaccctttcaggagggcacctatctggccaccatacacctgccatacctgcaaggacaggtcaccctggagcttgctgtgtacaaaccccccaaagtgtccctgatgccagcaacccttgcacgggccgccccaggggaggcacccccggaattgctctgccttgtgtcccacttctacccttctgggggcctggaggtggagtgggaactccggggtggcccagggggccgctctcagaaggccgaggggcagaggtggctctcggccctgcgccaccattccgatggctctgtcagcctctctgggcacttgcagccgcccccagtcaccactgagcagcatggggcacgctatgcctgtcgaattcaccatcccagcctgcctgcctcggggcgcagcgctgaggtcaccctggaggtagcaggtctttcagggccctcccttgaggacagcgtaggccttttcctgtctgcctttcttctgcttgggctcttcaaggcactgggctgggctgctgtctacctgtccacctgcaaggattcaaagaagcatgctacttaa

SEQ ID NO: 30980 - DNA, 1824 bp, Homo sapiens; identical to SEQ ID NO: 30969
  source 1..1824: mol_type = unassigned DNA

SEQ ID NO: 30981 - DNA, 817 bp, Homo sapiens
  source 1..817: mol_type = unassigned DNA
ggggacgcggcacagatagggggaagccggagtaatggttttcgggcaagtggatgttggagagcacacacaggagttggggggcgggggagggcctggggttggggagggctcgaactcggggctgctgggtagtccaggagggcgcggtaaggctggggtgtcctggtgagaactggagaggatctacccgggtccctgcctggccagtggggaaacaccggtcccccaggcaccttcacctaaccagagcggggatttccaccgcccctcatgccgccctttggaggaaagtgaaagtgaaaggaggaagaggaggcttcatggctgaggaggtcgcagcgccatgaagtccctgtctctgctcctcgctgtggctttgggcctggcgaccgccgtctcagcaggacccgcggtgatcgagtgttggttcgtggaggatgcgagcggaaagggcctggccaagagacccggtgcactgctgttgcgccagggaccgggggaaccgccgccccggccggacctcgaccctgagctctatctcagtgtacacgaccccgcgggcgccctccaggctgccttcaggcggtatccccggggcgcccccgcaccacactgcgagatgagccgcttcgtgcctctccccgcctctgcgaaatgggccagcggcctgacccccgcgcagaactgcccgcgggccctggatggggcttggctgatggtcagcatatccagcatggggcacgctatgcctgtcgaattcaccatcccagcctgcctgcctcggggcgcagcgctgaggtcaccctggaggtag

SEQ ID NO: 30982 - DNA, 1686 bp, Homo sapiens
  source 1..1686: mol_type = unassigned DNA
ccaggagggcgcggtaaggctggggtgtcctggtgagaactggagaggatctacccgggtccctgcctggccagtggggaaacaccggtcccccaggcaccttcacctaaccagagcggggatttccaccgcccctcatgccgccctttggaggaaagtgaaagtgaaaggaggaagaggaggcttcatggctgaggaggtcgcagcgccatgaagtccctgtctctgctcctcgctgtggctttgggcctggcgaccgccgtctcagcaggacccgcggtgatcgagtgttggttcgtggaggatgcgagcggaaagggcctggccaagagacccggtgcactgctgttgcgccagggaccgggggaaccgccgccccggccggacctcgaccctgagctctatctcagtgtacacgaccccgcgggcgccctccaggctgccttcaggcggtatccccggggcgcccccgcaccacactgcgagatgagccgcttcgtgcctctccccgcctctgcgaaatgggccagcggcctgacccccgcgcagaactgcccgcgggccctggatggggcttggctgatggtcagcatatccagcccagtcctcagcctctccagcctcttgcgaccacagccagagcctcagcaggagcctgttctcatcaccatggcaacagtagagatggggtttcaccatgttggccaggctgctctcgaactcctgacctcagtggtactgactgtcctcacccacacccctgcccctcgagtgagactgggacaagatgctctgctggacttgagctttgcctacatgccccccacctccgaggccgcctcatctctggctccgggtccccctccctttgggctagagtggcgacgccagcacctgggtaagggacatctgctcctggctgcaactcctgggctgaatggccagatgccagcagcccaagaaggggccgtggcatttgctgcttgggatgatgatgagccatggggcccatggaccggaaatgggaccttctggctgcctacagttcaaccctttcaggagggcacctatctggccaccatacacctgccatacctgcaaggacaggtcaccctggagcttgctgtgtacaaaccccccaaagtgtccctgatgccagcaacccttgcacgggccgccccaggggaggcacccccggaattgctctgccttgtgtcccacttctacccttctgggggcctggaggtggagtgggaactccggggtggcccagggggccgctctcagaaggccgaggggcagaggtggctctcggccctgcgccaccattccgatggctctgtcagcctctctgggcacttgcagccgcccccagtcaccactgagcagcatggggcacgctatgcctgtcgaattcaccatcccagcctgcctgcctcggggcgcagcgctgaggtcaccctggaggtagcaggtctttcagggccctcccttgaggacagcgtaggccttttcctgtctgcctttcttctgcttgggctcttcaaggcactgggctgggctgctgtctacctgtccacctgcaaggattcaaagaagaaagcagagtgagggcactcactgccatcctgtggaagccaccatcatctctggcccaagcttctgtagtagctccctaaaataata

SEQ ID NO: 30983 - DNA, 1299 bp, Homo sapiens
  source 1..1299: mol_type = unassigned DNA
agtccaggagggcgcggtaaggctggggtgtcctggtgagaactggagaggatctacccgggtccctgcctggccagtggggaaacaccggtcccccaggcaccttcacctaaccagagcggggatttccaccgcccctcatgccgccctttggaggaaagtgaaagtgaaaggaggaagaggaggcttcatggctgaggaggtcgcagcgccatgaagtccctgtctctgctcctcgctgtggctttgggcctggcgaccgccgtctcagcaggacccgcggtgatcgagtgttggttcgtggaggatgcgagcggaaagggcctggccaagagacccggtgcactgctgttgcgccagggaccgggggaaccgccgccccggccggacctcgaccctgagctctatctcagtgtacacgtggtactgactgtcctcacccacacccctgcccctcgagtgagactgggacaagatgctctgctggacttgagctttgcctacatgccccccacctccgaggccgcctcatctctggctccgggtccccctccctttgggctagagtggcgacgccagcacctgggtaagggacatctgctcctggctgcaactcctgggctgaatggccagatgccagcagcccaagaaggggccgtggcatttgctgcttgggatgatgatgagccatggggcccatggaccggaaatgggaccttctggctgcctacagttcaaccctttcaggagggcacctatctggccaccatacacctgccatacctgcaaggacaggtcaccctggagcttgctgtgtacaaaccccccaaagtgtccctgatgccagcaacccttgcacgggccgccccaggggaggcacccccggaattgctctgccttgtgtcccacttctacccttctgggggcctggaggtggagtgggaactccggggtggcccagggggccgctctcagaaggccgaggggcagaggtggctctcggccctgcgccaccattccgatggctctgtcagcctctctgggcacttgcagccgcccccagtcaccactgagcagcatggggcacgctatgcctgtcgaattcaccatcccagcctgcctgcctcggggcgcagcgctgaggtcaccctggaggtagcaggtctttcagggccctcccttgaggacagcgtaggccttttcctgtctgcctttcttctgcttgggctcttcaaggcactgggctgggctgctgtctacctgtccacctgcaaggattcaaagaagaaagcagagtga

SEQ ID NO: 30984 - DNA, 1693 bp, Homo sapiens; identical to SEQ ID NO: 30979
  source 1..1693: mol_type = unassigned DNA

SEQ ID NO: 30985 - DNA, 2884 bp, Homo sapiens
  source 1..2884: mol_type = unassigned DNA
ggcgcggtaaggctggggtatcctggtgagaactggagaggatctacccgggtccctgcctggccagtggggaaacaccggtcccccaggcaccttcacctaaccagagcggggatttccaccgcccctcatgccgccctttggaggaaagtgaaagtgaaaggaggaagaggaggcttcatggctgaggaggtcgcagcgccatgaagtccctgtctctgctcctcgctgtggctttgggcctggcgaccgccgtctcagcaggacccgcggtgatcgagtgttggttcgtggaggatgcgagcggaaagggcctggccaagagacccggtgcactgctgttgcgccagggaccgggggaaccgccgccccggccggacctcgaccctgagctctatctcagtgtacacgaccccgcgggcgccctccaggctgccttcaggcggtatccccggggcgcccccgcaccacactgcgagatgagccgcttcgtgcctctccccgcctctgcgaaatgggccagcggcctgacccccgcgcagaactgcccgcgggccctggatggggcttggctgatggtcagcatatccagcatggggcacgctatgcctgtcgaattcaccatcccagcctgcctgcctcggggcgcagcgctgaggtcaccctggaggtagcaggtctttcagggccctcccttgaggacagcgtaggccttttcctgtctgcctttcttctgcttgggctcttcaaggcactgggctgggctgctgtctacctgtccacctgcaaggattcaaagaagaaagcagagtgagggcactcactgccatcctgtggaagccaccatcatctctggcccaagcttctgtagtagctccctaaaataataccctatcatctgctcctaatccctccaatctctctccactgagtggctggaatgcttttttttttttctttcacttatataagggataatttttctttttttttttttttgagacggagtctcactcttccgcccaggctgcagtgcagtggcatgatcttggcttactgcaacctccgcctcctgggttcaagcaattctgtggcttcagcctccggagtagctgggattacaggcacatgccaccacacccagtgaatttttgtatttttagtagagacggggtttcaccatgttggccaggctggtcttgaattcctgacctcaggtgatctgcccacctcagcctcccaaagtgctgggattacaggcgtgagccaccacaccaggcccgagaaatgcttttttaaaaaacacacatcttatggcattcaccttcttggagctctaggacagtggttctcaaaatttttttctctcaggacctcttaaaaatcatcaaggaccccaaaaagcttttgggtatgtgggttatagctatcaatatttatggtactagaacttaaaagtgagaaaaatttaaaacacgagaatacataggcacacattctattcatcgtgggaaccatggtgtcaatacatatcatgtagcttctgaaaaactccactgtacacttatagaatgaagaaggcaaaaaacttttttttttttttttttgagacggagtctcgctctgtcgcccaggctggagtgcagtggcgcgatctcggctcactgcaagctccgcctctcgggttcacgccattctcctgcctcagcctcccaagtagctcggactacaggcgtcctccaccatgcctggctaatattttgtattttttagtagagacggggtttcaccgtgttagccaggatggtctcgatctcctaacctggtgatccgcccgcctcggcctcccaaagtattgggattacccgcgtgagccaccgcgcccggctgcaaataatctttctttttttctttttttctgagacagagtctcgctctgttgcccaggctggagtgcagtggcacgatctcggctcacggcacgctccgcctcccgggttcacgccattctcctgcctcagcttcccgagtagctgggactacaggggcccgccaccacgcccggctaactttttgtgtttttagtagagacggggtttcaccgtgttagccaggatggtctcgatctcctgaccttgtgatctgcccgcctcggcctcccaaagtgctgggattacaggcgtgagccaccgcgcccggcggcgaaacacgatattgtactaacatcttaattttgttataaaatctcacaaaccccctgacatagtctcagagatctgtagggccgaggttacatttggagaacccgtactctagggccaaatccattcttcttgccctggctcacttgtcccccccaccgccccgcgctggagccactgcctagttcttcagccctagatggtgctcgccagacctcctctcaatgctcatcacacacagggctattcctttcctccaatgaaccaaacgcctcccgcccacctccaggtcccagtcctctgttccctttgcctggtccacccttgccctccctgggtcgcagacgaggtcggcctcgtcattccccgcagaccgccgcgcgtccctcttgtgcggttcaccacagttgtatttaagtgatcgtgtgagtcgtcgttaaatgcctgtctccccgcggatcatgggctcctcgaggacagggaccggcctgtctgtccactgctgtaaccccgcgccggcatagggacctaaggcccactggagggcgctcatcaagtagctgctggatgttgacgaaggaagcggcggcgcagctcagggatctccgagtcaggacggtcggccagacccacggggtaacgggtctaatcgtgtaggaataaagctgtattccagtgcttcc

SEQ ID NO: 30986 - DNA, 1404 bp, Homo sapiens
  source 1..1404: mol_type = unassigned DNA
ggagtaatggttttcgggcaagtggatgttggagagcacacacaggagttggggggcgggggagggcctggggttggggagggctcgaactcggggctgctgggtagtccaggagggcgcggtaaggctggggtatcctggtgagaactggagaggatctacccgggtccctgcctggccagtggggaaacaccggtcccccaggcaccttcacctaaccagagcggggatttccaccgcccctcatgccgccctttggaggaaagtgaaagtgaaaggaggaagaggaggcttcatggctgaggaggtcgcagcgccatgaagtccctgtctctgctcctcgctgtggctttgggcctggcgaccgccgtctcagcaggacccgcggtgatcgagtgttggttcgtggaggatgcgagcggaaagggcctggccaagagacccggtgcactgctgttgcgccagggaccgggggaaccgccgccccggccggacctcgaccctgagctctatctcagtgtacacgtggtactgactgtcctcacccacacccctgcccctcgagtgagactgggacaagatgctctgctggacttgagctttgcctacatgccccccacctccgaggccgcctcatctctggctccgggtccccctccctttgggctagagtggcgacgccagcacctgggtaagggacatctgctcctggctgcaactcctgggctgaatggccagatgccagcagcccaagaaggggccgtggcatttgctgcttgggatgatgatgagccatggggcccatggaccggaaatgggaccttctggctgcctagagttcaaccctttcaggagggcacctatctggccaccatacacctgccatacctgcaaggacaggtcaccctggagcttgctgtgtacaaaccccccaaagtgtccctgatgccagcaacccttgcacgggccgccccaggggaggcacccccggaattgctctgccttgtgtcccacttctacccttctgggggcctggaggtggagtgggaactccggggtggcccagggggccgctctcagaaggccgaggggcagaggtggctctcggccctgcgccaccattccgatggctctgtcagcctctctgggcacttgcagccgcccccagtcaccactgagcagcatggggcacgctatgcctgtcgaattcaccatcccagcctgcctgcctcggggcgcagcgctgaggtcaccctggaggtagcaggtctttcagggccctcccttgaggacagcgtaggccttttcctgtctgcctttcttctgcttgggctcttcaaggcactgggctgggctgctgtctacctgtccacctgcaaggattcaaagaagcatgctacttaa

SEQ ID NO: 30987 - DNA, 1665 bp, Homo sapiens
  source 1..1665: mol_type = unassigned DNA
ggagtaatggttttcgggcaagtggatgttggagagcacacacaggagttggggggcgggggagggcctggggttggggagggctcgaactcggggctgctgggtagtccaggagggcgcggtaaggctggggtatcctggtgagaactggagaggatctacccgggtccctgcctggccagtggggaaacaccggtcccccaggcaccttcacctaaccagagcggggatttccaccgcccctcatgccgccctttggaggaaagtgaaagtgaaaggaggaagaggaggctaaatggctgaggaggtcgcagcgccatgaagtccctgtctctgctcctcgctgtggctttgggcctggcgaccgccgtctcagcaggacccgcggtgatcgagtgttggttcgtggaggatgcgagcggaaagggcctggccaagagacccggtgcactgctgttgcgccagggaccgggggaaccgccgccccggccggacctcgaccctgagctctatctcagtgtacacgaccccgcgggcgccctccaggctgccttcaggcggtatccccggggcgcccccgcaccacactgcgagatgagccgcttcgtgcctctccccgcctctgcgaaatgggccagcggcctgacccccgcgcagaactgcccgcgggccctggatggggcttggctgatggtcagcatatccagcccagtcctcagcctctccagcctcttgcgaccacagccagagcctcagcaggagcctgttctcatcaccatggcaacagtggtactgactgtcctcacccacacccctgcccctcgagtgagactgggacaagatgctctgctggacttgagctttgcctacatgccccccacctccgaggccgcctcatctctggctccgggtccccctccctttgggctagagtggcgacgccagcacctgggtaagggacatctgctcctggctgcaactcctgggctgaatggccagatgccagcagcccaagaaggggccgtggcatttgctgcttgggatgatgatgagccatggggcccatggaccggaaatgggaccttctggctgcctagagttcaaccctttcaggagggcacctatctggccaccatacacctgccatacctgcaaggacaggtcaccctggagcttgctgtgtacaaaccccccaaagtgtccctgatgccagcaacccttgcacgggccgccccaggggaggcacccccggaattgctctgccttgtgtcccacttctacccttctgggggcctggaggtggagtgggaactccggggtggcccagggggccgctctcagaaggccgaggggcagaggtggctctcggccctgcgccaccattccgatggctctgtcagcctctctgggcacttgcagccgcccccagtcaccactgagcagcatggggcacgctatgcctgtcgaattcaccatcccagcctgcctgcctcggggcgcagcgctgaggtcaccctggaggtagcaggtctttcagggccctcccttgaggacagcgtaggccttttcctgtctgcctttcttctgcttgggctcttcaaggcactgggctgggctgctgtctacctgtccacctgcaaggattcaaagaagcatgctacttaa

SEQ ID NO: 30988 - DNA, 1404 bp, Homo sapiens
  source 1..1404: mol_type = unassigned DNA
ggagtaatggttttcgggcaagtggatgttggagagcacacacaggagttggggggcgggggagggcctggggttggggagggctcgaactcggggctgctgggtagtccaggagggcgcggtaaggctggggtatcctggtgagaactggagaggatctacccgggtccctgcctggccagtggggaaacaccggtcccccaggcaccttcacctaaccagagcggggatttccaccgcccctcatgccgccctttggaggaaagtgaaagtgaaaggaggaagaggaggctaaatggctgaggaggtcgcagcgccatgaagtccctgtctctgctcctcgctgtggctttgggcctggcgaccgccgtctcagcaggacccgcggtgatcgagtgttggttcgtggaggatgcgagcggaaagggcctggccaagagacccggtgcactgctgttgcgccagggaccgggggaaccgccgccccggccggacctcgaccctgagctctatctcagtgtacacgtggtactgactgtcctcacccacacccctgcccctcgagtgagactgggacaagatgctctgctggacttgagctttgcctacatgccccccacctccgaggccgcctcatctctggctccgggtccccctccctttgggctagagtggcgacgccagcacctgggtaagggacatctgctcctggctgcaactcctgggctgaatggccagatgccagcagcccaagaaggggccgtggcatttgctgcttgggatgatgatgagccatggggcccatggaccggaaatgggaccttctggctgcctagagttcaaccctttcaggagggcacctatctggccaccatacacctgccatacctgcaaggacaggtcaccctggagcttgctgtgtacaaaccccccaaagtgtccctgatgccagcaacccttgcacgggccgccccaggggaggcacccccggaattgctctgccttgtgtcccacttctacccttctgggggcctggaggtggagtgggaactccggggtggcccagggggccgctctcagaaggccgaggggcagaggtggctctcggccctgcgccaccattccgatggctctgtcagcctctctgggcacttgcagccgcccccagtcaccactgagcagcatggggcacgctatgcctgtcgaattcaccatcccagcctgcctgcctcggggcgcagcgctgaggtcaccctggaggtagcaggtctttcagggccctcccttgaggacagcgtaggccttttcctgtctgcctttcttctgcttgggctcttcaaggcactgggctgggctgctgtctacctgtccacctgcaaggattcaaagaagcatgctacttaa

SEQ ID NO: 30989 - DNA, 817 bp, Homo sapiens; identical to SEQ ID NO: 30981
  source 1..817: mol_type = unassigned DNA

SEQ ID NO: 30990 - DNA, 1665 bp, Homo sapiens
  source 1..1665: mol_type = unassigned DNA
ggagtaatggttttcgggcaagtggatgttggagagcacacacaggagttggggggcgggggagggcctggggttggggagggctcgaactcggggctgctgggtagtccaggagggcgcggtaaggctggggtatcctggtgagaactggagaggatctacccgggtccctgcctggccagtggggaaacaccggtcccccaggcaccttcacctaaccagagcggggatttccaccgcccctcatgccgccctttggaggaaagtgaaagtgaaaggaggaagaggaggcttcatggctgaggaggtcgcagcgccatgaagtccctgtctctgctcctcgctgtggctttgggcctggcgaccgccgtctcagcaggacccgcggtgatcgagtgttggttcgtggaggatgcgagcggaaagggcctggccaagagacccggtgcactgctgttgcgccagggaccgggggaaccgccgccccggccggacctcgaccctgagctctatctcagtgtacacgaccccgcgggcgccctccaggctgccttcaggcggtatccccggggcgcccccgcaccacactgcgagatgagccgcttcgtgcctctccccgcctctgcgaaatgggccagcggcctgacccccgcgcagaactgcccgcgggccctggatggggcttggctgatggtcagcatatccagcccagtcctcagcctctccagcctcttgcgaccacagccagagcctcagcaggagcctgttctcatcaccatggcaacagtggtactgactgtcctcacccacacccctgcccctcgagtgagactgggacaagatgctctgctggacttgagctttgcctacatgccccccacctccgaggccgcctcatctctggctccgggtccccctccctttgggctagagtggcgacgccagcacctgggtaagggacatctgctcctggctgcaactcctgggctgaatggccagatgccagcagcccaagaaggggccgtggcatttgctgcttgggatgatgatgagccatggggcccatggaccggaaatgggaccttctggctgcctagagttcaaccctttcaggagggcacctatctggccaccatacacctgccatacctgcaaggacaggtcaccctggagcttgctgtgtacaaaccccccaaagtgtccctgatgccagcaacccttgcacgggccgccccaggggaggcacccccggaattgctctgccttgtgtcccacttctacccttctgggggcctggaggtggagtgggaactccggggtggcccagggggccgctctcagaaggccgaggggcagaggtggctctcggccctgcgccaccattccgatggctctgtcagcctctctgggcacttgcagccgcccccagtcaccactgagcagcatggggcacgctatgcctgtcgaattcaccatcccagcctgcctgcctcggggcgcagcgctgaggtcaccctggaggtagcaggtctttcagggccctcccttgaggacagcgtaggccttttcctgtctgcctttcttctgcttgggctcttcaaggcactgggctgggctgctgtctacctgtccacctgcaaggattcaaagaagcatgctacttaa

SEQ ID NO: 30991 - DNA, 3495 bp, Homo sapiens
  source 1..3495: mol_type = unassigned DNA
ggggacgcggcacagatagggggaagccggagtaatggttttcgggcaagtggatgttggagagcacacacaggagttggggggcgggggagggcctggggttggggagggctcgaactcggggctgctgggtagtccaggagggcgcggtaaggctggggtgtcctggtgagaactggagaggatctacccgggtccctgcctggccagtggggaaacaccggtcccccaggcaccttcacctaaccagagcggggatttccaccgcccctcatgccgccctttggaggaaagtgaaagtgaaaggaggaagaggaggcttcatggctgaggaggtcgcagcgccatgaagtccctgtctctgctcctcgctgtggctttgggcctggcgaccgccgtctcagcaggacccgcggtgatcgagtgttggttcgtggaggatgcgagcggaaagggcctggccaagagacccggtgcactgctgttgcgccagggaccgggggaaccgccgccccggccggacctcgaccctgagctctatctcagtgtacacgtggtactgactgtcctcacccacacccctgcccctcgagtgagactgggacaagatgctctgctggacttgagctttgcctacatgccccccacctccgaggccgcctcatctctggctccgggtccccctccctttgggctagagtggcgacgccagcacctgggtaagggacatctgctcctggctgcaactcctgggctgaatggccagatgccagcagcccaagaaggggccgtggcatttgctgcttgggatgatgatgagccatggggcccatggaccggaaatgggaccttctggctgcctacagttcaaccctttcaggagggcacctatctggccaccatacacctgccatacctgcaaggacaggtcaccctggagcttgctgtgtacaaaccccccaaagtgtccctgatgccagcaacccttgcacgggccgccccaggggaggcacccccggaattgctctgccttgtgtcccacttctacccttctgggggcctggaggtggagtgggaactccggggtggcccagggggccgctctcagaaggccgaggggcagaggtggctctcggccctgcgccaccattccgatggctctgtcagcctctctgggcacttgcagccgcccccagtcaccactgagcagcatggggcacgctatgcctgtcgaattcaccatcccagcctgcctgcctcggggcgcagcgctgaggtcaccctggaggtagcaggtctttcagggccctcccttgaggacagcgtaggccttttcctgtctgcctttcttctgcttgggctcttcaaggcactgggctgggctgctgtctacctgtccacctgcaaggattcaaagaagaaagcagagtgagggcactcactgccatcctgtggaagccaccatcatctctggcccaagcttctgtagtagctccctaaaataataccctatcatctgctcctaatccctccaatctctctccactgagtggctggaatgcttttttttttttctttcacttatataagggataatttttcttttttttttttttttgagacggagtctcactcttccgcccaggctgcagtgcagtggcatgatcttggcttactgcaacctccgcctcctgggttcaagcaattctgtggcttcagcctccggagtagctgggattacaggcacatgccaccacacccagtgaatttttgtatttttagtagagacggggtttcaccatgttggccaggctggtcttgaattcctgacctcaggtgatctgcccacctcagcctcccaaagtgctgggattacaggcgtgagccaccacaccaggcccgagaaatgcttttttaaaaaacacacatcttatggcattcaccttcttggagctctaggacagtggttctcaaaatttttttctctcaggacctcttaaaaatcatcaaggaccccaaaaagcttttgggtatgtgggttatagctatcaatatttatggtactagaacttaaaagtgagaaaaatttaaaacacgagaatacataggcacacattctattcatcgtgggaaccatggtgtcaatacatatcatgtagcttctgaaaaactccactgtacacttatagaatgaagaaggcaaaaaacttttttttttttttttttgagacggagtctcgctctgtcgcccaggctggagtgcagtggcgcgatctcggctcactgcaagctccgcctctcgggttcacgccattctcctgcctcagcctcccaagtagctcggactacaggcgtcctccaccatgcctggctaatattttgtattttttagtagagacggggtttcaccgtgttagccaggatggtctcgatctcctaacctggtgatccgcccgcctcggcctcccaaagtattgggattacccgcgtgagccaccgcgcccggctgcaaataatctttctttttttctgagacagagtctcgctctgttgcccaggctggagtgcagtggcacgatctcggctcacggcacgctccgcctcccgggttcacgccattctcctgcctcagcttcccgagtagctgggactacaggggcccgccaccacgcccggctaactttttgtgtttttagtagagacggggtttcaccgtgttagccaggatggtctcgatctcctgaccttgtgatctgcccgcctcggcctcccaaagtgctgggattacaggcgtgagccaccgcgcccggcggcgaaacacgatattgtactaacatcttaattttgttataaaatctcacaaaccccctgacatagtctcagagatctgtagggccgaggttacatttggagaacccgtactctagggccaaatccattcttcttgccctggctcacttgtcccccccaccgccccgcgctggagccactgcctagttcttcagccctagatggtgctcgccagacctcctctcaatgctcatcacacacagggctattcctttcctccaatgaaccaaacgcctcccgcccacctccaggtcccagtcctctgttccctttgcctggtccacccttgccctccctgggtcgcagacgaggtcggcctcgtcattccccgcagaccgccgcgcgtccctcttgtgcggttcaccacagttgtatttaagtgatcgtgtgagtcgtcgttaaatgcctgtctccccgcggatcatgggctcctcgaggacagggactggcctgtctgtccactgctgtaaccccgcgccggcatagggacctaaggcccactggagggcgctcatcaagtagctgctggatgttgacgaaggaagcggcggcgcagctcagggatctccgagtcaggacggtcggccagacccacggggtaacgggtctaatcgtgtaggaataaagctgtattccagtgcttcc

SEQ ID NO: 30992 - DNA, 1665 bp, Homo sapiens; identical to SEQ ID NO: 30987
  source 1..1665: mol_type = unassigned DNA

SEQ ID NO: 30993 - DNA, 1404 bp, Homo sapiens; identical to SEQ ID NO: 30988
  source 1..1404: mol_type = unassigned DNA

SEQ ID NO: 30994 - DNA, 2532 bp, Homo sapiens
  source 1..2532: mol_type = unassigned DNA
atgctgctggaggccgagcggcggcgcggcgggggcgcggcgggggcgcggctgctggagcggtaccgccgcgtgcctggcgtgcgcgccctccgcgccgacagcgtcctcatcatcgagacggtgcccggcttcccgcccgcgccgcccgccccgggggccgcgcagatccgcgccgccgaggtgctggtgtacggggcgccgcccggccgcgtcagccgcctactggagaggttcgacccgcccgccgcgccgcgccgccgcgggagccccgagcgcgcccgccccccgccgccgccgccgccgcccgcgccgccccggcccccgcccgcggcccccagcccgcccgccgcgcccgggccccgcggtggcggggcgagccccggggcccggcgcagcgacttcctccagaagaccggcagcaactccttcaccgtccacccccggggtctgcaccgcggcgcgggcgcccgcctgctctccaacgggcactcggcccctgagccccgggccggccctgccaaccgcctcgcgggctccccgcctgggtcgggacagtggaagccaaaggtggagtcgggggatccctccctccacccgccccccagccccgggaccccgagtgccactccagcctcaccccctgccagtgccactcctagccagcgccagtgcgtctccgcagccaccagcaccaacgactccttcgagatacggccggcccccaagccagttatggagaccatccccttgggggacctccaggcccgggcgctggccagcctccgcgcaaactctcgaaattctttcatggtcatccccaagagcaaggcctccggggctcctcctcctgaggggaggcagtccgtggagctgccaaagggagacctgggcccggcctccccgagccaggagctcggatcccagccggtgcctggaggggatggtgcgcctgccctcgggaagagccccctggaggtcgaggcacagtgggcagtcgaggagggggcctgtcccaggacagccaccgccctcgctgaccgggctattaggtggcagaggccgtcctcaccgccccccttcctgccggctgcttcggaagaagctgagcctgctgagggcctcagggttcctggcttggccaagaatagccgggaatatgtgaggccggggctgcctgtcaccttcatcgatgaggtagactcggaggaggccccccaagcagccaaactaccctacctcccgcaccctgccaggcctctgcaccctgccaggcccgggtgcgtggcagagcttcagccccggggcagcaacaccttcacagtggtgcccaagaggaagccagggactctgcaggaccagcacttcagtcaggccaacagggagcctcggccacgggaggccgaggaggaggaggctagttgcctcctggggcccacgttgaagaagcgctaccccaccgtgcatgagatcgaggtgattggcggctacctggccctgcagaagtcctgcctcaccaaggctggctcctcaagaaagaagatgaagatctccttcaacgacaaaagcctgcagaccacatttgagtacccttccgagagctccctagagcaggaggaagaggtggaccagcaggaggaggaggaggaggaggaggaggaagaggaagaggaggaagagggatccggctcagaggagaagccctttgcactcttcctgccccgggccacgtttgtgagcagcgtgagacccgagagctctcggctgccagagggtagctcaggcctgtccagctacaccccgaagcactctgtggccttcagcaagtggcaggagcaggcgctggagcaggccccgagggaggcagagcccccgcccgtggaggccatggtgagatgcgggggagtggagcgctggggggagtctgacacccgggcgagcccatgtgtccacattctgtcctctcactttcagctcacacccgccagtcagaatgacctctcggacttccgcagcgagccagccctgtatttctgagcccagcactgccaggaccaaggctgagcccagctgtgggagtcccggaagctgggcagtagccagggactactgcacccgcttctgccttgtttggcctcactgtatcccacccacccctcctggccctggaagcagctagggtgcctcctgccatcggggccaggtctgggtctcactccccggccctgatttgggagggtccaagggggaagtggggtggggaactgcctgtgggtgagtgccaggggcctgctgggtggtggccatctgcgacccggcagggggctgtgcagattctgcacctggccattccctgtcctgtctcctcagcctgcctcacagtggccatggggtgtcggggtgaagggctgtcccagctacttgtcctctgcaggaccctaagcccctgcccgcagcccacatgccctctgtgatgagtggcgtctttcctgcctctgatgatggactcaataaacagcactggacaaggct

SEQ ID NO: 30995 - DNA, 2718 bp, Homo sapiens
  source 1..2718: mol_type = unassigned DNA
gggggcgtggccgcggcgcccaggctggccgcggcggcggctgccactccggccctcagtccagccgtccgctgccgcgttcgcagcatggccgccctggggcggccgggctcggggccgcgcgctgcggtgcccgcttggaagcgtgagatcctggagcggaagcgggccaagctagccgcgctgggcgggggcgcggggcccggggcggcggagcccgagcagcgggtgctggccgagagcctgggcccgctgcgcgagaacccgttcatgctgctggaggccgagcggcggcgcggcgggggcgcggcgggggcgcggctgctggagcggtaccgccgcgtgcctggcgtgcgcgccctccgcgccgacagcgtcctcatcatcgagacggtgcccggcttcccgcccgcgccgcccgccccgggggccgcgcagatccgcgccgccgaggtgctggtgtacggggcgccgcccggccgcgtcagccgcctactggagaggttcgacccgcccgccgcgccgcgccgccgcgggagccccgagcgcgcccgccccccgccgccgccgccgccgcccgcgccgccccggcccccgcccgcggcccccagcccgcccgccgcgcccgggccccgcggtggcggggcgagccccggggcccggcgcagcgacttcctccagaagaccggcagcaactccttcaccgtccacccccggggtctgcaccgcggcgcgggcgcccgcctgctctccaacgggcactcggcccctgagccccgggccggccctgccaaccgcctcgcgggctccccgcctgggtcgggacagtggaagccaaaggtggagtcgggggatccctccctccacccgccccccagccccgggaccccgagtgccactccagcctcaccccctgccagtgccactcctagccagcgccagtgcgtctccgcagccaccagcaccaacgactccttcgagatacggccggcccccaagccagttatggagaccatccccttgggggacctccaggcccgggcgctggccagcctccgcgcaaactctcgaaattctttcatggtcatccccaagagcaaggcctccggggctcctcctcctgaggggaggcagtccgtggagctgccaaagggagacctgggcccggcctccccgagccaggagctcggatcccagccggtgcctggaggggatggtgcgcctgccctcgggaagagccccctggaggtcgaggcacagtgggcagtcgaggagggggcctgtcccaggacagccaccgccctcgctgaccgggctattaggtggcagaggccgtcctcaccgccccccttcctgccggctgcttcggaagaagctgagcctgctgagggcctcagggttcctggcttggccaagaatagccgggaatatgtgaggccggggctgcctgtcaccttcatcgatgaggtagactcggaggaggccccccaagcagccaaactaccctacctcccgcaccctgccaggcctctgcaccctgccaggcccgggtgcgtggcagagcttcagccccggggcagcaacaccttcacagtggtgcccaagaggaagccagggactctgcaggaccagcacttcagtcaggccaacagggagcctcggccacgggaggccgaggaggaggaggctagttgcctcctggggcccacgttgaagaagcgctaccccaccgtgcatgagatcgaggtgattggcggctacctggccctgcagaagtcctgcctcaccaaggctggctcctcaagaaagaagatgaagatctccttcaacgacaaaagcctgcagaccacatttgagtacccttccgagagctccctagagcaggaggaagaggtggaccagcaggaggaggaggaggaggaggaggaggaagaggaagaggaggaagagggatccggctcagaggagaagccctttgcactcttcctgccccgggccacgtttgtgagcagcgtgagacccgagagctctcggctgccagagggtagctcaggcctgtccagctacaccccgaagcactctgtggccttcagcaagtggcaggagcaggcgctggagcaggccccgagggaggcagagcccccgcccgtggaggccatgctcacacccgccagtcagaatgacctctcggacttccgcagcgagccagccctgtatttctgagcccagcactgccaggaccaaggctgagcccagctgtgggagtcccggaagctgggcagtagccagggactactgcacccgcttctgccttgtttggcctcactgtatcccacccacccctcctggccctggaagcagctagggtgcctcctgccatcggggccaggtctgggtctcactccccggccctgatttgggagggtccaagggggaagtggggtggggaactgcctgtgggtgagtgccaggggcctgctgggtggtggccatctgcgacccggcagggggctgtgcagattctgcacctggccattccctgtcctgtctcctcagcctgcctcacagtggccatggggtgtcggggtgaagggctgtcccagctacttgtcctctgcaggaccctaagcccctgcccgcagcccacatgccctctgtgatgagtggcgtctttcctgcctctgatgatggactcaataaacagcactggacaaggct

SEQ ID NO: 30996 - DNA, 5130 bp, Homo sapiens
  source 1..5130: mol_type = unassigned DNA
atggagtgggtgctcgcggaagcgctgctctcgcagagccgggacccccgggccctgcttggggcgctgtgccaaggggaggcatccgcggagcgcgtggagacgctgcgcttccttctgcagcggctcgaggacgaggaggcgcgcggcagcgggggcgcaggcgcgctcccggaggcggcgcgcgaggtggctgcagggtacctcgtgccactgctgcggagcctgcgcggacgccccgcgggcggcccggaccccagtctgcagcctcgccaccgccggcgcgtgctgagggcggcgggcgcggccctgcgctcgtgcgtccgcctggccgggcgtccgcagctggcggccgcgctggctgaggaggcgctgcgcgatctgctcgccgggtggcgcgcgcctggcgccgaggctgccgtggaagtgctagcagccgtcgggccatgtttgcggccccgcgaggacgggccgctactggagcgcgtggcggggaccgccgtcgccctggcgctgggcgggggcggggacggggatgaggccgggcctgccgaggacgcggcggcgctggtggccgggcgactgctgccagtgctggtccaatgtggcggggcggcgctgcgggccgtgtggggcgggctggccgcgcctggggcgtccctggggtccggccgcgtagaggagaagctgctggtcctgagcgccctggccgagaagctgttgcccgagcccggcggcgaccgcgcccgcggcgcgcgcgaggcgggcccggacgcccggcgctgctggcgcttctggaggacggtgcaggcggggctgggccaggcggacgccctgacgcgcaagcgagcgcgctacctgctgcagagggcggtggaggtgtcggcggagctgggggccgactgcacctgcgggccccaggaaggaaacggcccaagtctgttttggtggtctgagaggaaaaaagatgagcttctaaagttttgggaaaattatattttaattatggagactttagaaggaaatcagatacatgttataaagccagttttaccaaagctaaacaatctgtttgaatatgcggtgtcagaggaaaatggatgttggctctttcacccatcctggcatatgtgtatttataaaagaatgtttgaaagtgaaaacaaaatcctgtccaaagaaggtgttatccattttttggagctgtatgaaacaaagattcttccattttcaccagaattttctgagtttattattggaccattaatggatgcgctttcagagagctctctgtatagcaggtccccaggccagccaataggaagctgttctccattgggactgaaattacagaagtttttagtcacttatatttctcttcttccagaagaaataaagagtagcttcctattgaagtttattcggaagatgacaagtaggcattggtgtgctgttcccattttgtttctatctaaggctttggcaaatgtcccaagacataaggccctgggtatagatgggcttcttgctctcagggatgttattcattgcactatgatcacacatcagattctcctgagaggggcagcccaatgctaccttcttcaaacagctatgaatttgctagatgtggagaaagtgtcactttctgatgtctcaacttttctcatgtctctgagacaagaggaatccttaggacgaggaacttcattgtggacagagctgtgtgactggctacgtgttaatgaaagctattttaagccatcccctacgtgtagctccattggacttcacaagacatctttaaatgcttatgtaaagagcattgttcaagagtatgttaagtcatctgcttgggaaacaggagaaaactgctttatgcctgattggtttgaagccaagcttgtttctctgatggtcttgctggctgtggatgtggaaggaatgaagactcagtatagcggaaagcagagaacagagaatgtattgcggatattcttagaccctcttctggatgtgcttatgaagtttagtaccaatgcctacatgcccttgctgaagactgacagatgcctccagctgctgttgaagctgttgaacacatgcaggttgaaaggttccagtgcccaagatgatgaggtgtctactgttcttcagaactttttcatgtctactacagagagcatttctgaatttattctcagaagacttactatgaatgagctaaatagtgtttcagatctggatcgttgccatttatacctgatggtgttaactgagcttataaatctgcatttgaaggttgggtggaaaaggggtaaccctatctggagagttatttctcttttgaaaaatgcatccattcagcatcttcaagagatggacagtggacaggagccaacagttggaagtcagattcagagagtagtgagcatggctgccttggccatggtgtgtgaggccatagaccagaagcctgagctgcagctggactctctccatgctgggcccctggaaagcttcctttcctctcttcagctcaatcagacgctgcagaagccccacgcagaggagcagagcagttatgctcaccccttggagtgcagcagtgttttggaagaatcgtcatcttcccaaggatggggaaaaatagttgcacaatatattcatgatcaatgggtgtgcctctctttcctgttgaaaaaatatcacacccttataccaaccacagggagtgaaattctggaaccgtttctacctgccgttcagatgccaataaggactttgcagtctgcactagaagccctcacagttctttcttctgatcaagttttaccagtgttccattgcttgaaagtgttggttcccaagcttctgacttcctctgaatcactctgcatagagtcttttgacatggcgtggaaaattatatcttctttaagcaacactcagctgatattctgggctaatttaaaagcttttgttcagtttgtttttgataacaaagttcttaccattgctgccaaaatcaagggccaggcatatttcaaaataaaagagattatgtacaagataattgaaatgtctgctataaagactggagtcttcaatacactgataagttactgctgtcagtcttggatagtgtctgcttcaaatgtgtcccaaggatctttatcaagtgctaaaaattatagcgaacttatccttgaggcttgtatatttggaactgtgtttaggcgtgatcaaagacttgttcaggatgtacagaccttcatagaaaaccttggacatgactgtgcggcaaatattgttatggaaaatactaagagagaagaccattatgtgagaatttgtgctgtcaaattcctgtgtttattagatggctccaatatgtcccacaagttgtttattgaggatcttgcaatcaagctattagataaagatgaattagtgtccaagtccaaaaaacgctactatgtgaattctctacagcacagagtgaaaaaccgagtgtggcagactctgctggtacttttccctagacttgaccagaatttcttgaatggaattattgacaggattttccaggctggtttcaccaacaatcaagcatccataaaatattttatagaatggattattatattgattcttcataaattccctcaatttcttccaaagttctgggattgtttttcttatggtgaagaaaatcttaaaacaagcatttgtacgtttttagcagttttatcacatttagacattattactcaaaatattccagaaaagaaactaattctgaagcaagcccttatagttgtgctgcagtggtgtttcaatcacaattttagtgttcgactgtatgctttagttgctcttaagaaactctggactgtgtgtaaagtgttaagtgttgaagaatttgatgccctgactcctgtgattgaatccagcctccatcaagtggaaagcatgcacggagcagggaatgccaagaagaattggcaacgcattcaggagcatttcttttttgcaacatttcacccactcaaggattattgtctagagaccatattttacatccttccacgcctttcaggccttattgaagatgaatggatcaccattgataaatttaccagattcactgatgttcctttagctgcgggatttcagtggtacctttctcaaactcaacttagtaaactaaaaccaggtgactggtctcagcaagacataggtactaatttggtcgaagcagataaccaagcggagtggaccgacgttcagaagaagattatcccgtggaacagtcgtgtttccgacttagacctggagctcctgtttcaggatcgtgctgccagacttggaaagtcaattagtagactcatcgttgtggcctcgctcatcgacaaaccgaccaatttaggaggactgtgcaggacctgtgaggtatttggggcttcagtgctcgttgttggcagccttcagtgtatcagcgacaaacagtttcagcacctcagtgtctctgcagaacagtggcttcctctagtggaggtaaaaccacctcagctaattgattatctgcagcagaagaaaacagaaggttataccatcattggagtggaacaaactgccaaaagtttagacctaacccaatattgctttcctgagaaatctctgctcttgttgggaaatgaacgtgagggaattccagcaaatctgatccaacagttggacgtttgtgtggaaattcctcaacagggcattatccgctccctgaatgtccatgtgagtggagccctgctgatctgggagtacaccaggcagcagctgctctcgcacggagataccaagccatgatgtgccttccttagtgaactgctgctgctgttcagacttttttaaaaaaaactatttggactaaagaaacagattctgaaatttattgtgataatttgtatttcttttttcttgcaatttaatgccaaaagtttgccatgtgccttaaacatattactatatattttcccctttaataaacactttttgttaaattgtattcttcctttaataaaatattttaagcaattgtggaaataaaacaatggattttttaagagagaa

SEQ ID NO: 30997 - DNA, 1867 bp, Homo sapiens
  source 1..1867: mol_type = unassigned DNA
tccagctgcgacacagatggcgcgcgggctcttgggttctgtagttttctcgcgatccaaaaggctccgtgcccaagtgagtccttaccgcctccctacccagcggcttcccctccgctagtacgcatgtccacagcttcacggaccgggagagagggggcgcggaaggaaggaggcgggacggtattacaaacaaaaaaatacggccttctcgagaagcgacggcggagggcccgctcctcccagaaggcggtgcagcctgcccgggcgagccacgcacgcagagggttgtggggcggatagctcccctccagatggaggctcacgaagtagggtgggcgggggactccatatcccagcgtgccccgcggcgggccctaccggccgcgactccgggcttggccccggccctagctcgtcggctgtgtattggggcgcgtggaggctgcagtcacggtggcgcccgcggggacggaggagggaatgagtgaagaggagcaaggctccggcactaccacgggctgcgggctgcctagtatagagcaaatgctggccgccaacccaggcaagaccccgatcagccttctgcaggagtatgggaccagaatagggaagacgcctgtgtacgaccttctcaaagccgagggccaagcccaccagcctaatttcaccttccgggtcaccgttggcgacaccagctgcactggtcagggccccagcaagaaggcagccaagcacaaggcagctgaggtggccctcaaacacctcaaaggggggagcatgctggagccggccctggaggacagcagttctttttctcccctagactcttcactgcctgaggacattccggtttttactgctgcagcagctgctaccccagttccatctgtagtcctaaccaggagcccccccatggaactgcagccccctgtctcccctcagcagtctgagtgcaaccccgttggtgctctgcaggagctggtggtgcagaaaggctggcggttgccggagtacacagtgacccaggagtctgggccagcccaccgcaaagaattcaccatgacctgtcgagtggagcgtttcattgagattgggagtggcacttccaaaaaattggcaaagcggaatgcggcggccaaaatgctgcttcgagtgcacacggtgcctctggatgcccgggatggcaatgaggtggagcctgatgatgaccacttctccattggtgtgggctcccgcctggatggtcttcgaaaccggggcccaggttgcacctgggattctctacgaaattcagtaggagagaagatcctgtccctccgcagttgctccctgggctccctgggtgccctgggccctgcctgctgccgtgtcctcagtgagctctctgaggagcaggcctttcacgtcagctacctggatattgaggagctgagcctgagtggactctgccagtgcctggtggaactgtccacccagccggccactgtgtgtcatggctctgcaaccaccagggaggcagcccgtggtgaggctgcccgccgtgccctgcagtacctcaagatcatggcaggcagcaagtgaagccccagctggactcatggatgtgcaccctttgctccctgctctttctgcctctgggctcatgtatctgcgcagctctggtaccctctgtgggtgccatctctacctctgacacagactgcctgccttgaagctgagaaggcacagggcaaggagccaaggaccacagagcctcagccagcccaggatccgtcctcattttattggtgatgatgaatgggaatgaaatcagggggctgtctactagagcctggaataaatatgctgctttgtggatttttaa

SEQ ID NO: 30998 - DNA, 1368 bp, Homo sapiens
  source 1..1368: mol_type = unassigned DNA
gctcttgggttctgtagttttctcgcgatccaaaaggctccgtgcccaaagcaaatgctggccgccaacccaggcaagaccccgatcagccttctgcaggagtatgggaccagaatagggaagacgcctgtgtacgaccttctcaaagccgagggccaagcccaccagcctaatttcaccttccgggtcaccgttggcgacaccagctgcactggtcagggccccagcaagaaggcagccaagcacaaggcagctgaggtggccctcaaacacctcaaaggggggagcatgctggagccggccctggaggacagcagttctttttctcccctagactcttcactgcctgaggacattccggtttttactgctgcagcagctgctaccccagttccatctgtagtcctaaccaggagcccccccatggaactgcagccccctgtctcccctcagcagtctgagtgcaaccccgttggtgctctgcaggagctggtggtgcagaaaggctggcggttgccggagtacacagtgacccaggagtctgggccagcccaccgcaaagaattcaccatgacctgtcgagtggagcgtttcattgagattgggagtggcacttccaaaaaattggcaaagcggaatgcggcggccaaaatgctgcttcgagtgcacacggtgcctctggatgcccgggatggcaatgaggtggagcctgatgatgaccacttctccattggtgtgggctcccgcctggatggtcttcgaaaccggggcccaggttgcacctgggattctctacgaaattcagtaggagagaagatcctgtccctccgcagttgctccctgggctccctgggtgccctgggccctgcctgctgccgtgtcctcagtgagctctctgaggagcaggcctttcacgtcagctacctggatattgaggagctgagcctgagtggactctgccagtgcctggtggaactgtccacccagccggccactgtgtgtcatggctctgcaaccaccagggaggcagcccgtggtgaggctgcccgccgtgccctgcagtacctcaagatcatggcaggcagcaagtgaagccccagctggactcatggatgtgcaccctttgctccctgctctttctgcctctgggctcatgtatctgcgcagctctggtaccctctgtgggtgccatctctacctctgacacagactgcctgccttgaagctgagaaggcacagggcaaggagccaaggaccacagagcctcagccagcccaggatccgtcctcattttattggtgatgatgaatgggaatgaaatcagggggctgtctactagagcctggaataaatatgctgctttgtgga

SEQ ID NO: 30999 - DNA, 1402 bp, Homo sapiens
  source 1..1402: mol_type = unassigned DNA
ctgcctccagctctaaatagtttggggttggcccggttcccagactgcactggaacactgggctttatgcccccacattcagtgcatttgtatagagcaaatgctggccgccaacccaggcaagaccccgatcagccttctgcaggagtatgggaccagaatagggaagacgcctgtgtacgaccttctcaaagccgagggccaagcccaccagcctaatttcaccttccgggtcaccgttggcgacaccagctgcactggtcagggccccagcaagaaggcagccaagcacaaggcagctgaggtggccctcaaacacctcaaaggggggagcatgctggagccggccctggaggacagcagttctttttctcccctagactcttcactgcctgaggacattccggtttttactgctgcagcagctgctaccccagttccatctgtagtcctaaccaggagcccccccatggaactgcagccccctgtctcccctcagcagtctgagtgcaaccccgttggtgctctgcaggagctggtggtgcagaaaggctggcggttgccggagtacacagtgacccaggagtctgggccagcccaccgcaaagaattcaccatgacctgtcgagtggagcgtttcattgagattgggagtggcacttccaaaaaattggcaaagcggaatgcggcggccaaaatgctgcttcgagtgcacacggtgcctctggatgcccgggatggcaatgaggtggagcctgatgatgaccacttctccattggtgtgggctcccgcctggatggtcttcgaaaccggggcccaggttgcacctgggattctctacgaaattcagtaggagagaagatcctgtccctccgcagttgctccctgggctccctgggtgccctgggccctgcctgctgccgtgtcctcagtgagctctctgaggagcaggcctttcacgtcagctacctggatattgaggagctgagcctgagtggactctgccagtgcctggtggaactgtccacccagccggccactgtgtgtcatggctctgcaaccaccagggaggcagcccgtggtgaggctgcccgccgtgccctgcagtacctcaagatcatggcaggcagcaagtgaagccccagctggactcatggatgtgcaccctttgctccctgctctttctgcctctgggctcatgtatctgcgcagctctggtaccctctgtgggtgccatctctacctctgacacagactgcctgccttgaagctgagaaggcacagggcaaggagccaaggaccacagagcctcagccagcccaggatccgtcctcattttattggtgatgatgaatgggaatgaaatcagggggctgtctactagagcctggaataaatatg

SEQ ID NO: 31000 - DNA, 2748 bp, Homo sapiens
  source 1..2748: mol_type = unassigned DNA
ggccctagcgccattttgtgggagcgaagcggtggctgggctgcgcttgggtccgtcgctgcttcggtgtccctgtcgggcttcccagcagcggcctagcgggaaaagtaaaagatgtctgaatatattcgggtaaccgaagatgagaacgatgagcccattgaaataccatcggaagacgatgggacggtgctgctctccacggttacagcccagtttccaggggcgtgtgggcttcgctacaggaatccagtgtctcagtgtatgagaggtgtccggctggtagaaggaattctgcatgccccagatgctggctggggaaatctggtgtatgttgtcaactatccaaaagataacaaaagaaaaatggatgagacagatgcttcatcagcagtgaaagtgaaaagagcagtccagaaaacatccgatttaatagtgttgggtctcccatggaaaacaaccgaacaggacctgaaagagtattttagtacctttggagaagttcttatggtgcaggtcaagaaagatcttaagactggtcattcaaaggggtttggctttgttcgttttacggaatatgaaacacaagtgaaagtaatgtcacagcgacatatgatagatggacgatggtgtgactgcaaacttcctaattctaagcaaagccaagatgagcctttgagaagcagaaaagtgtttgtggggcgctgtacagaggacatgactgaggatgagctgcgggagttcttctctcagtacggggatgtgatggatgtcttcatccccaagccattcagggcctttgcctttgttacatttgcagatgatcagattgcgcagtctctttgtggagaggacttgatcattaaaggaatcagcgttcatatatccaatgccgaacctaagcacaatagcaatagacagttagaaagaagtggaagatttggtggtaatccaggtggctttgggaatcagggtggatttggtaatagcagagggggtggagctggtttgggaaacaatcaaggtagtaatatgggtggtgggatgaactttggtgcgttcagcattaatccagccatgatggctgccgcccaggcagcactacagagcagttggggtatgatgggcatgttagccagccagcagaaccagtcaggcccatcgggtaataaccaaaaccaaggcaacatgcagagggagccaaaccaggccttcggttctggaaataactcttatagtggctctaattctggtgcagcaattggttggggatcagcatccaatgcagggtcgggcagtggttttaatggaggctttggctcaagcatggattctaagtcttctggctggggaatgtagacagtggggttgtggttggttggtatagaatggtgggaattcaaatttttctaaactcatggtaagtatattgtaaaatacatatgtactaagaattttcaaaattggtttgttcagtgtggagtatattcagcagtatttttgacatttttctttagaaaaaggaagagctaaaggaattttataagttttgttacatgaaaggttgaaatattgagtggttgaaagtgaactgctgtttgcctgattggtaaaccaacacactacaattgatatcaaaaggtttctcctgtaatattttatccctggacttgtcaagtgaattctttgcatgttcaaaacggaaaccattgattagaactacattctttaccccttgttttaatttgaaccccaccatatggatttttttccttaagaaaatctccttttaggagatcatggtgtcacagtgtttggttcttttgttttgttttttaacacttgtctcccctcatacacaaaagtacaatatgaagccttcatttaatctctgcagttcatctcatttcaaatgtttatggaagaagcacttcattgaaagtagtgctgtaaatattctgccataggaatactgtctacatgctttctcattcaagaattcgtcatcacgcatcacaggccgcgtctttgacggtgggtgtcccatttttatccgctactctttatttcatggagtcgtatcaacgctatgaacgcaaggctgtgatatggaaccagaaggctgtctgaacttttgaaaccttgtgtgggattgatggtggtgccgaggcatgaaaggctagtatgagcgagaaaaggagagagcgcgtgcagagacttggtggtgcataatggatattttttaacttggcgagatgtgtctctcaatcctgtggctttggtgagagagtgtgcagagagcaatgatagcaaataatgtacgaatgttttttgcattcaaaggacatccacatctgttggaagacttttaagtgagtttttgttcttagataacccacattagatgaatgtgttaagtgaaatgatacttgtactccccctacccctttgtcaactgctgtgaatgctgtatggtgtgtgttctcttctgttactgatatgtaagtgtggcaatgtgaactgaagctgatgggctgagaacatggactgagcttgtggtgtgctttgcaggaggacttgaagcagagttcaccagtgagctcaggtgtctcaaagaagggtggaagttctaatgtctgttagctacccataagaatgctgtttgctgcagttctgtgtcctgtgcttggatgctttttataagagttgtcattgttggaaattcttaaataaaactgatttaaataa

SEQ ID NO: 31001 - DNA, 1835 bp, Homo sapiens
  source 1..1835: mol_type = unassigned DNA
gaaaagtaaaagatgtctgaatatattcgggtaaccgaagatgagaacgatgagcccattgaaataccatcggaagacgatgggacggtgctgctctccacggttacagcccagtttccaggggcgtgtgggcttcgctacaggaatccagtgtctcagtgtatgagaggtgtccggctggtagaaggaattctgcatgccccagatgctggctggggaaatctggtgtatgttgtcaactatccaaaagataacaaaagaaaaatggatgagacagatgcttcatcagcagtgaaagtgaaaagagcagtccagaaaacatccgatttaatagtgttgggtctcccatggaaaacaaccgaacaggacctgaaagagtattttagtacctttggagaagttcttatggtgcaggtcaagaaagatcttaagactggtcattcaaaggggtttggctttgttcgttttacggaatatgaaacacaagtgaaagtaatgtcacagcgacatatgatagatggacgatggtgtgactgcaaacttcctaattctaagcaaagccaagatgagcctttgagaagcagaaaagtgtttgtggggcgctgtacagaggacatgactgaggatgagctgcgggagttcttctctcagtacggggatgtgatggatgtcttcatccccaagccattcagggcctttgcctttgttacatttgcagatgatcagattgcgcagtctctttgtggagaggacttgatcattaaaggaatcagcgttcatatatccaatgccgaacctaagcacaatagcaatagacagttagaaagaagtggaagatttggtgttcatctcatttcaaatgtttatggaagaagcacttcattgaaagtagtgctgtaaatattctgccataggaatactgtctacatgctttctcattcaagaattcgtcatcacgcatcacaggccgcgtctttgacggtgggtgtcccatttttatccgctactctttatttcatggagtcgtatcaacgctatgaacgcaaggctgtgatatggaaccagaaggctgtctgaacttttgaaaccttgtgtgggattgatggtggtgccgaggcatgaaaggctagtatgagcgagaaaaggagagagcgcgtgcagagacttggtggtgcataatggatattttttaacttggcgagatgtgtctctcaatcctgtggctttggtgagagagtgtgcagagagcaatgatagcaaataatgtacgaatgttttttgcattcaaaggacatccacatctgttggaagacttttaagtgagtttttgttcttagataacccacattagatgaatgtgttaagtgaaatgatacttgtactccccctacccctttgtcaactgctgtgaatgctgtatggtgtgtgttctcttctgttactgatatgtaagtgtggcaatgtgaactgaagctgatgggctgagaacatggactgagcttgtggtgtgctttgcaggaggacttgaagcagagttcaccagtgagctcaggtgtctcaaagaagggtggaagttctaatgtctgttagctacccataagaatgctgtttgctgcagttctgtgtcctgtgcttggatgctttttataagagttgtcattgttggaaattcttaaataaaactgatttaaataatatgtgtctttgttttgcagccctgaatgcaaagaattcatagcagttaattccccttttttgacccttttgagatggaactttcataaagtttcttggcagtagtttattttgcttcaaataaacttatttgaaaagtt

SEQ ID NO: 31002 - DNA, 1357 bp, Homo sapiens
  source 1..1357: mol_type = unassigned DNA
gcgcttgggtccgtcgctgcttcggtgtccctgtcgggcttcccagcagcggcctagcgggaaaagtaaaagatgtctgaatatattcgggtaaccgaagatgagaacgatgagcccattgaaataccatcggaagacgatgggacggtgctgctctccacggttacagcccagtttccaggggcgtgtgggcttcgctacaggaatccagtgtctcagtgtatgagaggtgtccggctggtagaaggaattctgcatgccccagatgctggctggggaaatctggtgtatgttgtcaactatccaaaaggtcaagaaagatcttaagactggtcattcaaaggggtttggctttgttcgttttacggaatatgaaacacaagtgaaagtaatgtcacagcgacatatgatagatggacgatggtgtgactgcaaacttcctaattctaagcaaagccaagatgagcctttgagaagcagaaaagtgtttgtggggcgctgtacagaggacatgactgaggatgagctgcgggagttcttctctcagtacggggatgtgatggatgtcttcatccccaagccattcagggcctttgcctttgttacatttgcagatgatcagattgcgcagtctctttgtggagaggacttgatcattaaaggaatcagcgttcatatatccaatgccgaacctaagcacaatagcaatagacagttagaaagaagtggaagatttggtggtaatccaggtggctttgggaatcagggtggatttggtaatagcagagggggtggagctggtttgggaaacaatcaaggtagtaatatgggtggtgggatgaactttggtgcgttcagcattaatccagccatgatggctgccgcccaggcagcactacagagcagttggggtatgatgggcatgttagccagccagcagaaccagtcaggcccatcgggtaataaccaaaaccaaggcaacatgcagagggagccaaaccaggccttcggttctggaaataactcttatagtggctctaattctggtgcagcaattggttggggatcagcatccaatgcagggtcgggcagtggttttaatggaggctttggctcaagcatggattctaagtcttctggctggggaatgtagacagtggggttgtggttggttggtatagaatggtgggaattcaaatttttctaaactcatggtaagtatattgtaaaatacatatgtactaagaattttcaaaattggtttgttcagtgtggagtatattcagcagtatttttgacatttttctttagaaaaaggaagagctaaaggaattttataagttttgttacatgaaag

SEQ ID NO: 31003 - DNA, 2389 bp, Homo sapiens
  source 1..2389: mol_type = unassigned DNA
cgctcttacaccctgggcagcctcctccgatggcccactccccgcctctttcactttctggagatcactgagctctccatcctctctgggaatttaccgatgcccagaacgcccttctttcccccacacgaccctctcctagtctaactcctgggcgtgctttaagctcagctcaggcagcgtcaccttctctggaaagcccaaacccagccaccccactacccgctacccgcggcccacgctgatgaagacagcagaacacggaggccccgcgttcccgccgcgagagcaggagagaaagattacctcccgcgagctctagcgcgcccggctttccggcgcactccagggggcgtggctcgggtccacccgggctgcgagccggcagcacaggccaataggcaattagcgcgcgccaggctgccttccccgcgccggacccgggacgtctgaacggaagttcgacccatcggcgacccgacggcgagaccccgccccatccccgactgcctgaaccgcgccaggagacggaccgcaagtccagcgtacccacagacgactcaggcgggagacgagcggtgtcatggccgccgacagtgacgatggcgcagtttcagctcccgcagcttccgacggtggtgtcagcaaaagcacaacatctggggaggagctagtagtccaggttcccgtagtggatgtgcaaagcaacaacttcaaggagatgtggccatccctcctgctagccataaagacagctaatttcgtggctgtggacacggagctgagtgggcttggggacaggaagagtttgctgaaccagtgcattgaggaacgttacaaggccgtgtgtcatgctgccaggacccgttctatcctttccctgggcctcgcctgcttcaagcggcagccagacaagggtgaacattcctatctggctcaagtgttcaatctcactctgctgtgcatggaggagtatgtcatagaaccaaagtctgtgcagttcctgatacagcatggcttcaacttcaaccagcagtatgcccaaggcatcccctaccataagggcaatgacaagggtgatgagagccagagccagtcagtacggaccctattcctggagctaatccgagcccgccggcccctggtgctacacaatggccttatagacttggtgttcctgtaccagaacttctatgcacacctccctgagagtctgggaaccttcaccgctgacctgtgtgagatgttcccagcaggcatttatgacaccaaatatgctgctgagtttcatgcccgtttcgtggcctcctacttagaatatgccttccggaaatgtgaacgggaaaatgggaagcagcgggcagctggcagcccacaccttaccctggagttctgcaactatccttccagcatgagggaccatattgattaccgctgctgcctgcccccagcaacccaccgtcctcatcccaccagcatctgtgacaacttctcggcttatggctggtgccccctgggaccacagtgtcctcagtctcacgatattgaccttatcattgacactgatgaggctgcggcagaggacaagcggcgacggcgacgacgtagggaaaaacggaagagggctttattgaacctaccggggacacagacctctggggaagctaaggatggtcctcccaagaagcaggtctgtggggatagcatcaagcctgaagaaaccgagcaggaggtggctgccgatgaaactaggaacctgcctcactccaagcaaggcaacaaaaatgacttagagatggggattaaggcagcaaggcctgaaatagctgatagagctacctcagaagtgccagggagccaagccagtcctaacccagtgcctggggatggattgcaccgggctggttttgatgcctttatgacaggttatgtgatggcctatgtggaagtgagccagggaccgcagccctgcagctctggaccctggctccctgaatgccacaataaggtatatttgagtggcaaagctgtacccctcacagtggccaagagccagttctctcgttcctccaaagcccacaatcagaagatgaagctcacttggggcagtagctgatgcaacttccaccttgctctcaggtggaacagaggtattttgggtctctctagcctgaaatgtcatcctcaactgctactgagtttaggggagggggaatgtcttgacagacatcactgcattgccctggaccgcctcctttatcccagtgtttgaggtacaagtaagaaggctgaccagcacctgtaacactgactttatttttaagtctgaaaatgtcttgggaaagttttacaaaaaaaaaaatcaacagaagcaagttatgaaaatatt

SEQ ID NO: 31004 - DNA, 1547 bp, Homo sapiens
  source 1..1547: mol_type = unassigned DNA
agcacaggccaataggcaattagcgcgcgccaggctgccttccccgcgccggacccgggacgtctgaacggaagttcgacccatcggcgacccgacggcgagaccccgccccatccccgactgcctgaaccgcgccaggagacggaccgcaagtccagcgtacccacagacgactcaggcgggagacgagcggtgtcatggccgccgacagtgacgatggcgcagtttcagctcccgcagcttccgacggagctgagtgggcttggggacaggaagagtttgctgaaccaggtgaacattcctatctggctcaagtgttcaatctcactctgctgtgcatggaggagtatgtcatagaaccaaagtctgtgcagttcctgatacagcatggcttcaacttcaaccagcagtatgcccaaggcatcccctaccataagggcaatgacaagggtgatgagagccagagccagtcagtacggaccctattcctggagctaatccgagcccgccggcccctggtgctacacaatggccttatagacttggtgttcctgtaccagaacttctatgcacacctccctgagagtctgggaaccttcaccgctgacctgtgtgagatgttcccagcaggcatttatgacaccaaatatgctgctgagtttcatgcccgtttcgtggcctcctacttagaatatgccttccggaaatgtgaacgggaaaatgggaagcagcgggcagctggcagcccacaccttaccctggagttctgcaactatccttccagcatgagggaccatattgattaccgctgctgcctgcccccagcaacccaccgtcctcatcccaccagcatctgtgacaacttctcggcttatggctggtgccccctgggaccacagtgtcctcagtctcacgatattgaccttatcattgacactgatgaggctgcggcagaggacaagcggcgacggcgacgacgtagggaaaaacggaagagggctttattgaacctaccggggacacagacctctggggaagctaaggatggtcctcccaagaagcaggtctgtggggatagcatcaagcctgaagaaaccgagcaggaggtggctgccgatgaaactaggaacctgcctcactccaagcaaggcaacaaaaatgacttagagatggggattaaggcagcaaggcctgaaatagctgatagagctacctcagaagtgccagggagccaagccagtcctaacccagtgcctggggatggattgcaccgggctggttttgatgcctttatgacaggttatgtgatggcctatgtggaagtgagccagggaccgcagccctgcagctctggaccctggctccctgaatgccacaataaggtatatttgagtggcaaagctgtacccctcacagtggccaagagccagttctctcgttcctccaaagcccacaatcagaagatgaagctcacttggggcagtagctgatgcaacttccaccttgctctcaggtggaacagaggtattttgggtctctctagcctg

SEQ ID NO: 31005 - DNA, 2352 bp, Homo sapiens
  source 1..2352: mol_type = unassigned DNA
gggcgggtgactacttccggtgcagtgaaggctcggggctgaagcggggtaattcctctcctgcaattacttttggatggaagtatgcccctttctcagtagaagatggtaatcttggagaatgaccatggagaaggggatgagttctggagaagggctgccttccagatcatctcaggtttcggctggtaaaataacagccaaagagttggaaacaaagcagtcctataaagagaaacgaggaggctttgtgttggtgcatgcaggtgcaggttatcattctgaatccaaagccaaggagtataaacatgtatgcaaacgagcttgtcagaaggcaattgaaaagctgcaggccggtgctcttgcaactgacgcagtcactgcagcactggtggaacttgaggattctccttttacaaatgcaggaatgggatctaatctaaatctgttaggtgaaattgagtgtgatgccagcataatggatggaaaatccttaaattttggagcagttggagcactgagtggaatcaagaacccagtctcggttgccaacagactcttatgtgaagggcagaagggcaagctctcggctggcagaattcctccctgctttttagttggagaaggagcctacagatgggcagtagatcatggaataccctcttgccctcctaacatcatgaccacaagattcagtttagctgcatttaaaagaaacaagaggaaactagagctggcagaaagggtggacacagattttatgcaactaaagaaaagaagacaatcaagtgagaaggaaaatgactcaggcactttggacacggtaggcgctgtggttgtggaccacgaagggaatgttgctgctgctgtctccagtggaggcttggccttgaaacatccggggagagttgggcaggctgctctttatggatgtggctgctgggctgaaaatactggagctcataacccctactccacagctgtgagtacctcaggatgtggagagcatcttgtgcgcaccatactggctagagaatgttcacatgctttacaagctgaggatgctcaccaagccctgttggagactatgcaaaacaagtttatcagttcacctttccttgccagtgaagatggcgtgcttggcggagtgattgtcctccgttcatgcagatgttctgccgagcctgactcctcccaaaataagcagacacttctagtggaatttctgtggagccacacgacggagagcatgtgtgtcggatatatgtcagcccaggatgggaaagccaagactcacatttcaagacttcctcctggtgcggtggcaggacagtctgtggcaatcgaaggtggggtgtgccgcctggagagcccagtgaactgacccttcaggctgagtgtgaagcgtctcagaggcatttcagaacctgagcttttgggggtttttaactgaagttggttgttttatctttcttgttttataattcctattgcaacctcgtgcactgctcgagacacaagtgctgctgtagttagcgcttagtgacacgcgggcctttggtgggtgagcgggactgtgtgtgagtgtgtgcgcgtatgtgcgcacatatgtgtatgtgtggagtatgtgtgtttgcttctccgtggatgaaatagaaactcctcattgtgtgaccaggaatggttaaatcatctttacaaaatgtgtgctttaactgtttacaagtaaaacctaaagttgcaggaaacattttttatttcgtaaagaggtaccaactgtcgctgatgtgatatgtcagaactgaagagtaaatctacttgtttaaatgacttgacagtggtagtgctccatttaataacagtaataagtaataaagtgtttttatttgttaaccagtttaagtggatcctgtggtaacttaaactgttgttctcatcccttatatggggcatttttctttaacaaagaatggtttcagtgaaacaatctagcagagaattaatgtcagaacctttttaaataatagtctgattgatacagtttgtacttatttcatcaagcttttctaagcttaaatattgcatagcttcgagctgtatggactatattatgaaagaatatgtaaagagaacatacagtaatgcacagtccttaatttgtgtataatggaaagttatttacaatataacactgtaaataagaaagcaaagtttatgggaaaattcaatattatctttgtttttgtttaaatatatttttaagataaaggcacaaaaataaaagaagcgtattactgggtatagtatgtgactcctcttctcagactaataaattatcttttgaatccttgg

SEQ ID NO: 31006 - DNA, 2281 bp, Homo sapiens
  source 1..2281: mol_type = unassigned DNA
gggtgactacttccggtgcagtgaaggctcggggctgaagcggggtaattcctctcctgcaattacttttggatggaagtatgcccctttctcagtagaagatggtaatcttggagaatgaccatggagaaggggatgagttctggagaagggctgccttccagatcatctcaggtttcggctggtaaaataacagccaaagagttggaaacaaagcagtcctataaagagaaacgaggaggctttgtgttggtgcatgcaggtgcaggttatcattctgaatccaaagccaaggagtataaacatgtatgcaaacgagcttgtcagaaggattctccttttacaaatgcaggaatgggatctaatctaaatctgttaggtgaaattgagtgtgatgccagcataatggatggaaaatccttaaattttggagcagttggagcactgagtggaatcaagaacccagtctcggttgccaacagactcttatgtgaagggcagaagggcaagctctcggctggcagaattcctccctgctttttagttggagaaggagcctacagatgggcagtagatcatggaataccctcttgccctcctaacatcatgaccacaagattcagtttagctgcatttaaaagaaacaagaggaaactagagctggcagaaagggtggacacagattttatgcaactaaagaaaagaagacaatcaagtgagaaggaaaatgactcaggcactttggacacggtaggcgctgtggttgtggaccacgaagggaatgttgctgctgctgtctccagtggaggcttggccttgaaacatccggggagagttgggcaggctgctctttatggatgtggctgctgggctgaaaatactggagctcataacccctactccacagctgtgagtacctcaggatgtggagagcatcttgtgcgcaccatactggctagagaatgttcacatgctttacaagctgaggatgctcaccaagccctgttggagactatgcaaaacaagtttatcagttcacctttccttgccagtgaagatggcgtgcttggcggagtgattgtcctccgttcatgcagatgttctgccgagcctgactcctcccaaaataagcagacacttctagtggaatttctgtggagccacacgacggagagcatgtgtgtcggatatatgtcagcccaggatgggaaagccaagactcacatttcaagacttcctcctggtgcggtggcaggacagtctgtggcaatcgaaggtggggtgtgccgcctggagagcccagtgaactgacccttcaggctgagtgtgaagcgtctcagaggcatttcagaacctgagcttttgggggtttttaactgaagttggttgttttatctttcttgttttataattcctattgcaacctcgtgcactgctcgagacacaagtgctgctgtagttagcgcttagtgacacgcgggcctttggtgggtgagcgggactgtgtgtgagtgtgtgcgcgtatgtgcgcacatatgtgtatgtgtggagtatgtgtgtttgcttctccgtggatgaaatagaaactcctcattgtgtgaccaggaatggttaaatcatctttacaaaatgtgtgctttaactgtttacaagtaaaacctaaagttgcaggaaacattttttatttcgtaaagaggtaccaactgtcgctgatgtgatatgtcagaactgaagagtaaatctacttgtttaaatgacttgacagtggtagtgctccatttaataacagtaataagtaataaagtgtttttatttgttaaccagtttaagtggatcctgtggtaacttaaactgttgttctcatcccttatatggggcatttttctttaacaaagaatggtttcagtgaaacaatctagcagagaattaatgtcagaacctttttaaataatagtctgattgatacagtttgtacttatttcatcaagcttttctaagcttaaatattgcatagcttcgagctgtatggactatattatgaaagaatatgtaaagagaacatacagtaatgcacagtccttaatttgtgtataatggaaagttatttacaatataacactgtaaataagaaagcaaagtttatgggaaaattcaatattatctttgtttttgtttaaatatatttttaagataaaggcacaaaaataaaagaagcgtattactgggtatagtatgtgactcctcttctcagactaataaattatcttttgaatccttggtt

SEQ ID NO: 31007 - DNA, 426 bp, Homo sapiens
  source 1..426: mol_type = unassigned DNA
gtaaaataacagccaaagagttggaaacaaagcagtcctataaagagaaacgaggaggctttgtgttggtgcatgcaggtgcaggttatcattctgaatccaaagccaaggagtataaacatgtatgcaaacgagcttgtcagaaggcaattgaaaagctgcaggccggtgctcttgcaactgacgcagtcactgcagcactggtggaacttgagctcatgtggaaaggacaatttcaggtactgtgtgtgctaactaacctcttcctggacatcataaagaatccaactaaaacaaagtttaaaactatttcaaatgtgaaagtttattgaagccaatattctattttagagatttgtgttatgtttttgacaagtaactgtactgtaattatgtggctttcaattaaaaaatgtgaaaactgtt

SEQ ID NO: 31008 - DNA, 1000 bp, Homo sapiens
  source 1..1000: mol_type = unassigned DNA
gctgaagcggggtaattcctctcctgcaattacttttggatggaagtatgcccctttctcagtagaagatggtaatcttggagaatgaccatggagaaggggatgagttctggagaagggctgccttccagatcatctcaggtttcggctggtaaaataacagccaaagagttggaaacaaagcagtcctataaagagaaacgaggaggctttgtgttggtgcatgcaggtgcaggttatcattctgaatccaaagccaaggagtataaacatgtatgcaaacgagcttgtcagaaggattctccttttacaaatgcaggaatgggatctaatctaaatctgttaggtgaaattgagtgtgatgccagcataatggatggaaaatccttaaattttggagcagttggagcactgagtggaatcaagaacccagtctcggttgccaacagactcttatgtgaagggcagaagggcaagctctcggctggcagaattcctccctgctttttagttggagaaggagcctacagatgggcagtagatcatggaataccctcttgccctcctaacatcatgaccacaagattcagtttagctgcatttaaaagaaacaagaggaaactagagctggcagaaagggtggacacagattttatgcaactaaagaaaagaagacaatcaagtgagaaggaaaatgactcaggcactttggacacggtaggcgctgtggttgtggaccacgaagggaatgttgctgctgctgtctccagtggaggcttggccttgaaacatccggggagagttgggcaggctgctctttatggatgtggctgctgggctgaaaatactggagctcataacccctactccacagctgtgagtacctcaggatgtggagagcatcttgtgcgcaccatactggctagagaatgttcacatgctttacaagctgaggatgctcaccaagccctgttggagactatgcaaaacaagtttatca

SEQ ID NO: 31009 - DNA, 952 bp, Homo sapiens
  source 1..952: mol_type = unassigned DNA
acttccggtgcagtgaaggctcggggctgaagcggggtaattcctctcctgcaattacttttggatggaagtatgcccctttctcagtagaagatggtaatcttggagaatgaccatggagaaggggatgagttctggagaagggctgccttccagatcatctcaggtttcggctggtaaaataacagccaaagagttggaaacaaagcagtcctataaagagaaacgaggaggctttgtgttggtgcatgcaggtgcaggttatcattctgaatccaaagccaaggagtataaacatgtatgcaaacgagcttgtcagaaggcaattgaaaagctgcaggccggtgctcttgcaactgacgcagtcactgcagcactggtggaacttgaggatgtggagagcatcttgtgcgcaccatactggctagagaatgttcacatgctttacaagctgaggatgctcaccaagccctgttggagactatgcaaaacaagtttatcagttcacctttccttgccagtgaagatggcgtgcttggcggagtgattgtcctccgttcatgcagatgttctgccgagcctgactcctcccaaaataagcagacacttctagtggaatttctgtggagccacacgacggagagcatgtgtgtcggatatatgtcagcccaggatgggaaagccaagactcacatttcaagacttcctcctggtgcggtggcaggacagtctgtggcaatcgaagttggccagcgcagaagcttattgaatttatttaccttttcagagtttccctttaagcactacttttgcctcatcctacaaattttggtggctgtggacctggcaaaaactacatttcccagcatccacttcatctgagtgcgaccatatgacacaattctgccccatgaggagtaagtggaaggttctggacagaactgctgcaaag

SEQ ID NO: 31010 - DNA, 900 bp, Homo sapiens
  source 1..900: mol_type = unassigned DNA
agtgaaggctcggggctgaagcggggtaattcctctcctgcaattacttttggatggaagtatgcccctttctcagtagaagatggtaatcttggagaatgaccatggagaaggggatgagttctggagaagggctgccttccagatcatctcaggtttcggctggtaaaataacagccaaagagttggaaacaaagcagtcctataaagagaaacgaggaggctttgtgttggtgcatgcaggtgcaggttatcattctgaatccaaagccaaggagtataaacatgtatgcaaacgagcttgtcagaaggcaattgaaaagctgcaggccggtgctcttgcaactgacgcagtcactgcagcactggtggaacttgaggtgtacacacacagttacacttcatggagttgcatccagccaagtatccatgtccttcttgtgaagaggcagagaaaatcacctctcccaagaatttccaccttctgaacaagggaaatgtatcctgaagagctgtacgcagatgggaggcaacttgtttgcttgttctgctgctagagcattgatttaattagaagacaggctgtgggtggccatgtgcagacaaagaagcaccagacagagcccatttagcctgggacagtaaaagtaagttacactctttttaaaacacttttttgagtactgatgctgattcttgcctttagtactaaggggcaacttgtaacttactgtttgtgtttacacatagatacatccgttctttttctgagaccctagaaatgacacatgctctctagcacaaagtacctgcttaatggaaaagcagtgatttcttccccaactgcccttttttttttttaaagaataaaaagaaaacggaatcaatgattacattcta

SEQ ID NO: 31011 - DNA, 2426 bp, Homo sapiens
  source 1..2426: mol_type = unassigned DNA
gaagttaggaagcatccggcagctgccttctatttaagcaactggcctccttagaggccactccttggccatgccaggcgcgggcatctggccagcatgctgctctgcacggctcgcctggtcggcctgcagcttctcatttcctgctgctgggcctttgcctgccatagcacggagtcttctcctgacttcaccctccccggagattacctcctggcaggcctgttccctctccattctggctgtctgcaggtgaggcacagacccgaggtgaccctgtgtgacaggtcttgtagcttcaatgagcatggctaccacctcttccaggctatgcggcttggggttgaggagataaacaactccacggccctgctgcccaacatcaccctggggtaccagctgtatgatgtgtgttctgactctgccaatgtgtatgccacgctgagagtgctctccctgccagggcaacaccacatagagctccaaggagaccttctccactattcccctacggtgctggcagtgattgggcctgacagcaccaaccgtgctgccaccacagccgccctgctgagccctttcctggtgcccatgattagctatgcggccagcagcgagacgctcagcgtgaagcggcagtatccctctttcctgcgcaccatccccaatgacaagtaccaggtggagaccatggtgctgctgctgcagaagttcgggtggacctggatctctctggttggcagcagtgacgactatgggcagctaggggtgcaggcactggagaaccaggccactggtcaggggatctgcattgctttcaaggacatcatgcccttctctgcccaggtgggcgatgagaggatgcagtgcctcatgcgccacctggcccaggccggggccaccgtcgtggttgttttttccagccggcagttggccagggtgtttttcgagtccgtggtgctgaccaacctgactggcaaggtgtgggtcgcctcagaagcctgggccctctccaggcacatcactggggtgcccgggatccagcgcattgggatggtgctgggcgtggccatccagaagagggctgtccctggcctgaaggcgtttgaagaagcctatgcccgggcagacaagaaggcccctaggccttgccacaagggctcctggtgcagcagcaatcagctctgcagagaatgccaagctttcatggcacacacgatgcccaagctcaaagccttctccatgagttctgcctacaacgcataccgggctgtgtatgcggtggcccatggcctccaccagctcctgggctgtgcctctggagcttgttccaggggccgagtctacccctggcagacctctacagatgccagccttgtgggaaagaagagtgggcacctgagggaagccagacctgcttcccgcgcactgtggtgtttttggctttgcgtgagcacacctcttgggtgctgctggcagctaacacgctgctgctgctgctgctgcttgggactgctggcctgtttgcctggcacctagacacccctgtggtgaggtcagcagggggccgcctgtgctttcttatgctgggctccctggcagcaggtagtggcagcctctatggcttctttggggaacccacaaggcctgcgtgcttgctacgccaggccctctttgcccttggtttcaccatcttcctgtcctgcctgacagttcgctcattccaactaatcatcatcttcaagttttccaccaaggtacctacattctaccacgcctgggtccaaaaccacggtgctggcctgtttgtgatgatcagctcagcggcccagctgcttatctgtctaacttggctggtggtgtggaccccactgcctgctagggaataccagcgcttcccccatctggtgatgcttgagtgcacagagaccaactccctgggcttcatactggccttcctctacaatggcctcctctccatcagtgcctttgcctgcagctacctgggtaaggacttgccagagaactacaacgaggccaaatgtgtcaccttcagcctgctcttcaacttcgtgtcctggatcgccttcttcaccacggccagcgtctacgacggcaagtacctgcctgcggccaacatgatggctgggctgagcagcctgagcagcggcttcggtgggtattttctgcctaagtgctacgtgatcctctgccgcccagacctcaacagcacagagcacttccaggcctccattcaggactacacgaggcgctgcggctccacctgaccagtgggtcagcaggcacggctggcagccttctctgccctgagggtcgaaggtcgagcaggccgggggtgtccgggaggtctttgggcatcgcggtctggggttgggacgtgtaagcgcctgggagagcctagacca

SEQ ID NO: 31012 - DNA, 2892 bp, Homo sapiens
  source 1..2892: mol_type = unassigned DNA
cctgcccagttcctgagtgggaccgcaggcccggaatgtcaaggcaaacagtcctgcttcagccactgggctccagtcccaccccttttgggggcctgaagttaggaagcatccggcagctgccttctatttaagcaactggcctccttagaggccactccttggccatgccaggcgcgggcatctggccagcatgctgctctgcacggctcgcctggtcggcctgcagcttctcatttcctgctgctgggcctttgcctgccatagcacggagtcttctcctgacttcaccctccccggagattacctcctggcaggcctgttccctctccattctggctgtctgcaggtgaggcacagacccgaggtgaccctgtgtgacaggtcttgtagcttcaatgagcatggctaccacctcttccaggctatgcggcttggggttgaggagataaacaactccacggccctgctgcccaacatcaccctggggtaccagctgtatgatgtgtgttctgactctgccaatgtgtatgccacgctgagagtgctctccctgccagggcaacaccacatagagctccaaggagaccttctccactattcccctacggtgctggcagtgattgggcctgacagcaccaaccgtgctgccaccacagccgccctgctgagccctttcctggtgcccatgattagctatgcggccagcagcgagacgctcagcgtgaagcggcagtatccctctttcctgcgcaccatccccaatgacaagtaccaggtggagaccatggtgctgctgctgcagaagttcgggtggacctggatctctctggttggcagcagtgacgactatgggcagctaggggtgcaggcactggagaaccaggccactggtcaggggatctgcattgctttcaaggacatcatgcccttctctgcccaggtgggcgatgagaggatgcagtgcctcatgcgccacctggcccaggccggggccaccgtcgtggttgttttttccagccggcagttggccagggtgtttttcgagtccgtggtgctgaccaacctgactggcaaggtgtgggtcgcctcagaagcctgggccctctccaggcacatcactggggtgcccgggatccagcgcattgggatggtgctgggcgtggccatccagaagagggctgtccctggcctgaaggcgtttgaagaagcctatgcccgggcagacaagaaggcccctaggccttgccacaagggctcctggtgcagcagcaatcagctctgcagagaatgccaagctttcatggcacacacgatgcccaagctcaaagccttctccatgagttctgcctacaacgcataccgggctgtgtatgcggtggcccatggcctccaccagctcctgggctgtgcctctggagcttgttccaggggccgagtctacccctggcagcttttggagcagatccacaaggtgcatttccttctacacaaggacactgtggcgtttaatgacaacagagatcccctcagtagctataacataattgcctgggactggaatggacccaagtggaccttcacggtcctcggttcctccacatggtctccagttcagctaaacataaatgagaccaaaatccagtggcacggaaaggacaaccaggtgcctaagtctgtgtgttccagcgactgtcttgaagggcaccagcgagtggttacgggtttccatcactgctgctttgagtgtgtgccctgtggggctgggaccttcctcaacaagagtgacctctacagatgccagccttgtgggaaagaagagtgggcacctgagggaagccagacctgcttcccgcgcactgtggtgtttttggctttgcgtgagcacacctcttgggtgctgctggcagctaacacgctgctgctgctgctgctgcttgggactgctggcctgtttgcctggcacctagacacccctgtggtgaggtcagcagggggccgcctgtgctttcttatgctgggctccctggcagcaggtagtggcagcctctatggcttctttggggaacccacaaggcctgcgtgcttgctacgccaggccctctttgcccttggtttcaccatcttcctgtcctgcctgacagttcgctcattccaactaatcatcatcttcaagttttccaccaaggtacctacattctaccacgcctgggtccaaaaccacggtgctggcctgtttgtgatgatcagctcagcggcccagctgcttatctgtctaacttggctggtggtgtggaccccactgcctgctagggaataccagcgcttcccccatctggtgatgcttgagtgcacagagaccaactccctgggcttcatactggccttcctctacaatggcctcctctccatcagtgcctttgcctgcagctacctgggtaaggacttgccagagaactacaacgaggccaaatgtgtcaccttcagcctgctcttcaacttcgtgtcctggatcgccttcttcaccacggccagcgtctacgacggcaagtacctgcctgcggccaacatgatggctgggctgagcagcctgagcagcggcttcggtgggtattttctgcctaagtgctacgtgatcctctgccgcccagacctcaacagcacagagcacttccaggcctccattcaggactacacgaggcgctgcggctccacctgaccagtgggtcagcaggcacggctggcagccttctctgccctgagggtcgaaggtcgagcaggccgggggtgtccgggaggtctttgggcatcgcggtctggggttgggacgtgtaagcgcctgggagagcctagaccaggctccgggctgccaataaagaagtgaaatgcgta

SEQ ID NO: 31013 - DNA, 1871 bp, Homo sapiens
  source 1..1871: mol_type = unassigned DNA
atttaagcaactggcctccttagaggccactccttggccatgccaggcgcgggcatctggccagcatgctgctctgcacggctcgcctggtcggcctgcagcttctcatttcctgctgctgggcctttgcctgccatagcacggagtcttctcctgacttcaccctccccggagattacctcctggcaggcctgttccctctccattctggctgtctgcaggtgaggcacagacccgaggtgaccctgtgtgacaggtcttgtagcttcaatgagcatggctaccacctcttccaggctatgcggcttggggttgaggagataaacaactccacggccctgctgcccaacatcaccctggggtaccagctgtatgatgtgtgttctgactctgccaatgtgtatgccacgctgagagtgctctccctgccagggcaacaccacatagagctccaaggagaccttctccactattcccctacggtgctggcagtgattgggcctgacagcaccaaccgtgctgccaccacagccgccctgctgagccctttcctggtgcccatgcttttggagcagatccacaaggtgcatttccttctacacaaggacactgtggcgtttaatgacaacagagatcccctcagtagctataacataattgcctgggactggaatggacccaagtggaccttcacggtcctcggttcctccacatggtctccagttcagctaaacataaatgagaccaaaatccagtggcacggaaaggacaaccaggtgcctaagtctgtgtgttccagcgactgtcttgaagggcaccagcgagtggttacgggtttccatcactgctgctttgagtgtgtgccctgtggggctgggaccttcctcaacaagagtgacctctacagatgccagccttgtgggaaagaagagtgggcacctgagggaagccagacctgcttcccgcgcactgtggtgtttttggctttgcgtgagcacacctcttgggtgctgctggcagctaacacgctgctgctgctgctgctgcttgggactgctggcctgtttgcctggcacctagacacccctgtggtgaggtcagcagggggccgcctgtgctttcttatgctgggctccctggcagcaggtagtggcagcctctatggcttctttggggaacccacaaggcctgcgtgcttgctacgccaggccctctttgcccttggtttcaccatcttcctgtcctgcctgacagttcgctcattccaactaatcatcatcttcaagttttccaccaaggtacctacattctaccacgcctgggtccaaaaccacggtgctggcctgtttgtgatgatcagctcagcggcccagctgcttatctgtctaacttggctggtggtgtggaccccactgcctgctagggaataccagcgcttcccccatctggtgatgcttgagtgcacagagaccaactccctgggcttcatactggccttcctctacaatggcctcctctccatcagtgcctttgcctgcagctacctgggtaaggacttgccagagaactacaacgaggccaaatgtgtcaccttcagcctgctcttcaacttcgtgtcctggatcgccttcttcaccacggccagcgtctacgacggcaagtacctgcctgcggccaacatgatggctgggctgagcagcctgagcagcggcttcggtgggtattttctgcctaagtgctacgtgatcctctgccgcccagacctcaacagcacagagcacttccaggcctccattcaggactacacgaggcgctgcggctccacctgaccagtgggtcagcaggcacggctggcagccttctctgccctg

SEQ ID NO: 31014 - DNA, 1251 bp, Homo sapiens
  source 1..1251: mol_type = unassigned DNA
gaagttaggaagcatccggcagctgccttctatttaagcaactggcctccttagaggccactccttggccatgccaggcgcgggcatctggccagcatgctgctctgcacggctcgcctggtcggcctgcagcttctcatttcctgctgctgggcctttgcctgccatagcacggagtcttctcctgacttcaccctccccggagattacctcctggcaggcctgttccctctccattctggctgtctgcaggtgaggcacagacccgaggtgaccctgtgtgacaggtcttgtagcttcaatgagcatggctaccacctcttccaggctatgcggcttggggttgaggagataaacaactccacggccctgctgcccaacatcaccctggggtaccagctgtatgatgtgtgttctgactctgccaatgtgtatgccacgctgagagtgctctccctgccagggcaacaccacatagagctccaaggagaccttctccactattcccctacggtgctggcagtgattgggcctgacagcaccaaccgtgctgccaccacagccgccctgctgagccctttcctggtgcccatgcttttggagcagatccacaaggtgcatttccttctacacaaggacactgtggcgtttaatgacaacagagatcccctcagtagctataacataattgcctgggactggaatggacccaagtggaccttcacggtcctcggttcctccacatggtctccagttcagctaaacataaatgagaccaaaatccagtggcacggaaaggacaaccaggtgcctaagtctgtgtgttccagcgactgtcttgaagggcaccagcgagtggttacgggtttccatcactgctgctttgagtgtgtgccctgtggggctgggaccttcctcaacaagagtgacctctacagatgccagccttgtgggaaagaagagtgggcacctgagggaagccagacctgcttcccgcgcactgtggtgtttttggctttgcgtgagcacacctcttgggtgctgctggcagctaacacgctgctgctgctgctgctgcttgggactgctggcctgtttgcctggcacctagacacccctgtggtgaggtcagcagggggccgcctgtgctttcttatgctgggctccctggcagcaggtagtggcagcctctatggcttctttggggagccctctttgcccttggtttcaccatcttcctgtcctgcctga

SEQ ID NO: 31015 - DNA, 2542 bp, Homo sapiens
  source 1..2542: mol_type = unassigned DNA
ctgagaccatcacttcccagccatggggcccagggcaaagaccatctcctccctgttcttcctcctatgggtcctggctgagccggctgagaactcggacttctacctgcctggggattacctcctgggtggcctcttctccctccatgccaacatgaagggcattgttcaccttaacttcctgcaggtgcccatgtgcaaggagtatgaagtgaaggtgataggctacaacctcatgcaggccatgcgctttgcggtggaggagatcaacaatgacagcagcctgctgcctggtgtgctgctgggctatgagatcgtggatgtgtgctacatctccaacaatgtccagccggtgctctacttcctggcacacgaggacaacctccttcccatccaagaggactacagtaactacatttcccgtgtggtggctgtcattggccctgacaactccgagtctgtcatgactgtggccaacttcctctccctatttctccttccacagatcacctacagcgccatcagcgatgagctgcgagacaaggtgcgcttcccggctttgctgcgtaccacacccagcgccgaccaccacatcgaggccatggtgcagctgatgctgcacttccgctggaactggatcattgtgctggtgagcagcgacacctatggccgcgacaatggccagctgcttggcgagcgcgtggcccggcgcgacatctgcatcgccttccaggagacgctgcccacactgcagcccaaccagaacatgacgtcagaggagcgccagcgcctggtgaccattgtggacaagctgcagcagagcacagcgcgcgtcgtggtcgtgttctcgcccgacctgaccctgtaccacttcttcaatgaggtgctgcgccagaacttcactggcgccgtgtggatcgcctccgagtcctgggccatcgacccggtcctgcacaacctcacggagctgcgccacttgggcaccttcctgggcatcaccatccagagcgtgcccatcccgggcttcagtgagttccgcgagtggggcccacaggctgggccgccacccctcagcaggaccagccagagctatacctgcaaccaggagtgcgacaactgcctgaacgccaccttgtccttcaacaccattctcaggctctctggggagcgtgtcgtctacagcgtgtactctgcggtctatgctgtggcccatgccctgcacagcctcctcggctgtgacaaaagcacctgcaccaagagggtggtctacccctggcagctgcttgaggagatctggaaggtcaacttcactctcctggaccaccaaatcttcttcgacccgcaaggggacgtggctctgcacttggagattgtccagtggcaatgggaccggagccagaatcccttccagagcgtcgcctcctactaccccctgcagcgacagctgaagaacatccaagacatctcctggcacaccatcaacaacacgatccctatgtccatgtgttccaagaggtgccagtcagggcaaaagaagaagcctgtgggcatccacgtctgctgcttcgagtgcatcgactgccttcccggcaccttcctcaaccacactgaagatgaatatgaatgccaggcctgcccgaataacgagtggtcctaccagagtgagacctcctgcttcaagcggcagctggtcttcctggaatggcatgaggcacccaccatcgctgtggccctgctggccgccctgggcttcctcagcaccctggccatcctggtgatattctggaggcacttccagacacccatagttcgctcggctgggggccccatgtgcttcctgatgctgacactgctgctggtggcatacatggtggtcccggtgtacgtggggccgcccaaggtctccacctgcctctgccgccaggccctctttcccctctgcttcacaatctgcatctcctgtatcgccgtgcgttctttccagatcgtctgcgccttcaagatggccagccgcttcccacgcgcctacagctactgggtccgctaccaggggccctacgtctctatggcatttatcacggtactcaaaatggtcattgtggtaattggcatgctggccacgggcctcagtcccaccacccgtactgaccccgatgaccccaagatcacaattgtctcctgtaaccccaactaccgcaacagcctgctgttcaacaccagcctggacctgctgctctcagtggtgggtttcagcttcgcctacatgggcaaagagctgcccaccaactacaacgaggccaagttcatcaccctcagcatgaccttctatttcacctcatccgtctccctctgcaccttcatgtctgcctacagcggggtgctggtcaccatcgtggacctcttggtcactgtgctcaacctcctggccatcagcctgggctacttcggccccaagtgctacatgatcctcttctacccggagcgcaacacgcccgcctacttcaacagcatgatccagggctacaccatgaggagggactag

SEQ ID NO: 31016 - DNA, 3433 bp, Homo sapiens
  source 1..3433: mol_type = unassigned DNA
acctgccgtgcctgttggaagttgcctctgccatgctgggccctgctgtcctgggcctcagcctctgggctctcctgcaccctgggacgggggccccattgtgcctgtcacagcaacttaggatgaagggggactacgtgctgggggggctgttccccctgggcgaggccgaggaggctggcctccgcagccggacacggcccagcagccctgtgtgcaccaggttctcctcaaacggcctgctctgggcactggccatgaaaatggccgtggaggagatcaacaacaagtcggatctgctgcccgggctgcgcctgggctacgacctctttgatacgtgctcggagcctgtggtggccatgaagcccagcctcatgttcctggccaaggcaggcagccgcgacatcgccgcctactgcaactacacgcagtaccagccccgtgtgctggctgtcatcgggccccactcgtcagagctcgccatggtcaccggcaagttcttcagcttcttcctcatgccccaggtcagctacggtgctagcatggagctgctgagcgcccgggagaccttcccctccttcttccgcaccgtgcccagcgaccgtgtgcagctgacggccgccgcggagctgctgcaggagttcggctggaactgggtggccgccctgggcagcgacgacgagtacggccggcagggcctgagcatcttctcggccctggccgcggcacgcggcatctgcatcgcgcacgagggcctggtgccgctgccccgtgccgatgactcgcggctggggaaggtgcaggacgtcctgcaccaggtgaaccagagcagcgtgcaggtggtgctgctgttcgcctccgtgcacgccgcccacgccctcttcaactacagcatcagcagcaggctctcgcccaaggtgtgggtggccagcgaggcctggctgacctctgacctggtcatggggctgcccggcatggcccagatgggcacggtgcttggcttcctccagaggggtgcccagctgcacgagttcccccagtacgtgaagacgcacctggccctggccaccgacccggccttctgctctgccctgggcgagagggagcagggtctggaggaggacgtggtgggccagcgctgcccgcagtgtgactgcatcacgctgcagaacgtgagcgcagggctaaatcaccaccagacgttctctgtctacgcagctgtgtatagcgtggcccaggccctgcacaacactcttcagtgcaacgcctcaggctgccccgcgcaggaccccgtgaagccctggcagctcctggagaacatgtacaacctgaccttccacgtgggcgggctgccgctgcggttcgacagcagcggaaacgtggacatggagtacgacctgaagctgtgggtgtggcagggctcagtgcccaggctccacgacgtgggcaggttcaacggcagcctcaggacagagcgcctgaagatccgctggcacacgtctgacaaccagaagcccgtgtcccggtgctcgcggcagtgccaggagggccaggtgcgccgggtcaaggggttccactcctgctgctacgactgtgtggactgcgaggcgggcagctaccggcaaaacccagacgacatcgcctgcaccttttgtggccaggatgagtggtccccggagcgaagcacacgctgcttccgccgcaggtctcggttcctggcatggggcgagccggctgtgctgctgctgctcctgctgctgagcctggcgctgggccttgtgctggctgctttggggctgttcgttcaccatcgggacagcccactggttcaggcctcgggggggcccctggcctgctttggcctggtgtgcctgggcctggtctgcctcagcgtcctcctgttccctggccagcccagccctgcccgatgcctggcccagcagcccttgtcccacctcccgctcacgggctgcctgagcacactcttcctgcaggcggccgagatcttcgtggagtcagaactgcctctgagctgggcagaccggctgagtggctgcctgcgggggccctgggcctggctggtggtgctgctggccatgctggtggaggtcgcactgtgcacctggtacctggtggccttcccgccggaggtggtgacggactggcacatgctgcccacggaggcgctggtgcactgccgcacacgctcctgggtcagcttcggcctagcgcacgccaccaatgccacgctggcctttctctgcttcctgggcactttcctggtgcggagccagccgggctgctacaaccgtgcccgtggcctcacctttgccatgctggcctacttcatcacctgggtctcctttgtgcccctcctggccaatgtgcaggtggtcctcaggcccgccgtgcagatgggcgccctcctgctctgtgtcctgggcatcctggctgccttccacctgcccaggtgttacctgctcatgcggcagccagggctcaacacccccgagttcttcctgggagggggccctggggatgcccaaggccagaatgacgggaacacaggaaatcaggggaaacatgagtgacccaaccctgtgatctcagccccggtgaacccagacttagctgcgatcccccccaagccagcaatgacccgtgtctcgctacagagaccctcccgctctaggttctgaccccaggttgtctcctgaccctgaccccacagtgagccctaggcctggagcacgtggacacccctgtgaccatctgggccccagagccaagctgtgtccctgtccctctgtgcccagaccaggcctgcccaggtaacccagacccactgttctggaaagaggcccggagggctcccagggtacccgcaacccacaccgtgagctcaggaaaaggacgcagggaggccccggccagatggctggaagcccaaatcaggccctgccgacctgaccatgtcccaccagggcccccatcctgcaccctgccaggcaccacagcagtgggaggccaggtgggggcacacaggcatatgcccagggcagagcccgccgaggtaggggtggcacccagcttcctactctgccctttgcccagtgggtagacagcatcatgactgtcaccagtaccagggacagagcccaggtggggtgggggcggggtccagcaccacggccagcaccgaccaccaggaccccggagccagcaccatggacagaaaactgcccaccaggatctgacgccagcacgccgccaggcccacacagggtctccggtcagagtcccagggtcagctcccagcagggcctaggggaggctggaccagctccctgtgcctcattccaaggcagcccagccggagagaaggggcacaggccacacatctgtcccataaaattaaacgctttttagtgtt

SEQ ID NO: 31017 - DNA, 996 bp, Homo sapiens
  source 1..996: mol_type = unassigned DNA
tctctacctggaaattggtacagagattcagagtctttgtccaggaagacactttggagtagaagaatgatacccatccaactcactgtcttcttcatgatcatctatgtgcttgagtccttgacaattattgtgcagagcagcctaattgttgcagtgctgggcagagaatggctgcaagtcagaaggctgatgcctgtggacatgattctcatcagcctgggcatctctcgcttctgtctacagtgggcatcaatgctgaacaatttttgctcctattttaatttgaattatgtactttgcaacttaacaatcacctgggaattttttaatatccttacattctggttaaacagcttgcttaccgtgttctactgcatcaaggtctcttctttcacccatcacatctttctctggctgaggtggagaattttgaggttgtttccctggatattactgggttctctgatgattacttgtgtaacaatcatcccttcagctattgggaattacattcaaattcagttactcaccatggagcatctaccaagaaacagcactgtaactgacaaacttgaaaattttcatcagtatcagttccaggctcatacagttgcattggttattcctttcatcctgttcctggcctccaccatctttctcatggcatcactgaccaagcagatacaacatcatagcactggtcactgcaatccaagcatgaaagcgcgcttcactgccctgaggtcccttgccgtcttatttattgtgtttacctcttactttctaaccatactcatcaccattataggtactctatttgataagagatgttggttatgggtctgggaagcttttgtctatgctttcatcttaatgcattccacttcactgatgctgagcagccctacgttgaaaaggattctaaagggaaagtgctaggcctagaggttgcctgaggcacaggataaaagactcccgagcaattgatataat

SEQ ID NO: 31018 - DNA, 1002 bp, Homo sapiens
  source 1..1002: mol_type = unassigned DNA
ggactcagaacaagtgttactaagcctgcatttttttatctgttcaaacatgatgtgttttctgctcatcatttcatcaattctggtagtgtttgcatttgttcttggaaatgttgccaatggcttcatagccctagtaaatgtcattgactgggttaacacacgaaagatctcctcagctgagcaaattctcactgctctggtggtctccagaattggtttactctgggtcatgttattcctttggtatgcaactgtgtttaattctgctttatatggtttagaagtaagaattgttgcttctaatgcctgggctgtaacgaaccatttcagcatgtggcttgctgctagcctcagcatattttgtttgctcaagattgccaatttctccaaccttatttctctccacctaaagaagagaattaagagtgttgttctggtgatactgttggggcccttggtatttctgatttgtaatcttgctgtgataaccatggatgagagagtgtggacaaaagaatatgaaggaaatgtgacttggaagatcaaattgaggaatgcaatacacctttcaagcttgactgtaactactctagcaaacctcataccctttactctgagcctaatatgttttctgctgttaatctgttctctttgtaaacatctcaagaagatgcggctccatagcaaaggatctcaagatcccagcaccaaggtccatataaaagctttgcaaactgtgacctccttcctcatgttatttgccatttactttctgtgtataatcacatcaacttggaatcttaggacacagcagagcaaacttgtactcctgctttgccaaactgttgcaatcatgtatccttcattccactcattcatcctgattatgggaagtaggaagctaaaacagacctttctttcagttttgtggcagatgacacgctgagtgaaagaagagaaaccctcaactccatagattcacaaggggagcatcgtggg

SEQ ID NO: 31019 - DNA, 1381 bp, Homo sapiens
  source 1..1381: mol_type = unassigned DNA
atgatgagttttctacacattgttttttccattctagtagtggttgcatttattcttggaaattttgccaatggctttatagcactgataaatttcattgcctgggtcaagagacaaaagatctcctcagctgatcaaattattgctgctctggcagtctccagagttggtttgctctgggtaatattattacattggtattcaactgtgttgaatccaacttcatctaatttaaaagtaataatttttatttctaatgcctgggcagtaaccaatcatttcagcatctggcttgctactagcctcagcatattttatttgctcaagatcgtcaatttctccagacttatttttcatcacttaaaaaggaaggctaagagtgtagttctggtgatagtgttggggtctttgttctttttggtttgtcaccttgtgatgaaacacacgtatataaatgtgtggacagaagaatgtgaaggaaacgtaacttggaagatcaaactgaggaatgcaatgcacctttccaacttgactgtagccatgctagcaaacttgataccattcactctgaccctgatatcttttctgctgttaatctactctctgtgtaaacatctgaagaagatgcagctccatggcaaaggatctcaagatcccagcaccaagatccacataaaagctctgcaaactgtgacctccttcctcatattacttgccatttactttctgtgtctaatcatatcgttttggaattttaagatgcgaccaaaagaaattgtcttaatgctttgccaagcttttggaatcatatatccatcattccactcattcattctgatttgggggaacaagacgctaaagcagacctttctttcagttttgtggcaggtgacttgctgggcaaaaggacagaaccagtcaactccatagattcacaagaggtgcattgtgtgttttctagcagaaaacaaattgatggtgtctggaacattttatatttcccacaagtttttccgtagtctatgtatttgagtaatttccaaaagttgacatagaaaagtcttttacctaagtttattatataaaagtatatatatataatatacatttgcgtgtgtgtgtatgtctgaatgtatatgaaaatttaatatttaccataacatacctttaatcaacttttcatataaactgttcagttataccaaagtaggataagaaatttctcagaattatgaacccatgtgtatttcacacatttttttatatgatatttcatttgaggaatttatgatctctatttataattaagaactgacagcttatatcagaaaatcattgctgtttttcgttgtaaaatcattgctgtttttcgttgtaattt

SEQ ID NO: 31020 - DNA, 1101 bp, Homo sapiens
  source 1..1101: mol_type = unassigned DNA
tcagtgaggagattctatgtatcaacagaaagaacaaagatcagggctgcctaattgctgacatgatgggactcaccgagggggtgttcctgattctgtctggcactcagttcacactgggaattctggtcaattgtttcattgagttggtcaatggtagcagctggttcaagaccaagagaatgtctttgtctgacttcatcatcaccaccctggcactcttgaggatcattctgctgtgtattatcttgactgatagttttttaatagaattctctcccaacacacatgattcagggataataatgcaaattattgatgtttcctggacatttacaaaccatctgagcatttggcttgccacctgtcttggtgtcctctactgcctgaaaatcgccagtttctctcaccccacattcctctggctcaagtggagagtttctagggtgatggtatggatgctgttgggtgcactgctcttatcctgtggtagtaccgcatctctgatcaatgagtttaagctctattctgtctttaggggaattgaggccaccaggaatgtgactgaacacttcagaaagaagaggagtgagtattatctgatccatgttcttgggactctgtggtacctgcctcccttaattgtgtccctggcctcctactctttgctcatcttctccctggggaggcacacacggcagatgctgcaaaatgggacaagctccagagatccaaccactgaggcccacaagagggccatcagaatcatcctttccttcttctttctcttcttactttactttcttgctttcttaattgcatcatttggtaatttcctaccaaaaaccaagatggctaagatgattggcgaagtaatgacaatgttttatcctgctggccactcatttattctcattctggggaacagtaagctgaagcagacatttgtagtgatgctccggtgtgagtctggtcatctgaagcctggatccaagggacccattttctcttagagtaacagagggcatggggtggagcccttgagccttttggcctggctcaagactacaggactcttcctgaccttcctatgttaccagt

SEQ ID NO: 31021 - DNA, 1687 bp, Homo sapiens
  source 1..1687: mol_type = unassigned DNA
gtcgctaaagacaaatgatggagaggttacacaaggaaaaattgcaaacactggaagtgaacatgtccttgtttgcatactagcaaatgagaattcaggtttcatgtcaatttcagtatgaataattccagcctataacaagaacagatggtgaatgagtcagttaatttgaattgttttgaaaataagaatgttttccataaagagagcattgaacttatccattagcatgccatggtgatttctgacttgacactggtcacagcaattaaaagtaaaaagaatgtcacagcacatacacaaatcaggtgcatatagaatttaaggtcaggatattcaagcaatcacaaccagtgatattacaccagcattttaaaaatttctttttgtctgttcagacatgataacttttctgcccatcattttttccattctaatagtggttatatttgttattggaaattttgctaatggcttcatagcattggtaaattccattgagtgggtcaagagacaaaagatctcctttgttgaccaaattctcactgctctggcggtctccagagttggtttgctctgggtgttattactacattggtatgcaactcagttgaatccagctttttatagtgtagaagtaagaattactgcttataatgtctgggcagtaaccaaccatttcagcagctggcttgctactagcctcagcatgttttatttgctcaggattgccaatttctccaaccttatttttcttcgcataaagaggagagttaagagtgttgttctggtgatactgttggggcctttgctatttttggtttgtcatctttttgtgataaacatggatgagactgtatggacaaaagaatatgaaggaaacgtgacttggaagatcaaattgaggagtgcaatgtaccattcaaatatgactctaaccatgctagcaaactttgtacccctcactctgaccctgatatcttttctgctgttaatctgttctctgtgtaaacatctcaagaagatgcagctccatggcaaaggatctcaagatcccagcaccaaggtccacataaaagctttgcaaactgtgacctcctttcttctgttatgtgccatttactttctgtccatgatcatatcagtttgtaattttgggaggctggaaaagcaacctgtcttcatgttctgccaagctattatattcagctatccttcaacccacccattcatcctgattttgggaaacaagaagctaaagcagatttttctttcagttttgcggcatgtgaggtactgggtgaaagacagaagccttcgtctccatagattcacaagaggggcattgtgtgtcttctagcagaaaacaaactggtggtgtatgaaacattttatatttcttactgggttttctgtaatatatgtatatgaataatttccacatgtatacctagaaaagtcttttacctaaagttagtctagaaaagtacatatatatagatgtgtgtgtgtgtgtgtgtgtgtatgaaaaactgaagaacattgacaataacatgctttttattgttttttcacaaaaactgccaaattatagaaaatatgacaaaaattcctcaattatgaagccatgtttatttcatacatgtattttatatttcatttgtagaatttatatctatttataatt

SEQ ID NO: 31022 - DNA, 1021 bp, Homo sapiens
  source 1..1021: mol_type = unassigned DNA
cgaacccacctgcaggaaccaactccggacacaacaccagcattaaaacaatttttttttgtctgttcagacatgacaacttttatacccatcattttttccagtgtggtagtggttctatttgttattggaaattttgctaatggcttcatagcattggtaaattccattgagcgggtcaagagacaaaagatctcttttgctgaccagattctcactgctctggcggtctccagagttggtttgctctgggtattattattaaattggtattcaactgtgtttaatccagctttttatagtgtagaagtaagaactactgcttataatgtctgggcagtaaccggccatttcagcaactggcttgctactagcctcagcatattttatttgctcaagattgccaatttctccaaccttatttttcttcacttaaagaggagagttaagagtgtcattctggtgatgctgttggggcctttactatttttggcttgtcaactttttgtgataaacatgaaagagattgtacggacaaaagaatatgaaggaaacttgacttggaagatcaaattgaggagtgcagtgtacctttcagatgcgactgtaaccacgctaggaaacttagtgcccttcactctgaccctgctatgttttttgctgttaatctgttctctgtgtaaacatctcaagaagatgcagctccatggtaaaggatctcaagatcccagcaccaaggtccacataaaagctttgcaaactgtgatctttttcctcttgttatgtgccgtttactttctgtccataatgatatcagtttggagttttgggagtctggaaaacaaacctgtcttcatgttctgcaaagctattagattcagctatccttcaatccacccattcatcctgatttggggaaacaagaagctaaagcagacttttctttcagttttgcggcaagtgaggtactgggtgaaaggagagaagccttcatctccatagattcatgagaggggcattg

SEQ ID NO: 31023 - DNA, 1143 bp, Homo sapiens
  source 1..1143: mol_type = unassigned DNA
cctttctgcactgggtggcaaccaggtctttagattagccaactagagaagagaagtagaatagccaattagagaagtgacatcatgttgactctaactcgcatccgcactgtgtcctatgaagtcaggagtacatttctgttcatttcagtcctggagtttgcagtggggtttctgaccaatgccttcgttttcttggtgaatttttgggatgtagtgaagaggcaggcactgagcaacagtgattgtgtgctgctgtgtctcagcatcagccggcttttcctgcatggactgctgttcctgagtgctatccagcttacccacttccagaagttgagtgaaccactgaaccacagctaccaagccatcatcatgctatggatgattgcaaaccaagccaacctctggcttgctgcctgcctcagcctgctttactgctccaagctcatccgtttctctcacaccttcctgatctgcttggcaagctgggtctccaggaagatctcccagatgctcctgggtattattctttgctcctgcatctgcactgtcctctgtgtttggtgcttttttagcagacctcacttcacagtcacaactgtgctattcatgaataacaatacaaggctcaactggcagattaaagatctcaatttattttattcctttctcttctgctatctgtggtctgtgcctcctttcctattgtttctggtttcttctgggatgctgactgtctccctgggaaggcacatgaggacaatgaaggtctataccagaaactctcgtgaccccagcctggaggcccacattaaagccctcaagtctcttgtctcctttttctgcttctttgtgatatcatcctgtgctgccttcatctctgtgcccctactgattctgtggcgcgacaaaataggggtgatggtttgtgttgggataatggcagcttgtccctctgggcatgcagccatcctgatctcaggcaatgccaagttgaggagagctgtgatgaccattctgctctgggctcagagcagcctgaaggtaagagccgaccacaaggcagattcccggacactgtgctgagaatggacatgaaatgagctcttcattaatacgcctgtgagtcttcataaatatgcc

SEQ ID NO: 31024 - DNA, 994 bp, Homo sapiens
  source 1..994: mol_type = unassigned DNA
tgcctccactatcagcaccacaactgctgaatcctcaatgagtaaagatgcttcggttattctatttctctgctattattgcctcagttattttaaattttgtaggaatcattatgaatctgtttattacagtggtcaattgcaaaacttgggtcaaaagccatagaatctcctcttctgataggattctgttcagcctgggcatcaccaggtttcttatgctgggactatttctggtgaacaccatctacttcgtctcttcaaatacggaaaggtcagtctacctgtctgctttttttgtgttgtgtttcatgtttttggactcgagcagtgtctggtttgtgaccttgctcaatatcttgtactgtgtgaagattactaacttccaacactcagtgtttctcctgctgaagcggaatatctccccaaagatccccaggctgctgctggcctgtgtgctgatttctgctttcaccacttgcctgtacatcacgcttagccaggcatcaccttttcctgaacttgtgactacgagaaataacacatcatttaatatcagtgagggcatcttgtctttagtggtttctttggtcttgagctcatctctccagttcatcattaatgtgacttctgcttccttgctaatacactccttgaggagacatatacagaagatgcagaaaaatgccactggtttctggaatccccagacggaagctcatgtaggtgctatgaagctgatggtctatttcctcatcctctacattccatattcagttgctaccctggtccagtatctccccttttatgcagggatggatatggggaccaaatccatttgtctgatttttgccaccctttactctccaggacattctgttctcattattatcacacatcctaaactgaaaacaacagcaaagaagattctttgtttcaaaaaatagtggaatttcagtaaacaatacctagatttacctgatggtttgggggc

SEQ ID NO: 31025 - DNA, 1033 bp, Homo sapiens
  source 1..1033: mol_type = unassigned DNA
cccattcttggcgcagaaacctgaaagtcaggatcaaagagaatggcaacggtgaacacagatgccacagataaagacatatccaagttcaaggtcaccttcactttggtggtctccggaatagagtgcatcactggcatccttgggagtggcttcatcacggccatctatggggctgagtgggccaggggcaaaacactccccactggtgaccgcattatgttgatgctgagcttttccaggctcttgctacagatttggatgatgctggagaacattttcagtctgctattccgaattgtttataaccaaaactcagtgtatatcctcttcaaagtcatcactgtctttctgaaccattccaatctctggtttgctgcctggctcaaagtcttctattgtcttagaattgcaaacttcaatcatcctttgttcttcctgatgaagaggaaaatcatagtgctgatgccttggcttctcaggctgtcagtgttggtttccttaagcttcagctttcctctctcgagagatgtcttcaatgtgtatgtgaatagctccattcctatcccctcctccaactccacggagaagaagtacttctctgagaccaatatggtcaacctggtatttttctataacatggggatcttcgttcctctgatcatgttcatcctggcagccaccctgctgatcctctctctcaagagacacaccctacacatgggaagcaatgccacagggtccagggaccccagcatgaaggctcacataggggccatcaaagccaccagctactttctcatcctctacattttcaatgcaattgctctatttctttccacgtccaacatctttgacacttacagttcctggaatattttgtgcaagatcatcatggctgcctaccctgccggccactcagtacaactgatcttgggcaaccctgggctgagaagagcctggaagcggtttcagcaccaagttcctctttacctaaaagggcagactctgtgactggaactcacggagttct

SEQ ID NO: 31026 - DNA, 924 bp, Homo sapiens
  source 1..924: mol_type = unassigned DNA
atgcaagcagcactgacggccttcttcgtgttgctctttagcctgctgagtcttctggggattgcagcgaatggcttcattgtgctggtgctgggcagggagtggctgcgatatggcaggttgctgcccttggatatgatcctcattagcttgggtgcctcccgcttctgcctgcagttggttgggacggtgcacaacttctactactctgcccagaaggtcgagtactctgggggtctcggccgacagttcttccatctacactggcacttcctgaactcagccaccttctggttttgcagctggctcagtgtcctgttctgtgtgaagattgctaacatcacacactccaccttcctgtggctgaagtggaggttcccagggtgggtgccctggctcctgttgggctctgtcctgatctccttcatcataaccctgctgtttttttgggtgaactaccctgtatatcaagaatttttaattagaaaattttctgggaacatgacctacaagtggaatacaaggatagaaacatactatttcccatccctgaaactggtcatctggtcaattcctttttctgtttttctggtctcaattatgctgttaattaattctctgaggaggcatactcagagaatgcagcacaacgggcacagcctgcaggaccccagcacccaggctcacaccagagctctgaagtccctcatctccttcctcattctttatgctctgtcctttctgtccctgatcattgatgccgcaaaatttatctccatgcagaacgacttttactggccatggcaaattgcagtctacctgtgcatatctgtccatcccttcatcctcatcttcagcaacctcaagcttcgaagcgtgttctcgcagctcctgttgttggcaaggggcttctgggtggcctag

SEQ ID NO: 31027 - DNA, 945 bp, Homo sapiens
  source 1..945: mol_type = unassigned DNA
atggccaccgaattggacaaaatctttctgattctggcaatagcagaattcatcatcagcatgctggggaatgtgttcattggactggtaaactgctctgaagggatcaagaaccaaaaggtcttctcagctgacttcatcctcacctgcttggctatctccacaattggacaactgttggtgatactgtttgattcatttctagtgggacttgcttcacatttatataccacatatagactaggaaaaactgttattatgctttggcacatgactaatcacttgacaacctggcttgccacctgcctaagcattttctatttctttaagatagcccacttcccccactcccttttcctctggctgaggtggaggatgaacggaatgattgttatgcttcttatattgtctttgttcttactgatttttgacagtttagtgctagaaatatttattgatatctcactcaatataatagataaaagtaatctgactttatatttagatgaaagtaaaactctctatgataaactctctattttaaaaactcttctcagcttaaccagttttatccccttttctctgttcctgacctccttgctttttttatttctgtccttggtgagacatactagaaatttgaagctcagttccttgggctctagagactccagcacagaggcccataggagggccatgaaaatggtgatgtctttccttttcctcttcatagttcattttttttccttacaagtggccaatgggatattttttatgttgtggaacaacaagtacataaagtttgtcatgttagccttaaatgcctttccctcgtgccactcatttattctcattctgggaaacagcaagctgcgacagacagctgtgaggctactgtggcatcttaggaactatacaaaaacaccaaatgctttacctttgtag

SEQ ID NO: 31028 - DNA, 1027 bp, Homo sapiens
  source 1..1027: mol_type = unassigned DNA
tcagcgagaccacgaacccacctgcaggaaccaattccggacacaacaccagcatttaaaaaaattttttttgtctgttcagacatgataacttttctacccatcattttttccagtctggtagtggttacatttgttattggaaattttgctaatggcttcatagcactggtaaattccattgagtggttcaagagacaaaagatctcctttgctgaccaaattctcactgctctggcggtctccagagttggtttgctctgggtattattattaaactggtattcaactgtgttgaatccagcttttaatagtgtagaagtaagaactactgcttataatatctgggcagtgatcaaccatttcagcaactggcttgctactaccctcagcatattttatttgctcaagattgccaatttctccaactttatttttcttcacttaaagaggagagttaagagtgtcattctggtgatgttgttggggcctttgctatttttggcttgtcatctttttgtgataaacatgaatgagattgtgcggacaaaagaatttgaaggaaacatgacttggaagatcaaattgaagagtgcaatgtacttttcaaatatgactgtaaccatggtagcaaacttagtacccttcactctgaccctactatcttttatgctgttaatctgttctttgtgtaaacatctcaagaagatgcagctccatggtaaaggatctcaagatcccagcaccaaggtccacataaaagctttgcaaactgtgatctccttcctcttgttatgtgccatttactttctgtccataatgatatcagtttggagttttggaagtctggaaaacaaacctgtcttcatgttctgcaaagctattagattcagctatccttcaatccacccattcatcctgatttggggaaacaagaagctaaagcagacttttctttcagttttttggcaaatgaggtactgggtgaaaggagagaagacttcatctccatagattcacgagaggg

SEQ ID NO: 31029 - DNA, 930 bp, Homo sapiens
  source 1..930: mol_type = unassigned DNA
atgataacttttctgcccatcattttttccattctaatagtggttacatttgtgattggaaattttgctaatggcttcatagcattggtaaattccattgagtggttcaagagacaaaagatctcttttgctgaccaaattctcactgctctggcagtctccagagttggtttactctgggtattagtattaaattggtatgcaactgagttgaatccagcttttaacagtatagaagtaagaattactgcttacaatgtctgggcagtaatcaaccatttcagcaactggcttgctactagcctcagcatattttatttgctcaagattgccaatttctccaaccttatttttcttcacttaaagaggagagttaagagtgttgttctggtgatactattggggcctttgctatttttggtttgtcatctttttgtgataaacatgaatcagattatatggacaaaagaatatgaaggaaacatgacttggaagatcaaactgaggagtgcaatgtacctttcaaatacaacggtaaccatcctagcaaacttagttcccttcactctgaccctgatatcttttctgctgttaatctgttctctgtgtaaacatctcaaaaagatgcagctccatggcaaaggatctcaagatcccagcatgaaggtccacataaaagctttgcaaactgtgacctccttcctcttgttatgtgccatttactttctgtccataatcatgtcagtttggagttttgagagtctggaaaacaaacctgtcttcatgttctgcgaagctattgcattcagctatccttcaacccacccattcatcctgatttggggaaacaagaagctaaagcagacttttctttcagttttgtggcatgtgaggtactgggtgaaaggagagaagccttcatcttcatag

SEQ ID NO: 31030 - DNA, 1150 bp, Homo sapiens
  source 1..1150: mol_type = unassigned DNA
cagctgttcagtctcgcttgaagacagattacggaaggacgaggccaaatccagattttgtggtgtgaaaatttaccctggtgtgttatcactaccaggggatctgacctcagccaggagcagtgagagcctcctctccccagccatgctgagcgctggcctaggactgctgatgctggtggcagtggttgaatttctcatcggtttaattggaaatggaagcctggtggtctggagttttagagaatggatcagaaaattcaactggtcctcatataacctcattatcctgggcctggctggctgccgatttctcctgcagtggctgatcattttggacttaagcttgtttccacttttccagagcagccgttggcttcgctatcttagtatcttctgggtcctggtaagccaggccagcttatggtttgccaccttcctcagtgtcttctattgcaagaagatcacgaccttcgatcgcccggcctacttgtggctgaagcagagggcctataacctgagtctctggtgccttctgggctactttataatcaatttgttacttacagtccaaattggcttaacattctatcatcctccccaaggaaacagcagcattcggtatccctttgaaagctggcagtacctgtatgcatttcagctcaattcaggaagttatttgcctttagtggtgtttcttgtttcctctgggatgctgattgtctctttgtatacacaccacaagaagatgaaggtccattcagctggtaggagggatgtccgggccaaggctcacatcactgcgctgaagtccttgggctgcttcctcttacttcacctggtttatatcatggccagccccttctccatcacctccaagacttatcctcctgatctcaccagtgtcttcatctgggagacactcatggcagcctatccttctcttcattctctcatattgatcatggggattcctagggtgaagcagacttgtcagaagatcctgtggaagacagtgtgtgctcggagatgctggggcccatgatctgggaagaaaagtgtggtcaggacactcttgggacgctcttttgatagctctctataagggagctgctttccatgtcttttaagattttccttcttttacacc

SEQ ID NO: 31031 - DNA, 1000 bp, Homo sapiens
  source 1..1000: mol_type = unassigned DNA
tcacaaccagtgatattaggcttgcattttctttctttttttctgctcagatatgataacttttctatacatttttttttcaattctaataatggttttatttgttctcggaaactttgccaatggcttcatagcactggtaaatttcattgactgggtgaagagaaaaaagatctcctcagctgaccaaattctcactgctctggcggtctccagaattggtttgctctgggcattattattaaattggtatttaactgtgttgaatccagctttttatagtgtagaattaagaattacttcttataatgcctgggttgtaaccaaccatttcagcatgtggcttgctgctaacctcagcatattttatttgctcaagattgccaatttctccaaccttctttttcttcatttaaagaggagagttaggagtgtcattctggtgatactgttggggactttgatatttttggtttgtcatcttcttgtggcaaacatggatgagagtatgtgggcagaagaatatgaaggaaacatgactgggaagatgaaattgaggaatacagtacatctttcatatttgactgtaactaccctatggagcttcataccctttactctgtccctgatatcttttctgatgctaatctgttctctgtgtaaacatctcaagaagatgcagctccatggagaaggatcgcaagatctcagcaccaaggtccacataaaagctttgcaaactctgatctccttcctcttgttatgtgccattttctttctattcctaatcgtttcggtttggagtcctaggaggctgcggaatgacccggttgtcatggttagcaaggctgttggaaacatatatcttgcattcgactcattcatcctaatttggagaaccaagaagctaaaacacacctttcttttgattttgtgtcagattaggtgctgagtaaaagacctgaaactctcaactctctagattcacaagtgggacatt

SEQ ID NO: 31032 - DNA, 957 bp, Homo sapiens
  source 1..957: mol_type = unassigned DNA
atgaatggagaccacatggttctaggatcttcggtgactgacaagaaggccatcatcttggttaccattttactccttttacgcctggtagcaatagcaggcaatggcttcatcactgctgctctgggcgtggagtgggtgctacggagaatgttgttgccttgtgataagttattggttagcctaggggcctctcgcttctgtctgcagtcagtggtaatgggtaagaccatttatgttttcttgcatccgatggccttcccatacaaccctgtactgcagtttctagctttccagtgggacttcctgaatgctgccaccttatggtcctctacctggctcagtgtcttctattgtgtgaaaattgctaccttcacccaccctgtcttcttctggctaaagcacaagttgtctgggtggctaccatggatgctcttcagctctgtagggctctccagcttcaccaccattctatttttcataggcaaccacagaatgtatcagaactatttaaggaaccatctacaaccttggaatgtcactggcgatagcatacggagctactgtgagaaattctatctcttccctctaaaaatgattacttggacaatgcccactgctgtctttttcatttgcatgattttgctcatcacatctctgggaagacacaggaagaaggctctccttacaacctcaggattccgagagcccagtgtgcaggcacacataaaggctctgctggctctcctctcttttgccatgctcttcatctcatatttcctgtcactggtgttcagtgctgcaggtatttttccacctctggactttaaattctgggtgtgggagtcagtgatttatctgtgtgcagcagttcaccccatcattctgctcttcagcaactgcaggctgagagctgtgctgaagagtcgtcgttcctcaaggtgtgggacaccttga

SEQ ID NO: 31033 - DNA, 1844 bp, Homo sapiens
  source 1..1844: mol_type = unassigned DNA
ggcaggttcgctgtggcgggcgcctgggccgccggctgtttaacttcgcttccgctggcccatagtgatctttgcagtgacccagcagcatcactgtttcttggcgtgtgaagataacccaaggaattgaggaagttgctgagaagagtgtgctggagatgctctaggaaaaaattgaatagtgagacgagttccagcgcaagggtttctggtttgccaagaagaaagtgaacatcatggatcagaacaacagcctgccaccttacgctcagggcttggcctcccctcagggtgccatgactcccggaatccctatctttagtccaatgatgccttatggcactggactgaccccacagcctattcagaacaccaatagtctgtctattttggaagagcaacaaaggcagcagcagcaacaacaacagcagcagcagcagcagcagcagcaacagcaacagcagcagcagcagcagcagcagcagcagcagcagcagcagcagcagcagcagcagcaacaggcagtggcagctgcagccgttcagcagtcaacgtcccagcaggcaacacagggaacctcaggccaggcaccacagctcttccactcacagactctcacaactgcacccttgccgggcaccactccactgtatccctcccccatgactcccatgacccccatcactcctgccacgccagcttcggagagttctgggattgtaccgcagctgcaaaatattgtatccacagtgaatcttggttgtaaacttgacctaaagaccattgcacttcgtgcccgaaacgccgaatataatcccaagcggtttgctgcggtaatcatgaggataagagagccacgaaccacggcactgattttcagttctgggaaaatggtgtgcacaggagccaagagtgaagaacagtccagactggcagcaagaaaatatgctagagttgtacagaagttgggttttccagctaagttcttggacttcaagattcagaatatggtggggagctgtgatgtgaagtttcctataaggttagaaggccttgtgctcacccaccaacaatttagtagttatgagccagagttatttcctggtttaatctacagaatgatcaaacccagaattgttctccttatttttgtttctggaaaagttgtattaacaggtgctaaagtcagagcagaaatttatgaagcatttgaaaacatctaccctattctaaagggattcaggaagacgacgtaatggctctcatgtacccttgcctcccccacccccttctttttttttttttaaacaaatcagtttgttttggtacctttaaatggtggtgttgtgagaagatggatgttgagttgcagggtgtggcaccaggtgatgcccttctgtaagtgcccaccgcgggatgccgggaaggggcattatttgtgcactgagaacaccgcgcagcgtgactgtgagttgctcataccgtgctgctatctgggcagcgctgcccatttatttatatgtagattttaaacactgctgttgacaagttggtttgagggagaaaactttaagtgttaaagccacctctataattgattggactttttaattttaatgtttttccccatgaaccacagtttttatatttctaccagaaaagtaaaaatcttttttaaaagtgttgtttttctaatttataactcctaggggttatttctgtgccagacacattccacctctccagtattgcaggacagaatatatgtgttaatgaaaatgaatggctgtacatatttttttctttcttcagagtactctgtacaataaatgcagtttataaaa

SEQ ID NO: 31034 - DNA, 1453 bp, Homo sapiens
  source 1..1453: mol_type = unassigned DNA
aggttcgctgtggcgggcgcctgggccgccggctgtttaacttcgcttccgctggcccatagtgatctttgcagtgacccagcatcactgtttcttggcgtgtgaagataacccaaggaattgaggaagttgctgagaagagtgtgctggagatgctctaggaaaaaattgaatagtgagacgagttccagcgcaagggtttctggtttgccaagaagaaagtgaacatcatggatcagaacaacagcctgccaccttacgctcagggcttggcctcccctcagggtgccatgactcccggaatccctatctttagtccaatgatgccttatggcactggactgaccccacagcctattcagaacaccaatagtctgtctattttggaagagcaacaaaggcagcagcagcaacaacaacagcagcagcagcagcagcagcaacaggcagtggcagctgcagccgttcagcagtcaacgtcccagcaggcaacacagggaacctcaggccaggcaccacagctcttccactcacagactctcacaactgcacccttgccgggcaccactccactgtatccctcccccatgactcccatgacccccatcactcctgccacgccagcttcggagagttctgggattgtaccgcagctgcaaaatattgtatccacagtgaatcttggttgtaaacttgacctaaagaccattgcacttcgtgcccgaaacgccgaatataatcccaagcggtttgctgcggtaatcatgaggataagagagccacgaaccacggcactgattttcagttctgggaaaatggtgtgcacaggagccaagagtgaagaacagtccagactggcagcaagaaaatatgctagagttgtacagaagttgggttttccagctaagttcttggacttcaagattcagaatatggtggggagctgtgatgtgaagtttcctataaggttagaaggccttgtgctcacccaccaacaatttagtagttatgagccagagttatttcctggtttaatctacagaatgatcaaacccagaattgttctccttatttttgtttctggaaaagttgtattaacaggtgctaaagtcagagcagaaatttatgaagcatttgaaaacatctaccctattctaaagggattcaggaagacgacgtaatggctctcatgtacccttgcctcccccacccccttctttttttttttttaaacaaatcagtttgttttggtacctttaaatggtggtgttgtgagaagatggatgttgagttgcagggtgtggcaccaggtgatgcccttctgtaagtgcccaccgcgggatgccgggaaggggcattatttgtgcactgagaacaccgcgcagcgtgactgtgagttgctcataccgtgctgctatctgggcagcgctgcccatttatttatatgtagatt

SEQ ID NO: 31035 - DNA, 1903 bp, Homo sapiens
  source 1..1903: mol_type = unassigned DNA
ggcggaagtgacattatcaacgcgcgccaggggttcagtgaggtcgggcaggttcgctgtggcgggcgcctgggccgccggctgtttaacttcgcttccgctggcccatagtgatctttgcagtgacccagcatcactgtttcttggcgtgtgaagataacccaaggaattgaggaagttgctgagaagagtgtgctggagatgctctaggaaaaaattgaatagtgagacgagttccagcgcaagggtttctggtttgccaagaagaaagtgaacatcatggatcagaacaacagcctgccaccttacgctcagggcttggcctcccctcagggtgccatgactcccggaatccctatctttagtccaatgatgccttatggcactggactgaccccacagcctattcagaacaccaatagtctgtctattttggaagagcaacaaaggcagcagcagcaacaacaacagcagcagcagcagcagcagcagcaacagcaacagcagcagcagcagcagcagcagcagcagcagcagcagcagcagcagcagcagcagcaacaggcagtggcagctgcagccgttcagcagtcaacgtcccagcaggcaacacagggaacctcaggccaggcaccacagctcttccactcacagactctcacaactgcacccttgccgggcaccactccactgtatccctcccccatgactcccatgacccccatcactcctgccacgccagcttcggagagttctgggattgtaccgcagctgcaaaatattgtatccacagtgaatcttggttgtaaacttgacctaaagaccattgcacttcgtgcccgaaacgccgaatataatcccaagcggtttgctgcggtaatcatgaggataagagagccacgaaccacggcactgattttcagttctgggaaaatggtgtgcacaggagccaagagtgaagaacagtccagactggcagcaagaaaatatgctagagttgtacagaagttgggttttccagctaagttcttggacttcaagattcagaatatggtggggagctgtgatgtgaagtttcctataaggttagaaggccttgtgctcacccaccaacaatttagtagttatgagccagagttatttcctggtttaatctacagaatgatcaaacccagaattgttctccttatttttgtttctggaaaagttgtattaacaggtgctaaagtcagagcagaaatttatgaagcatttgaaaacatctaccctattctaaagggattcaggaagacgacgtaatggctctcatgtacccttgcctcccccacccccttctttttttttttttaaacaaatcagtttgttttggtacctttaaatggtggtgttgtgagaagatggatgttgagttgcagggtgtggcaccaggtgatgcccttctgtaagtgcccaccgcgggatgccgggaaggggcattatttgtgcactgagaacaccgcgcagcgtgactgtgagttgctcataccgtgctgctatctgggcagcgctgcccatttatttatatgtagattttaaacactgctgttgacaagttggtttgagggagaaaactttaagtgttaaagccacctctataattgattggactttttaattttaatgtttttccccatgaaccacagtttttatatttctaccagaaaagtaaaaatcttttttaaaagtgttgtttttctaatttataactcctaggggttatttctgtgccagacacattccacctctccagtattgcaggacagaatatatgtgttaatgaaaatgaatggctgtacatatttttttctttcttcagagtactctgtacaataaatgcagtttataaaagtgttagattgttgtt

SEQ ID NO: 31036 - DNA, 935 bp, Homo sapiens
  source 1..935: mol_type = unassigned DNA
ggagcaactcgctgaagccgagggcagaactggcggaagtgacattatcaacgcgcgccaggggttcagtgaggtcgggcaggttcgctgtggcgggcgcctgggccgccggctgtttaacttcgcttccgctggcccatagtgatctttgcagtgacccagcatcactgtttcttggcgtgtgaagataacccaaggaattgaggaagttgctgagaagagtgtgctggagatgctctaggaaaaaattgaatagtgagacgagttccagcgcaagggtttctggtttgccaagaagaaagtgaacatcatggatcagaacaacagcctgccaccttacgctcagggcttggcctcccctcagggtgccatgactcccggaatccctatctttagtccaatgatgccttatggcactggactgaccccacagcctattcagaacaccaatagtctgtctattttggaagagcaacaaaggcagcagcagcaacaacaacagcagcagcagcagcagcagcagcaacagcaacagcagcagcagcagcagcagcagcagcagcagcagcagcagcagcagcagcagcagcaacaggcagtggcagctgcagccgttcagcagtcaacgtcccagcaggcaacacagggaacctcaggccaggcaccacagctcttccactcacagactctcacaactgcacccttgccgggcaccactccactgtatccctcccccatgactcccatgacccccatcactcctgccacgccagcttcggagagttctgggattgtaccgcagctgcaaaatattgtatccacagtgaatcttggttgtaaacttgacctaaagaccattgcacttcgtgcccgaaacgccgaatataatcccaagcggtttgctgcggtaatcatgaggataagagagccacgaa

SEQ ID NO: 31037 - DNA, 703 bp, Homo sapiens
  source 1..703: mol_type = unassigned DNA
gttccggcctgtaacggccactcggccgccactcccgcctggtgccctactctgctgtgtttcgcaggcagcttcccatcgtacgattgtggggctcaggcagcatcactgtttcttggcgtgtgaagataacccaaggaattgaggaagttgctgagaagagtgtgctggagatgctctaggaaaaaattgaatagtgagacgagttccagcgcaagggtttctggtttgccaagaagaaagtgaacatcatggatcagaacaacagcctgccaccttacgctcagggcttggcctcccctcagggtgccatgactcccggaatccctatctttagtccaatgatgccttatggcactggactgaccccacagcctattcagaacaccaatagtctgtctattttggaagagcaacaaaggcagcagcagcaacaacaacagcagcagcagcagcagcagcagcaacagcaacagcagcagcagcagcagcagcagcagcagcagcagcagcagcagcagcagcagcagcaacaggcagtggcagctgcagccgttcagcagtcaacgtcccagcaggcaacacagggaacctcaggccaggcaccacagctcttccactcacagactctcacaactgcacccttgccgggcaccactccactgtatccctcccccatgactcccatgacccccatcactcc

SEQ ID NO: 31038 - DNA, 892 bp, Homo sapiens
  source 1..892: mol_type = unassigned DNA
tgaagaacagtccagactggcagcaagaaaatatgctagagttgtacagaagttgggttttccagctaagttcttggacttcaagattcagaatatggtggggagctgtgatgtgaagtttcctataagttatgagccagagttatttcctggtttaatctacagaatgatcaaacccagaattgttctccttatttttgtttctggaaaagttgtattaacaggtgctaaagtcagagcagaaatttatgaagcatttgaaaacatctaccctattctaaagggattcaggaagacgacgtaatggctctcatgtacccttgcctcccccacccccttctttttttttttttaaacaaatcagtttgttttggtacctttaaatggtggtgttgtgagaagatggatgttgagttgcagggtgtggcaccaggtgatgcccttctgtaagtgcccaccgcgggatgccgggaaggggcattatttgtgcactgagaacaccgcgcagcgtgactgtgagttgctcataccgtgctgctatctgggcagcgctgcccatttatttatatgtagattttaaacactgctgttgacaagttggtttgagggagaaaactttaagtgttaaagccacctctataattgattggactttttaattttaatgtttttccccatgaaccacagtttttatatttctaccagaaaagtaaaaatcttttttaaaagtgttgtttttctaatttataactcctaggggttatttctgtgccagacacattccacctctccagtattgcaggacagaatatatgtgttaatgaaaatgaatggctgtacatatttttttctttcttcagagtactctgtacaataaatgcagtttataaaa

SEQ ID NO: 31039 - DNA, 1701 bp, Homo sapiens
  source 1..1701: mol_type = unassigned DNA
ggcggaagtgacattatcaacgcgcgccaggggttcagtgaggtcgggcaggttcgctgtggcgggcgcctgggccgccggctgtttaacttcgcttccgctggcccatagtgatctttgcagtgacccagggtgccatgactcccggaatccctatctttagtccaatgatgccttatggcactggactgaccccacagcctattcagaacaccaatagtctgtctattttggaagagcaacaaaggcagcagcagcaacaacaacagcagcagcagcagcagcagcagcaacagcaacagcagcagcagcagcagcagcagcagcagcagcagcagcagcagcagcagcagcagcaacaggcagtggcagctgcagccgttcagcagtcaacgtcccagcaggcaacacagggaacctcaggccaggcaccacagctcttccactcacagactctcacaactgcacccttgccgggcaccactccactgtatccctcccccatgactcccatgacccccatcactcctgccacgccagcttcggagagttctgggattgtaccgcagctgcaaaatattgtatccacagtgaatcttggttgtaaacttgacctaaagaccattgcacttcgtgcccgaaacgccgaatataatcccaagcggtttgctgcggtaatcatgaggataagagagccacgaaccacggcactgattttcagttctgggaaaatggtgtgcacaggagccaagagtgaagaacagtccagactggcagcaagaaaatatgctagagttgtacagaagttgggttttccagctaagttcttggacttcaagattcagaatatggtggggagctgtgatgtgaagtttcctataaggttagaaggccttgtgctcacccaccaacaatttagtagttatgagccagagttatttcctggtttaatctacagaatgatcaaacccagaattgttctccttatttttgtttctggaaaagttgtattaacaggtgctaaagtcagagcagaaatttatgaagcatttgaaaacatctaccctattctaaagggattcaggaagacgacgtaatggctctcatgtacccttgcctcccccacccccttctttttttttttttaaacaaatcagtttgttttggtacctttaaatggtggtgttgtgagaagatggatgttgagttgcagggtgtggcaccaggtgatgcccttctgtaagtgcccaccgcgggatgccgggaaggggcattatttgtgcactgagaacaccgcgcagcgtgactgtgagttgctcataccgtgctgctatctgggcagcgctgcccatttatttatatgtagattttaaacactgctgttgacaagttggtttgagggagaaaactttaagtgttaaagccacctctataattgattggactttttaattttaatgtttttccccatgaaccacagtttttatatttctaccagaaaagtaaaaatcttttttaaaagtgttgtttttctaatttataactcctaggggttatttctgtgccagacacattccacctctccagtattgcaggacagaatatatgtgttaatgaaaatgaatggctgtacatatttttttctttcttcagagtactctgtacaataaatgcagtttataaaagtgttagattgttgtt

SEQ ID NO: 31040 - DNA, 3879 bp, Homo sapiens
  source 1..3879: mol_type = unassigned DNA
cccgagtgccaaagctggggttctacttgagatttccctcgtggtgccagggtccggcgagcatcacgccgaggcccattttccagacgaccacgacgaggccggggtcacgaactctggcgccccttaccagcttccagtctctcgaggtggccagtgtggtgcttggtccttgtttccaggatggacttccccagctccctccgccctgcattgtttctgaccggcccccttggtctgagcgacgtccctgacctctctttcatgtgcagctggcgagacgcactgactctgccagaggcccagccccagaactcagagaatggggcactgcatgtgaccaaggacctgctgtgggagccggcaacccctgggcctctccccatgctgcctcccctcatcgatccctgggaccctggcctgactgcccgggacctgcttttccgcggagggtgccggtatcggaagcggccccgagtcgtgctggatgtgactgagcagatcagccggttcctcttggatcatggagacgtagcctttgcgcccctggggaagctgatgctggagaatttcaagctggagggagcggggagccgcactaagaagaagacagtggtcagtgtgaagaagctgctccaggacctcggtggacaccagccctgggggtgtccctgggcttacctcagcaaccgacagcgccgcttctctatcctcgggggccccatcctgggcacgtcggtggcgagccacttggcagagctgctgcacgaggagctggtgctgcggtgggagcagctgcttctggatgaggcctgcactgggggcgcgctggcctgggttcctggaaggacaccccagttcgggcagctggtctaccctgctggaggcgcccaggacaggctgcatttccaagaggtcgttctgaccccaggtgacaatccccaattccttgggaaacctggacgcatccagctccagggacctgtccggcaagtggtgacatgcaccgtccagggagaaagtaaggcccttatatacactttcctccctcactggctgacctgctacctgacccctggccctttccatccctcctcagctctgctggccgtccgctctgactaccactgtgccgtgtggaagtttggtaaacagtggcagccaacccttctgcaggcaatgcaggtggagaaaggggccacggggatcagcctcagccctcacctgcccggggagctggccatctgcagccgctcgggagccgtctgcctgtggagccctgaggatgggctgcggcaaatctacagggaccctgagaccctcgtgttccgggactcctcttcgtggcgttgggcagacttcactgcgcaccctcgggtgctgaccgtgggtgaccgcaccggagtgaagatgctggacactcagggcccgccgggctgtggtctgttgctttttcgtttgggggcagaggcttcgtgccagaaaggggaacgtgtcctgcttacccagtacctggggcactccagccccaaatgcctcccccctactcttcatctcgtctgtacccagttctctctctacctagtggacgagcgccttcccctggtgccgatgctgaagtggaaccatggcctcccctccccgctcctgctggcccgactgctgcctccgccccggcccagctgcgtgcagcccctgctcctcggaggccagggtgggcagctgcagctgctgcacctggcaggagaaggggcgtcggtgccccgcctggcaggccccccccagtctcttccttccaggatcgactccctccctgcatttcctctgctggagcctaagatccagtggcggctgcaggagcgcctgaaagcaccgaccataggtctggctgccgtcgtcccgcccttgccctcagcgcccacaccaggcctggtgctcttccagctctcggcggcgggagatgtcttctaccagcagctccgcccccaggtggactccagcctccgcagagatgctgggcctcctggcgacacccaacctgactgccatgcccccacagcttcctggacctcccaggacactgccggctgcagccagtggctgaaggccctgctaaaagtgcccctggctcctcctgtgtggacagcacccaccttcacccaccgccagatgctgggcagcacagagctgcggagggaggaagaggaagggcagcggctgggtgtgctccgcaaggccatggcccgagggcagctcctgctgcagagagacctgggctccctccctgcggcagagccaccccctgcacccgagtcaggcctagaggacaagctcagtgagcgcctgggggaagcctgggcaggccgaggggctgcctggtgggagaggcagcagggcaggacctcggagcccgggagacagaccaggcggcccaagcgccggacccagctgtccagcagcttttcgctcagtggccatgtggatccctcagaggacaccagctcccctcatagccctgagtggccacctgctgatgctctgcccctgccccccacgaccccgccctcccaggagttgactccggatgcatgcgcccagggcgtcccatcagagcagcggcagatgctccgtgactacatggccaagctaccaccccagagggacaccccaggctgtgccaccacacctccccactcccaggcctccagcgtccgggccactcgctcccagcagcacacacccgtcctctctagctctcagcccctccggaagaagcctcgaatgggcttctgaggacacaaggtgggctgccctcaagccccagagagcccctcatccttcctctgggaccagatgtgccttccacagttgaaacttgagaagcagagctcgccaccttctggaggccactgtgatgatgagccaagcaatttggagccaagttgaagggacagggcaacaaaatacagtagtagtttcttttgtattttgtatattcgcctgaagatcatcccgcaaggcaggctggaggtgccggtgggcctgtgttgctgggattttagtctgtgctgggaggcagggctccgctgcgcctcagctgtgggggcctcaggcaggtccctcagttctcacgccttcctgtccagtggaatgggggccaggagtgctggctcctcgtgtttggtgagggtggagtgaggcccctgcagagctgctgatgaggtgggcacagcggccgttggcagctgctgttgtgggttgctttgtcaatctctgccccggtctgatgtttcctacagggagatgccttggatccaggttcagggactaaatacacttggcagctgaagatgaattggaatggtcacgttttttaggctggacagcgtcccgccacagctactacctgacactgagctcatgcagagagatgatggctgatgttccttctcccttgggacatgggtctggcacctgtgggctgtcgatagtgccctctgagcagagggtcacggtcatgtcagtttgggggaattctctgttgtgcctcacagactcccccctttctttcctccctccccttctcattttgatgtctaaagcatcaagtccctcttcctcggagtttctctagctgcagtggaagattctgttttcctgtggggaaaatgctcacttgagattttgcagggacccgggtctgtctggtttctgatgacatagtaagagaaaggtcttttttcaggttggctggtgaaaggaattgcatgtgactcacacaaacaggagctagcccaatcatacactgactcgcgtgggtgttaaaatgtttatcatgcctaagggagacatttatgattaaaccatttatgctacata

SEQ ID NO: 31041 - DNA, 1911 bp, Homo sapiens
  source 1..1911: mol_type = unassigned DNA
gagccgggccgcgcgctgcctaaatacctaaaccaggtttagcgcctgctcatataaagctctcctaactcgtcttccggtgggaatttcttcacgtgggccggagtcggagactgagtttagctttactgaggagctctaaatttaggcgggtatgagtgatttcagtgaagaattaaaagggcctgtgacagatgatgaagaagtggaaacatctgtgctcagtggtgcaggaatgcattttccttggcttcaaacatacgtagaaactgtggccattggagggaaaaggaggaaggattttgctcagacaacaagtgcttgtttaagttttatccaagaagctctgctgaagcaccaatggcagcaagctgcagaatacatgtacagttattttcagaccttggaagattcagatagctacaaaaggcaggctgcacctgagattatttggaagctcggaagtgaaattctattttatcatcccaaaagcaacatggagagtttcaatacttttgctaaccggatgaaaaatattggcgtcatgaattatttaaagatctccttacaacatgcattataccttctgcatcatggaatgcttaaagatgctaagagaaatctgagtgaggcagagacatggagacatggtgaaaatacgtcttcccgggaaatattaatcaaccttattcaggcctataaagggcttttacagtattatacctggtctgaaaagaagatggaattgtcaaagcttgataaggatgattatgcttacaatgcagtagcccaggatgtgttcaaccacagctggaagacatctgcaaatatttctgcattgattaaaattcctggagtttgggacccttttgtgaagagttatgtagaaatgctggaattctatggggatcgagatggagcccaagaggtactcaccaattatgcatatgatgaaaagtttccatcaaatccaaatgcccatatctacttatacaactttctaaagagacagaaggcaccaagatcaaaattgataagtgtgcttaagattttgtatcagattgtaccatctcataaattgatgttggaattccatacattacttagaaaatcagaaaaagaagaacaccgtaaactggggttggaggtattatttggagtcttagattttgccggatgcactaagaatataactgcttggaaatacttggcaaaatatctgaaaaatatcttaatgggaaaccaccttgcgtgggttcaagaagagtggaactccaggaaaaactggtggccaggctttcatttcagctacttttgggcaaaaagtgattggaaggaagatacagctttggcctgtgagaaagcttttgtggctggtttactgttaggaaaaggttgtagatatttccggtatattttaaagcaagatcaccaaatcttagggaagaaaattaagcggatgaagagatctgtgaaaaaatacagtattgtaaatccaagactctgatactgaattttagttatttcacagttgtagctacacagtataccaccatgaagaaatatattggtgatgagttctattgaggaattttgaaaagagagaaggatttagaaaaaagactctttctcggccgggcgcagtggctcacacttctaatcccagcacttgggaggccgaggtgggtggatcatgaggtcaggagttcaagaccagcctggccaacacagtgaaaccctgtctctactaaaaatacaaaaagtagctgggcgcagtggcgggcatttgtaatcccagatactcgggaggctgaagcaggagaattgcttgaacccgggaggtggaggttgcagtgagccgagattgcaccaccgtactcctgcctgggcgacagaactagactctgtctc

SEQ ID NO: 31042 - DNA, 1894 bp, Homo sapiens
  source 1..1894: mol_type = unassigned DNA
gccaacgatacgcctgctgcagcaggaggagttacgagccgggccgcgcgctgcctaaatacctaaaccaggtttagcgcctgctcatataaagctctcctaactcgtcttccggtgggaatttcttcacgtgggccggagtcggagactgagtttagctttactgaggagctctaaatttaggcgggtatgagtgatttcagtgaagaattaaaagggcctgtgacagatgatgaagaagtggaaacatctgtgctcagtggtgcaggaatgcattttccttggcttcaaacatacgtagaaactgtggccattggagggaaaaggaggaaggattttgctcagacaacaagtgcttgtttaagttttatccaagaagctctgctgaagcaccaatggcagcaagctgcagaatacatgtacagttattttcagaccttggaagattcagatagctacaaaaggcaggctgcacctgagattatttggaagctcggaagtgaaattctattttatcatcccaaaagcaacatggagagtttcaatacttttgctaaccggatgaaaaatattggcgtcatgaattatttaaagatctccttacaacatgcattataccttctgcatcatggaatgcttaaagatgctaagagaaatctgagtgaggcagagacatggagacatggtgaaaatacgtcttcccgggaaatattaatcaaccttattcaggcctataaagggcttttacagtattatacctggtctgaaaagaagatggaattgtcaaagcttgataaggatgattatgcttacaatgcagtagcccaggatgtgttcaaccacagctggaagacatctgcaaatatttctgcattgattaaaattcctggagtttgggacccttttgtgaagagttatgtagaaatgctggaattctatggggatcgagatggagcccaagaggtactcaccaattatgcatatgatgaaaagtttccatcaaatccaaatgcccatatctacttatacaactttctaaagagacagaaggcaccaagatcaaaattgataagtgtgcttaagattttgtatcagattgtaccatctcataaattgatgttggaattccatacattacttagaaaatcagaaaaagaagaacaccgtaaactggggttggaggtattatttggagtcttagattttgccggatgcactaagaatataactgcttggaaatacttggcaaaatatctgaaaaatatcttaatgggaaaccaccttgcgtgggttcaagaagagtggaactccaggaaaaactggtggccaggctttcatttcagctacttttgggcaaaaagtgattggaaggaagatacagctttggcctgtgagaaagcttttgtggctggtttactgttaggaaaaggttgtagatatttccggtatattttaaagcaagatcaccaaatcttagggaagaaaattaagcggatgaagagatctgtgaaaaaatacagtattgtaaatccaagactctgatactgaattttagttatttcacagttgtagctacacagtaagtagcttggtagatagttattgaatgtatttatgtagtgtattaagaagcttatattactacaaaaaacttatttttatatatttttatatttttgtattatttatagctagagaaacaatattactgcctttgctctttgtaactatgtctgttttcttttttgtaatgttaaatgttacatttgttaaggaataattcttcaaatgacaaactaattacagaatatagctctacagcagttattgtttgcaaatactttgcctcttgctattgtgtaataaactgtaacttgtagtgctgtgaaatgta

SEQ ID NO: 31043 - DNA, 1648 bp, Homo sapiens
  source 1..1648: mol_type = unassigned DNA
acgtgggccggagtcggagactgagtttagctttactgaggagctctaaatttaggcgggtatgagtgatttcagtgaagaattaaaagggcctgtgacagatgatgaagaagtggaaacatctgtgctcagtggtgcaggaatgcattttccttggcttcaaacatacgtagaaactgtggattatttggaagctcggaagtgaaattctattttatcatcccaaaagcaacatggagagtttcaatacttttgctaaccggatgaaaaatattggcgtcatgaattatttaaagatctccttacaacatgcattataccttctgcatcatggaatgcttaaagatgctaagagaaatctgagtgaggcagagacatggagacatggtgaaaatacgtcttcccgggaaatattaatcaaccttattcaggcctataaagggcttttacagtattatacctggtctgaaaagaagatggaattgtcaaagcttgataaggatgattatgcttacaatgcagtagcccaggatgtgttcaaccacagctggaagacatctgcaaatatttctgcattgattaaaattcctggagtttgggacccttttgtgaagagttatgtagaaatgctggaattctatggggatcgagatggagcccaagaggtactcaccaattatgcatatgatgaaaagtttccatcaaatccaaatgcccatatctacttatacaactttctaaagagacagaaggcaccaagatcaaaattgataagtgtgcttaagattttgtatcagattgtaccatctcataaattgatgttggaattccatacattacttagaaaatcagaaaaagaagaacaccgtaaactggggttggaggtattatttggagtcttagattttgccggatgcactaagaatataactgcttggaaatacttggcaaaatatctgaaaaatatcttaatgggaaaccaccttgcgtgggttcaagaagagtggaactccaggaaaaactggtggccaggctttcatttcagctacttttgggcaaaaagtgattggaaggaagatacagctttggcctgtgagaaagcttttgtggctggtttactgttaggaaaaggttgtagatatttccggtatattttaaagcaagatcaccaaatcttagggaagaaaattaagcggatgaagagatctgtgaaaaaatacagtattgtaaatccaagactctgatactgaattttagttatttcacagttgtagctacacagtataccaccatgaagaaatatattggtgatgagttctattgaggaattttgaaaagagagaaggatttagaaaaaagactctttctcggccgggcgcagtggctcacacttctaatcccagcacttgggaggccgaggtgggtggatcatgaggtcaggagttcaagaccagcctggccaacacagtgaaaccctgtctctactaaaaatacaaaaagtagctgggcgcagtggcgggcatttgtaatcccagatactcgggaggctgaagcaggagaattgcttgaacccgggaggtggaggttgcagtgagccgagattgcaccaccgtactcctgcctgggcgacagaactagactctgtctc

SEQ ID NO: 31044 - DNA, 1708 bp, Homo sapiens
  source 1..1708: mol_type = unassigned DNA
gccaacgatacgcctgctgcagcaggaggagttacgagccgggccgcgcgctgcctaaatacctaaaccaggtttagcgcctgctcatataaagctctcctaactcgtcttccggtgggaatttcttcacgtgggccggagtcggagactgagtttagctttactgaggagctctaaatttaggcgggtatgagtgatttcagtgaagaattaaaagggcctgtgacagatgatgaagaagtggaaacatctgtgctcagtggtgcaggaatgcattttccttggcttcaaacatacgtagaaactgtggattatttggaagctcggaagtgaaattctattttatcatcccaaaagcaacatggagagtttcaatacttttgctaaccggatgaaaaatattggcgtcatgaattatttaaagatctccttacaacatgcattataccttctgcatcatggaatgcttaaagatgctaagagaaatctgagtgaggcagagacatggagacatggtgaaaatacgtcttcccgggaaatattaatcaaccttattcaggcctataaagggcttttacagtattatacctggtctgaaaagaagatggaattgtcaaagcttgataaggatgattatgcttacaatgcagtagcccaggatgtgttcaaccacagctggaagacatctgcaaatatttctgcattgattaaaattcctggagtttgggacccttttgtgaagagttatgtagaaatgctggaattctatggggatcgagatggagcccaagaggtactcaccaattatgcatatgatgaaaagtttccatcaaatccaaatgcccatatctacttatacaactttctaaagagacagaaggcaccaagatcaaaattgataagtgtgcttaagattttgtatcagattgtaccatctcataaattgatgttggaattccatacattacttagaaaatcagaaaaagaagaacaccgtaaactggggttggaggtattatttggagtcttagattttgccggatgcactaagaatataactgcttggaaatacttggcaaaatatctgaaaaatatcttaatgggaaaccaccttgcgtgggttcaagaagagtggaactccaggaaaaactggtggccaggctttcatttcagctacttttgggcaaaaagtgattggaaggaagatacagctttggcctgtgagaaagcttttgtggctggtttactgttaggaaaaggttgtagatatttccggtatattttaaagcaagatcaccaaatcttagggaagaaaattaagcggatgaagagatctgtgaaaaaatacagtattgtaaatccaagactctgatactgaattttagttatttcacagttgtagctacacagtaagtagcttggtagatagttattgaatgtatttatgtagtgtattaagaagcttatattactacaaaaaacttatttttatatatttttatatttttgtattatttatagctagagaaacaatattactgcctttgctctttgtaactatgtctgttttcttttttgtaatgttaaatgttacatttgttaaggaataattcttcaaatgacaaactaattacagaatatagctctacagcagttattgtttgcaaatactttgcctcttgctattgtgtaataaactgtaacttgt

SEQ ID NO: 31045 - DNA, 894 bp, Homo sapiens
  source 1..894: mol_type = unassigned DNA
ttagctttactgaggagctctaaatttaggcgggtatgagtgatttcagtgaagaattaaaagggcctgtgacagatgatgaagaagtggaaacatctgtgctcagtggtgcaggaatgcattttccttggcttcaaacatacgtagaaactgtggccattggagggaaaaggaggaaggattttgctcagacaacaagtgcttgtttaagttttatccaagaagctctgctgaagcaccaatggcagcaagctgcagaatacatgtacagttattttcagaccttggaagattcagatagctacaaaaggcaggctgcacctgagatctccttacaacatgcattataccttctgcatcatggaatgcttaaagatgctaagagaaatctgagtgaggcagagacatggagacatggtgaaaatacgtcttcccgggaaatattaatcaaccttattcaggcctataaagggcttttacagtattatacctggtctgaaaagaagatggaattgtcaaagcttgataaggatgattatgcttacaatgcagtagcccaggatgtgttcaaccacagctggaagacatctgcaaatatttctgcattgattaaaattcctggagtttgggacccttttgtgaagagttatgtagaaatgctggaattctatggggatcgagatggagcccaagaggtactcaccaattatgcatatgatgaaaagtttccatcaaatccaaatgcccatatctacttatacaactttctaaagagacagaaggcaccaagatcaaaattgataagtgtgcttaagattttgtatcagattgtaccatctcataaattgatgttggaattccatacattacttagaaaatcagaaaaagaagaac

SEQ ID NO: 31046 - DNA, 1764 bp, Homo sapiens
  source 1..1764: mol_type = unassigned DNA
gccaacgatacgcctgctgcagcaggaggagttacgagccgggccgcgcgctgcctaaatacctaaaccaggtttagcgcctgctcatataaagctctcctaactcgtcttccggtgggaatttcttcacgtgggccggagtcggagactgagtttagctttactgaggagctctaaatttaggcgggtatgagtgatttcagtgaagaattaaaagggcctgtgacagatgatgaagaagtggaaacatctgtgctcagtggtgcaggaatgcattttccttggcttcaaacatacgtagaaactgtggccattggagggaaaaggaggaaggattttgctcagacaacaagtgcttgtttaagttttatccaagaagctctgctgaagcaccaatggcagcaagctgcagaatacatgtacagttattttcagaccttggaagattcagatagctacaaaaggcaggctgcacctgagatctccttacaacatgcattataccttctgcatcatggaatgcttaaagatgctaagagaaatctgagtgaggcagagacatggagacatggtgaaaatacgtcttcccgggaaatattaatcaaccttattcaggcctataaagggcttttacagtattatacctggtctgaaaagaagatggaattgtcaaagcttgataaggatgattatgcttacaatgcagtagcccaggatgtgttcaaccacagctggaagacatctgcaaatatttctgcattgattaaaattcctggagtttgggacccttttgtgaagagttatgtagaaatgctggaattctatggggatcgagatggagcccaagaggtactcaccaattatgcatatgatgaaaagtttccatcaaatccaaatgcccatatctacttatacaactttctaaagagacagaaggcaccaagatcaaaattgataagtgtgcttaagattttgtatcagattgtaccatctcataaattgatgttggaattccatacattacttagaaaatcagaaaaagaagaacaccgtaaactggggttggaggtattatttggagtcttagattttgccggatgcactaagaatataactgcttggaaatacttggcaaaatatctgaaaaatatcttaatgggaaaccaccttgcgtgggttcaagaagagtggaactccaggaaaaactggtggccaggctttcatttcagctacttttgggcaaaaagtgattggaaggaagatacagctttggcctgtgagaaagcttttgtggctggtttactgttaggaaaaggttgtagatatttccggtatattttaaagcaagatcaccaaatcttagggaagaaaattaagcggatgaagagatctgtgaaaaaatacagtattgtaaatccaagactctgatactgaattttagttatttcacagttgtagctacacagtaagtagcttggtagatagttattgaatgtatttatgtagtgtattaagaagcttatattactacaaaaaacttatttttatatatttttatatttttgtattatttatagctagagaaacaatattactgcctttgctctttgtaactatgtctgttttcttttttgtaatgttaaatgttacatttgttaaggaataattcttcaaatgacaaactaattacagaatatagctctacagcagttattgtttgcaaatactttgcctcttgctattgtgtaataaactgtaacttgt

SEQ ID NO: 31047 - DNA, 1235 bp, Homo sapiens
  source 1..1235: mol_type = unassigned DNA
acttccggggtcgaggcgaggccaacgatacgcctgctgcagcaggaggagttacgagccgggccgcgcgctgcctaaatacctaaaccaggtttagcgcctgctcatataaagctctcctaactcgtcttccggtgggaatttcttcacgtgggccggagtcggagactgagtttagctttactgaggagctctaaatttaggcgggtatgagtgatttcagtgaagaattaaaagggcctgtgacagatgatgaagaagtggaaacatctgtgctcagtggtgcaggaatgcattttccttggcttcaaacatacgtagaaactgtggccattggagggaaaaggaggaaggattttgctcagacaacaagtgcttgtttaagttttatccaagaagctctgctgaagcaccaatggcagcaagctgcagaatacatgtacagttattttcagaccttggaagattcagatagctacaaaaggcaggctgcacctgagattatttggaagctcggaagtgaaattctattttatcatcccaaaagcaacatggagagtttcaatacttttgctaaccggatgaaaaatattggcgtcatgaattatttaaagatctccttacaacatgcattataccttctgcatcatggaatgcttaaagatgctaagagaaatctgagtgaggcagagacatggagacatggtgaaaatacgtcttcccgggaaatattaatcaaccttattcaggcctataaagggcttttacagtattatacctggtctgaaaagaagatggaattgtcaaagcttgataaggatgattatgcttacaatgcagtagcccaggatgtgttcaaccacagctggaagacatctgcaaatatttctgcattgattaaaattcctggagtttgggacccttttgtgaagagttatgtagaaatgctggaattctatggggatcgagatggagcccaagaggtactcaccaattatgcatatgatgaaaagtttccatcaaatccaaatgcccatatctacttatacaactttctaaagagacagaaggcaccaagatcaaaattgataagtgtgcttaagcatctacagaaaatttcaataatgtacagtacactgagataaacagagaaagttggctccagctgccatctccatgtatgtatcatccacactatcccctgctgcccggatgagactgaggagagaggatca

SEQ ID NO: 31048 - DNA, 3679 bp, Homo sapiens
  source 1..3679: mol_type = unassigned DNA
gtccaaaccggaagaccgtgggtagctgcggcggggctgacccgtcccgagtgccaaagctggggttctacttgagatttccctcgtggtgccagggtccggcgagcatcacgccgaggcccattttccagacgaccacgacgaggccggggtcacctggcgagacgcactgactctgccagaggcccagccccagaactcagagaatggggcactgcatgtgaccaaggacctgctgtgggagccggcaacccctgggcctctccccatgctgcctcccctcatcgatccctgggaccctggcctgactgcccgggacctgcttttccgcggagggtgccggtatcggaagcggccccgagtcgtgctggatgtgactgagcagatcagccggttcctcttggatcatggagacgtagcctttgcgcccctggggaagctgatgctggagaatttcaagctggagggagcggggagccgcactaagaagaagacagtggtcagtgtgaagaagctgctccaggacctcggtggacaccagccctgggggtgtccctgggcttacctcagcaaccgacagcgccgcttctctatcctcgggggccccatcctgggcacgtcggtggcgagccacttggcagagctgctgcacgaggagctggtgctgcggtgggagcagctgcttctggatgaggcctgcactgggggcgcgctggcctgggttcctggaaggacaccccagttcgggcagctggtctaccctgctggaggcgcccaggacaggctgcatttccaagaggtcgttctgaccccaggtgacaatccccaattccttgggaaacctggacgcatccagctccagggacctgtccggcaagtggtgacatgcaccgtccagggagaaactctgctggccgtccgctctgactaccactgtgccgtgtggaagtttggtaaacagtggcagccaacccttctgcaggcaatgcaggtggagaaaggggccacggggatcagcctcagccctcacctgcccggggagctggccatctgcagccgctcgggagccgtctgcctgtggagccctgaggatgggctgcggcaaatctacagggaccctgagaccctcgtgttccgggactcctcttcgtggcgttgggcagacttcactgcgcaccctcgggtgctgaccgtgggtgaccgcaccggagtgaagatgctggacactcagggcccgccgggctgtggtctgttgctttttcgtttgggggcagaggcttcgtgccagaaaggggaacgtgtcctgcttacccagtacctggggcactccagccccaaatgcctcccccctactcttcatctcgtctgtacccagttctctctctacctagtggacgagcgccttcccctggtgccgatgctgaagtggaaccatggcctcccctccccgctcctgctggcccgactgctgcctccgccccggcccagctgcgtgcagcccctgctcctcggaggccagggtgggcagctgcagctgctgcacctggcagaaggggcgtcggtgccccgcctggcaggccccccccagtctcttccttccaggatcgactccctccctgcatttcctctgctggagcctaagatccagtggcggctgcaggagcgcctgaaagcaccgaccataggtctggctgccgtcgtcccgcccttgccctcagcgcccacaccaggcctggtgctcttccagctctcggcggcgggagatgtcttctaccagcagctccgcccccaggtggactccagcctccgcagagatgctgggcctcctggcgacacccaacctgactgccatgcccccacagcttcctggacctcccaggacactgccggctgcagccagtggctgaaggccctgctaaaagtgcccctggctcctcctgtgtggacagcacccaccttcacccaccgccagatgctgggcagcacagagctgcggagggaggaagaggaagggcagcggctgggtgtgctccgcaaggccatggcccgagggcagctcctgctgcagagagacctgggctccctccctgcggcagagccaccccctgcacccgagtcaggcctagaggacaagctcagtgagcgcctgggggaagcctgggcaggccgaggggctgcctggtgggagaggcagcagggcaggacctcggagcccgggagacagaccaggcggcccaagcgccggacccagctgtccagcagcttttcgctcagtggccatgtggatccctcagaggacaccagctcccctcatagccctgagtggccacctgctgatgctctgcccctgccccccacgaccccgccctcccaggagttgactccggatgcatgcgcccagggcgtcccatcagagcagcggcagatgctccgtgactacatggccaagctaccaccccagagggacaccccaggctgtgccaccacacctccccactcccaggcctccagcgtccgggccactcgctcccagcagcacacacccgtcctctctagctctcagcccctccggaagaagcctcgaatgggcttctgaggacacaaggtgggctgccctcaagccccagagagcccctcatccttcctctgggaccagatgtgccttccacagttgaaacttgagaagcagagctcgccaccttctggaggccactgtgatgatgagccaagcaatttggagccaagttgaagggacagggcaacaaaatacagtagtagtttcttttgtattttgtatattcgcctgaagatcatcccgcaaggcaggctggaggtgccggtgggcctgtgttgctgggattttagtctgtgctgggaggcagggctccgctgcgcctcagctgtgggggcctcaggcaggtccctcagttctcacgccttcctgtccagtggaatgggggccaggagtgctggctcctcgtgtttggtgagggtggagtgaggcccctgcagagctgctgatgaggtgggcacagcggccgttggcagctgctgttgtgggttgctttgtcaatctctgccccggtctgatgtttcctacagggagatgccttggatccaggttcagggactaaatacacttggcagctgaagatgaattggaatggtcacgttttttaggctggacagcgtcccgccacagctactacctgacactgagctcatgcagagagatgatggctgatgttccttctcccttgggacatgggtctggcacctgtgggctgtcgatagtgccctctgagcagagggtcacggtcatgtcagtttgggggaattctctgttgtgcctcacagactcccccctttctttcctccctccccttctcattttgatgtctaaagcatcaagtccctcttcctcggagtttctctagctgcagtggaagattctgttttcctgtggggaaaatgctcacttgagattttgcagggacccgggtctgtctggtttctgatgacatagtaagagaaaggtcttttttcaggttggctggtgaaaggaattgcatgtgactcacacaaacaggagctagcccaatcatacactgactcgcgtgggtgttaaaatgtttatcatgcctaagggagacatttatgattaaaccatttatgctac

SEQ ID NO: 31049 - DNA, 3693 bp, Homo sapiens
  source 1..3693: mol_type = unassigned DNA
atggacttccccagctccctccgccctgcattgtttctgaccggcccccttggtctgagcgacgtccctgacctctctttcatgtgcagctggcgagacgcactgactctgccagaggcccagccccagaactcagagaatggggcactgcatgtgaccaaggacctgctgtgggagccggcaacccctgggcctctccccatgctgcctcccctcatcgatccctgggaccctggcctgactgcccgggacctgcttttccgcggagggtgccggtatcggaagcggccccgagtcgtgctggatgtgactgagcagatcagccggttcctcttggatcatggagacgtagcctttgcgcccctggggaagctgatgctggagaatttcaagctggagggagcggggagccgcactaagaagaagacagtggtcagtgtgaagaagctgctccaggacctcggtggacaccagccctgggggtgtccctgggcttacctcagcaaccgacagcgccgcttctctatcctcgggggccccatcctgggcacgtcggtggcgagccacttggcagagctgctgcacgaggagctggtgctgcggtgggagcagctgcttctggatgaggcctgcactgggggcgcgctggcctgggttcctggaaggacaccccagttcgggcagctggtctaccctgctggaggcgcccaggacaggctgcatttccaagaggtcgttctgaccccaggtgacaatccccaattccttgggaaacctggacgcatccagctccagggacctgtccggcaagtggtgacatgcaccgtccagggagaaagtaaggcccttatatacactttcctccctcactggctgacctgctacctgacccctggccctttccatccctcctcagctctgctggccgtccgctctgactaccactgtgccgtgtggaagtttggtaaacagtggcagccaacccttctgcaggcaatgcaggtggagaaaggggccacggggatcagcctcagccctcacctgcccggggagctggccatctgcagccgctcgggagccgtctgcctgtggagccctgaggatgggctgcggcaaatctacagggaccctgagaccctcgtgttccgggactcctcttcgtggcgttgggcagacttcactgcgcaccctcgggtgctgaccgtgggtgaccgcaccggagtgaagatgctggacactcagggcccgccgggctgtggtctgttgctttttcgtttgggggcagaggcttcgtgccagaaaggggaacgtgtcctgcttacccagtacctggggcactccagccccaaatgcctcccccctactcttcatctcgtctgtacccagttctctctctacctagtggacgagcgccttcccctggtgccgatgctgaagtggaaccatggcctcccctccccgctcctgctggcccgactgctgcctccgccccggcccagctgcgtgcagcccctgctcctcggaggccagggtgggcagctgcagctgctgcacctggcaggagaaggggcgtcggtgccccgcctggcaggccccccccagtctcttccttccaggatcgactccctccctgcatttcctctgctggagcctaagatccagtggcggctgcaggagcgcctgaaagcaccgaccataggtctggctgccgtcgtcccgcccttgccctcagcgcccacaccaggcctggtgctcttccagctctcggcggcgggagatgtcttctaccagcagctccgcccccaggtggactccagcctccgcagagatgctgggcctcctggcgacacccaacctgactgccatgcccccacagcttcctggacctcccaggacactgccggctgcagccagtggctgaaggccctgctaaaagtgcccctggctcctcctgtgtggacagcacccaccttcacccaccgccagatgctgggcagcacagagctgcggagggaggaagaggaagggcagcggctgggtgtgctccgcaaggccatggcccgagggcagctcctgctgcagagagacctgggctccctccctgcggcagagccaccccctgcacccgagtcaggcctagaggacaagctcagtgagcgcctgggggaagcctgggcaggccgaggggctgcctggtgggagaggcagcagggcaggacctcggagcccgggagacagaccaggcggcccaagcgccggacccagctgtccagcagcttttcgctcagtggccatgtggatccctcagaggacaccagctcccctcatagccctgagtggccacctgctgatgctctgcccctgccccccacgaccccgccctcccaggagttgactccggatgcatgcgcccagggcgtcccatcagagcagcggcagatgctccgtgactacatggccaagctaccaccccagagggacaccccaggctgtgccaccacacctccccactcccaggcctccagcgtccgggccactcgctcccagcagcacacacccgtcctctctagctctcagcccctccggaagaagcctcgaatgggcttctgaggacacaaggtgggctgccctcaagccccagagagcccctcatccttcctctgggaccagatgtgccttccacagttgaaacttgagaagcagagctcgccaccttctggaggccactgtgatgatgagccaagcaatttggagccaagttgaagggacagggcaacaaaatacagtagtagtttcttttgtattttgtatattcgcctgaagatcatcccgcaaggcaggctggaggtgccggtgggcctgtgttgctgggattttagtctgtgctgggaggcagggctccgctgcgcctcagctgtgggggcctcaggcaggtccctcagttctcacgccttcctgtccagtggaatgggggccaggagtgctggctcctcgtgtttggtgagggtggagtgaggcccctgcagagctgctgatgaggtgggcacagcggccgttggcagctgctgttgtgggttgctttgtcaatctctgccccggtctgatgtttcctacagggagatgccttggatccaggttcagggactaaatacacttggcagctgaagatgaattggaatggtcacgttttttaggctggacagcgtcccgccacagctactacctgacactgagctcatgcagagagatgatggctgatgttccttctcccttgggacatgggtctggcacctgtgggctgtcgatagtgccctctgagcagagggtcacggtcatgtcagtttgggggaattctctgttgtgcctcacagactcccccctttctttcctccctccccttctcattttgatgtctaaagcatcaagtccctcttcctcggagtttctctagctgcagtggaagattctgttttcctgtggggaaaatgctcacttgagattttgcagggacccgggtctgtctggtttctgatgacatagtaagagaaaggtcttttttcaggttggctggtgaaaggaattgcatgtgactcacacaaacaggagctagcccaatcatacactgactcgcgtgggtgttaaaatgtttatcatgcctaagggagacatttatgattaaaccatttatgctac

SEQ ID NO: 31050 - DNA, 1318 bp, Homo sapiens
  source 1..1318: mol_type = unassigned DNA
ctacttgagatttccctcgtggtgccagggtccggcgagcatcacgccgaggcccattttccagacgaccacgacgaggccggggtcactgcattttctgggaggcactgtgcttgacagtaggaagacgatgctcagatgcagtccctggctgtggagtaacttgagcgtcttgggggtgtagtctgtaaatgatggacttccccagctccctccgccctgcattgtttctgaccggcccccttggtctgagcgacgtccctgacctctctttcatgtgcagctggcgagacgcactgactctgccagaggcccagccccagaactcagagaatggggcactgcatgtgaccaaggacctgctgtgggagccggcaacccctgggcctctccccatgctgcctcccctcatcgatccctgggaccctggcctgactgcccgggacctgcttttccgcggagggtgccggtatcggaagcggccccgagtcgtgctggatgtgactgagcagatcagccggttcctcttggatcatggagacgtagcctttgcgcccctggggaagctgatgctggagaatttcaagctggagggagcggggagccgcactaagaagaagacagtggtcagtgtgaagaagctgctccaggacctcggtggacaccagccctgggggtgtccctgggcttacctcagcaaccgacagcgccgcttctctatcctcgggggccccatcctgggcacgtcggtggcgagccacttggcagagctgctgcacgaggagctggtgctgcggtgggagcagctgcttctggatgaggcctgcactgggggcgcgctggcctgggttcctggaaggacaccccagttcgggcagctggtctaccctgctggaggcgcccaggacaggctgcatttccaagaggtcgttctgaccccaggtgacaatccccaattccttgggaaacctggacgcatccagctccagggacctgtccggcaagtggtgacatgcaccgtccagggagaaactctgctggccgtccgctctgactaccactgtgccgtgtggaagtttggtaaacagtggcagccaacccttctgcaggcaatgcaggtggagaaaggggccacggggatcagcctcagccctcacctgcccggggagctggccatctgcagccgctcgggagccgtctgcctgtggagccctgaggatgggtatcgccgcttcctgtgaaaccccccaccctaacgaactgaactccgccctgttgagcatgtcgcgacccttgagccccttccccatcagcctgt

SEQ ID NO: 31051 - DNA, 3682 bp, Homo sapiens
  source 1..3682: mol_type = unassigned DNA
gtccaaaccggaagaccgtgggtagctgcggcggggctgacccgtcccgagtgccaaagctggggttctacttgagatttccctcgtggtgccagggtccggcgagcatcacgccgaggcccattttccagacgaccacgacgaggccggggtcacctggcgagacgcactgactctgccagaggcccagccccagaactcagagaatggggcactgcatgtgaccaaggacctgctgtgggagccggcaacccctgggcctctccccatgctgcctcccctcatcgatccctgggaccctggcctgactgcccgggacctgcttttccgcggagggtgccggtatcggaagcggccccgagtcgtgctggatgtgactgagcagatcagccggttcctcttggatcatggagacgtagcctttgcgcccctggggaagctgatgctggagaatttcaagctggagggagcggggagccgcactaagaagaagacagtggtcagtgtgaagaagctgctccaggacctcggtggacaccagccctgggggtgtccctgggcttacctcagcaaccgacagcgccgcttctctatcctcgggggccccatcctgggcacgtcggtggcgagccacttggcagagctgctgcacgaggagctggtgctgcggtgggagcagctgcttctggatgaggcctgcactgggggcgcgctggcctgggttcctggaaggacaccccagttcgggcagctggtctaccctgctggaggcgcccaggacaggctgcatttccaagaggtcgttctgaccccaggtgacaatccccaattccttgggaaacctggacgcatccagctccagggacctgtccggcaagtggtgacatgcaccgtccagggagaaactctgctggccgtccgctctgactaccactgtgccgtgtggaagtttggtaaacagtggcagccaacccttctgcaggcaatgcaggtggagaaaggggccacggggatcagcctcagccctcacctgcccggggagctggccatctgcagccgctcgggagccgtctgcctgtggagccctgaggatgggctgcggcaaatctacagggaccctgagaccctcgtgttccgggactcctcttcgtggcgttgggcagacttcactgcgcaccctcgggtgctgaccgtgggtgaccgcaccggagtgaagatgctggacactcagggcccgccgggctgtggtctgttgctttttcgtttgggggcagaggcttcgtgccagaaaggggaacgtgtcctgcttacccagtacctggggcactccagccccaaatgcctcccccctactcttcatctcgtctgtacccagttctctctctacctagtggacgagcgccttcccctggtgccgatgctgaagtggaaccatggcctcccctccccgctcctgctggcccgactgctgcctccgccccggcccagctgcgtgcagcccctgctcctcggaggccagggtgggcagctgcagctgctgcacctggcaggagaaggggcgtcggtgccccgcctggcaggccccccccagtctcttccttccaggatcgactccctccctgcatttcctctgctggagcctaagatccagtggcggctgcaggagcgcctgaaagcaccgaccataggtctggctgccgtcgtcccgcccttgccctcagcgcccacaccaggcctggtgctcttccagctctcggcggcgggagatgtcttctaccagcagctccgcccccaggtggactccagcctccgcagagatgctgggcctcctggcgacacccaacctgactgccatgcccccacagcttcctggacctcccaggacactgccggctgcagccagtggctgaaggccctgctaaaagtgcccctggctcctcctgtgtggacagcacccaccttcacccaccgccagatgctgggcagcacagagctgcggagggaggaagaggaagggcagcggctgggtgtgctccgcaaggccatggcccgagggcagctcctgctgcagagagacctgggctccctccctgcggcagagccaccccctgcacccgagtcaggcctagaggacaagctcagtgagcgcctgggggaagcctgggcaggccgaggggctgcctggtgggagaggcagcagggcaggacctcggagcccgggagacagaccaggcggcccaagcgccggacccagctgtccagcagcttttcgctcagtggccatgtggatccctcagaggacaccagctcccctcatagccctgagtggccacctgctgatgctctgcccctgccccccacgaccccgccctcccaggagttgactccggatgcatgcgcccagggcgtcccatcagagcagcggcagatgctccgtgactacatggccaagctaccaccccagagggacaccccaggctgtgccaccacacctccccactcccaggcctccagcgtccgggccactcgctcccagcagcacacacccgtcctctctagctctcagcccctccggaagaagcctcgaatgggcttctgaggacacaaggtgggctgccctcaagccccagagagcccctcatccttcctctgggaccagatgtgccttccacagttgaaacttgagaagcagagctcgccaccttctggaggccactgtgatgatgagccaagcaatttggagccaagttgaagggacagggcaacaaaatacagtagtagtttcttttgtattttgtatattcgcctgaagatcatcccgcaaggcaggctggaggtgccggtgggcctgtgttgctgggattttagtctgtgctgggaggcagggctccgctgcgcctcagctgtgggggcctcaggcaggtccctcagttctcacgccttcctgtccagtggaatgggggccaggagtgctggctcctcgtgtttggtgagggtggagtgaggcccctgcagagctgctgatgaggtgggcacagcggccgttggcagctgctgttgtgggttgctttgtcaatctctgccccggtctgatgtttcctacagggagatgccttggatccaggttcagggactaaatacacttggcagctgaagatgaattggaatggtcacgttttttaggctggacagcgtcccgccacagctactacctgacactgagctcatgcagagagatgatggctgatgttccttctcccttgggacatgggtctggcacctgtgggctgtcgatagtgccctctgagcagagggtcacggtcatgtcagtttgggggaattctctgttgtgcctcacagactcccccctttctttcctccctccccttctcattttgatgtctaaagcatcaagtccctcttcctcggagtttctctagctgcagtggaagattctgttttcctgtggggaaaatgctcacttgagattttgcagggacccgggtctgtctggtttctgatgacatagtaagagaaaggtcttttttcaggttggctggtgaaaggaattgcatgtgactcacacaaacaggagctagcccaatcatacactgactcgcgtgggtgttaaaatgtttatcatgcctaagggagacatttatgattaaaccatttatgctac

SEQ ID NO: 31052 - DNA, 2747 bp, Homo sapiens
  source 1..2747: mol_type = unassigned DNA
gtgggtagctgcggcggggctgacccgtcccgagtgccaaagctggggttctacttgagatttccctcgtggtgccagggtccggcgagcatcacgccgaggcccattttccagacgaccacgacgaggccggggtcacatccctgggaccctggcctgactgcccgggacctgcttttccgcggagggtgccggtatcggaagcggccccgagtcgtgctggatgtgactgagcagccggttcctcttggatcatggagacgtagcctttgcgcccctggggaagctgatgctggagaatttcaagctggagggagcggggagccgcactaagaagaagacagtggtcagtgtgaagaagctgctccaggacctcggtggacaccagccctgggggtgtccctgggcttacctcagcaaccgacagcgccgcttctctatcctcgggggccccatcctgggcacgtcggtggcgagccacttggcagagctgctgcacgaggagctggtgctgcggtgggagcagctgcttctggatgaggcctgcactgggggcgcgctggcctgggttcctggaaggacaccccagttcgggcagctggtctaccctgctggaggcgcccaggacaggctgcatttccaagaggtcgttctgaccccaggtgacaatccccaattccttgggaaacctggacgcatccagctccagggacctgtccggcaagtggtgacatgcaccgtccagggagaaactctgctggccgtccgctctgactaccactgtgccgtgtggaagtttggtaaacagtggcagccaacccttctgcaggcaatgcaggtggagaaaggggccacggggatcagcctcagccctcacctgcccggggagctggccatctgcagccgctcgggagccgtctgcctgtggagccctgaggatgggtatcgccgcttcctgtgaaaccccccaccctaacgaactgaactccgccctgttgagcatgtcgcgacccttgagccccttccccatcagcctgtccccctgcccacggcttgcctgtctccccaaggctgcggcaaatctacagggaccctgagaccctcgtgttccgggactcctcttcgtggcgttgggcagacttcactgcgcaccctcgggtgctgaccgtgggtgaccgcaccggagtgaagatgctggacactcagatggtcactagaggctgctgcttaccagcggctctgctgggcccagacaaccacccagcaaaccaaactcaaccctggatgaatctgtggcccaaacacgcagtggatcccacagtcggtgctaacagttctctctctacctagtggacgagcgccttcccctggtgccgatgctgaagtggaaccatggcctcccctccccgctcctgctggcccgactgctgcctccgccccggcccagctgcgtgcagcccctgctcctcggaggccagggtgggcagctgcagctgctgcacctggcagaaggggcgtcggtgccccgcctggcaggccccccccagtctcttccttccaggatcgactccctccctgcatttcctctgctggagcctaagatccagtggcggctgcaggagcgcctgaaagcaccgaccataggtctggctgccgtcgtcccgcccttgccctcagcgcccacaccaggcctggtgctcttccagctctcggcggcgggagatgtcttctaccagcagctccgcccccaggtggactccagcctccgcagagatgctgggcctcctggcgacacccaacctgactgccatgcccccacagcttcctggacctcccaggacactgccggctgcagccagtggctgaaggccctgctaaaagtgcccctggctcctcctgtgtggacagcacccaccttcacccaccgccagatgctgggcagcacagagctgcggagggaggaagaggaagggcagcggctgggtgtgctccgcaaggccatggcccgagggcagctcctgctgcagagagacctgggctccctccctgcggcagagccaccccctgcacccgagtcaggcctagaggacaagctcagtgagcgcctgggggaagcctgggcaggccgaggggctgcctggtgggagaggcagcagggcaggacctcggagcccgggagacagaccaggcggcccaagcgccggacccagctgtccagcagcttttcgctcagtggccatgtggatccctcagaggacaccagctcccctcatagccctgagtggccacctgctgatgctctgcccctgccccccacgaccccgccctcccaggagttgactccggatgcatgcgcccagggcgtcccatcagagcagcggcagatgctccgtgactacatggccaagctaccaccccagagggacaccccaggctgtgccaccacacctccccactcccaggcctccagcgtccgggccactcgctcccagcagcacacacccgtcctctctagctctcagcccctccggaagaagcctcgaatgggcttctgaggacacaaggtgggctgccctcaagccccagagagcccctcatccttcctctgggaccagatgtgccttccacagttgaaacttgagaagcagagctcgccaccttctggaggccactgtgatgatgagccaagcaatttggagccaagttgaagggacagggcaacaaaatacagtagtagtttcttttgt

SEQ ID NO: 31053 - DNA, 2540 bp, Homo sapiens
  source 1..2540: mol_type = unassigned DNA
cttttcttccgcacggttggaggaggtcggctggttatcgggagttggagggctgaggtcgggagggtggtgtgtacagagctctaggacaccaggccagtcgcgggttttgggccgaggcctgggttacaagcagcaagtgcgcggttggggccactgcgaggccgttttagaaaactgtttaaaacaaagagcaattgatggataaatcaggaatagattctcttgaccatgtgacatctgatgctgtggaacttgcaaatcgaagtgataactcttctgatagcagcttatttaaaactcagtgtatcccttactcacctaaaggggagaaaagaaaccccattcgaaaatttgttcgtacacctgaaagtgttcacgcaagtgattcatcaagtgactcatcttttgaaccaataccattgactataaaagctatttttgaaagattcaagaacaggaaaaagagatataaaaaaaagaaaaagaggaggtaccagccaacaggaagaccacggggaagaccagaaggaaggagaaatcctatatactcactaatagataagaagaaacaatttagaagcagaggatctggcttcccatttttagaatcagagaatgaaaaaaacgcaccttggagaaaaattttaacgtttgagcaagctgttgcaagaggattttttaactatattgaaaaactgaagtatgaacaccacctgaaagaatcattgaagcaaatgaatgttggtgaagatttagaaaatgaagattttgacagtcgtagatacaaatttttggatgatgatggatccatttctcctattgaggagtcaacagcagaggatgaggatgcaacacatcttgaagataacgaatgtgatatcaaattggcaggggatagtttcatagtaagttctgaattccctgtaagactgagtgtatacttagaagaagaggatattactgaagaagctgctttgtctaaaaagagagctacaaaagccaaaaatactggacagagaggcctgaaaatgtgacaggatcatgaatgtcaaaggcttttatcttgagaacatggtgtctggagttaaaggtattggcatactccacacatctgtaccattcttgagtgatcgcttaggaatgaatgtgatttgaactcattcatgttgagagggtgtcaaattgagaaccaggtagatccccaccacctacagtaaaaaggaccctaaagtaaattggttgaagaaattagatcccaaagattcttggtgaattttgaagtcttcatcagtatatccatattaaaacgagatgacagaagccaaagtaattatggcaagtaatggtttttatcttaactataagttatttgctcaagggtgtaatggtcattaccaaggcttttagaatgcagtttctcatttgctgtggacatgaccataaaaaaatttcccagtaggttttctatctgctactttgctagcaatcagcttattgggaacagttgattaactgtaatagaaatgcaatacaaataaaatgtgaaccacatgtgatttttctttaaaatcagtgagatttgaaaattctcctagatctcttgaatcatgcaaatttgctttgcctttatattgtaacccttgtgggttgctaataaccaagcagtttgtagtagagttaactcaggctcgttctagggactcattcatgttcactcactgtacactcatctctggaaatgtaaaatttacttttatactattgttatgtagggctgacaggacaactggatcagtttcattaaaaaggtatgtatgcattagaaaagacatttgtatgggtcatttcaaagagggcttatgaggctgtgaaacccagagctcttaacgctgtgaccaaagatggaagttctctataggaagccatagcactcctaatgtttggtgctatgttttcctgaggagatataaaacgtaataatccaggattgttgccatgtgagagttttaaaggttaatcaaaatttctcttcttcagggcaaacttgaagataaatcttttgactccagctctttagaggatctaaagtgaccttgatggacagtggaagaaatcacaacatggaattcctcgaataacaatttattgactttaaataattttgtctaatgctacatatacacaattaaaaaacctttacactatttctagaaagtcagcatgtatttttggctcgaagtttctctagtgttttctgtggaaggaataaaaatttgagtttcagttgtgtacttcatgcttgaaaaattaagtccttctccctcagttatactcaccttatggaattcttttgcccttgctctgttttgggcataagcttcttgttttgttttttcttccttttgttgtttcacttcagctagttgattgtataacctgtaaagaatttatatagaattagagacaaacactgcaaaaagtgaatcactaaaaaaaaaaaaaaaattaaccctaccttagacccctttggtgcctta

SEQ ID NO: 31054 - DNA, 2082 bp, Homo sapiens
  source 1..2082: mol_type = unassigned DNA
caaaggattacaaaacactcaggcacacatcccacccgtcaccctcgccacacacccgggaccagatttagaaagccaggcgacagctcagcaaacgcgagaccaccggaaacgaaccgggctgagaggctgtttcctcacagttctcatccactcacaagtgaccgcacgttttgtttttgttatttgccgaaatgttcttggctattccactcacctaaacggtcacggtagcaaaacacccagagtccggatcttcgcctaggccaaccccgcctcctcagaatacgcgagctagagctccgcccacgttagtcagtcctccctgcgcggcgagaaaaatggcgcccccacgtcgcgtctcctcccaccgctcgccttcttcccggaagctaagttgtatcgcgagatttcggcctgactattacttgggccacggaaatagccaacccttttcttccgcacggttggaggaggtcggctggttatcgggagttggagggctgaggtcgggagggtggtgtgtacagagctctaggacaccaggccagtcgcgggttttgggccgaggcctgggttacaagcagcaagtgcgcggttggggccactgcgaggccgttttagaaaactgtttaaaacaaagagcaattgatggataaatcaggaatagattctcttgaccatgtgacatctgatgctgtggaacttgcaaatcgaagtgataactcttctgatagcagcttatttaaaactcagtgtatcccttactcacctaaaggggagaaaagaaaccccattcgaaaatttgttcgtacacctgaaagtgttcacgcaagtgattcatcaagtgactcatcttttgaaccaataccattgactataaaagctatttttgaaagattcaagaacaggaaaaagagatataaaaaaaagaaaaagaggaggtaccagccaacaggaagaccacggggaagaccagaaggaaggagaaatcctatatactcactaatagataagaagaaacaatttagaagcagaggatctggcttcccatttttagaatcagagaatgaaaaaaacgcaccttggagaaaaattttaacgtttgagcaagctgttgcaagaggattttttaactatattgaaaaactgaagtatgaacaccacctgaaagaatcattgaagcaaatgaatgttggtgaagatttagaaaatgaagattttgacagtcgtagatacaaatttttggatgatgatggatccatttctcctattgaggagtcaacagcagaggatgaggatgcaacacatcttgaagataacgaatgtgatatcaaattggcaggggatagtttcatagtaagttctgaattccctgtaagactgagtgtatacttagaagaagaggatattactgaagaagctgctttgtctaaaaagagagctacaaaagccaaaaatactggacagagaggcctgaaaatgtgacaggatcatgaatgtcaaaggtgaagcatatagaaaaaacgacttcatagaaatgaataaagataaatgtggatatatgtaccagtctggtggtgaagaaattctgaaacccagaactttataacaagaaaaaaaatttttaaccctgtgaagaagtttgtgaaagaaacttgtgaagtagtaataattagaaaaaaaaccattaaaacaccagagaaaatacatagaaaaatttgagaaattgtcatttgatttctgaataagagcttacaggtgtcctgtgagtattgaaacaatgaaatgtagtgattttaattttgaaaagaaaatcttaaagtaacttgacacccaaccatcttgaagaggggatttgaaatgctgtaattttatcccagctttgttcagccatgacaagtgacctgtcagatgcttagtattgtaataacctcatttccctttccaaatttagagtatctttaatactattttttttagacagagtctcgatctgtcacccaggctgtagtgcaatggccgcagtcttggcttactgcaacctccatctcccgggttcaagcgattctgcctcagcct

SEQ ID NO: 31055 - DNA, 1735 bp, Homo sapiens
  source 1..1735: mol_type = unassigned DNA
ttttcttccgcacggttggaggaggtcggctggttatcgggagttggagggctgaggtcgggagggtggtgtgtacagagctctaggacaccaggccagtcgcgggttttgggccgaggcctgggttacaagcagcaagtgcgcggttggggccactgcgaggccgttttagaaaactgtttaaaacaaagagcaattgatggataaatcaggaatagattctcttgaccatgtgacatctgatgctgtggaacttgcaaatcgaagtgataactcttctgatagcagcttatttaaaactcagtgtatcccttactcacctaaaggggagaaaagaaaccccattcgaaaatttgttcgtacacctgaaagtgttcacgcaagtgattcatcaagtgactcatcttttgaaccaataccattgactataaaagctatttttgaaagattcaagaacaggaaaaagagatataaaaaaaagaaaaagaggaggtaccagccaacaggaagaccacggggaagaccagaaggaaggagaaatcctatatactcactaatagataagaagaaacaatttagaagcagaggatctggcttcccatttttagaatcagagaatgaaaaaaacgcaccttggagaaaaattttaacgtttgagcaagctgttgcaagaggattttttaactatattgaaaaactgaagtatgaacaccacctgaaagaatcattgaagcaaatgaatgttggtgaagatttagaaaatgaagattttgacagtcgtagatacaaatttttggatgatgatggatccatttctcctattgaggagtcaacagcagaggatgaggatgcaacacatcttgaagataacgaatgtgatatcaaattggcaggggatagtttcatagtaagttctgaattccctgtaagactgagtgtatacttagaagaagaggatattactgaagaagctgctttgtctaaaaagagagctacaaaagccaaaaatactggacagagaggcctgaaaatgtgacaggatcatgaatgtcaaaggcttttatcttgagaacatggtgtctggagttaaaggactattgttagatctgtgggaaggaattacaagacagttgctaaaagtttgaaaaagacggttgctaaacgttatgaaaaaccagataatctacttttttaccttaggtattggcatactccacacatctgtaccattcttgagtgatcgcttaggaatgaatgtgatttgaactcattcatgttgagagggtgtcaaattgagaaccaggtagatccccaccacctacagtaaaaaggaccctaaagtaaattggttgaagaaattagatcccaaagattcttggtgaattttgaagtcttcatcagtatatccatattaaaacgagatgacagaagccaaagtaattatgggctgacaggacaactggatcagtttcattaaaaagggcaaacttgaagataaatcttttgactccagctctttagaggatctaaagtgaccttgatggacagtggaagaaatcacaacatggaattcctcgaataacaatttattgactttaaataattttgtctaatgctacatatacacaattaaaaaacctttacactatttctagaaagtcagcatgtatttttggctcgaagtttctctagtgttttctgtggaaggaataaaaatttgagtttcagttgtgta

SEQ ID NO: 31056 - DNA, 335 bp, Homo sapiens
  source 1..335: mol_type = unassigned DNA
cctcgggaaaccgaacgcaacgctcagactggaaacaaaggagctggcccagcaactttcccagaacgcaccgcaagctccctcctcgggacgctgcattttcattttgcattgagcctcacaaattacacagctaggcttgctgctgaatacggcagtgagggacatgccataccagtcctggagcttcgtcattgcccagaccctgtggatcaaatgcagtgggctgcctaaaggatcggactttttatccccggaattgtccaaactatggagcaaagcagaaaactgtttaaaacaaagagcaattgatggataaatcaggaatagattct

SEQ ID NO: 31057 - DNA, 6625 bp, Homo sapiens
  source 1..6625: mol_type = unassigned DNA
gtagatttggttgctgtgtacgtggaagaagcaagcgcatgcgcacatgggcccccttcgtctcagctgtgcgggaacggccgagggtaacatcccgggctcgcgggaggctgtcggggtaatggccacacgctgacagaaccagccgagtggaaaaggggagcgaagccgttcctctgcacccttccccaggcctgaggccttcccgcttggtgctgccgccgccactgccggctgaggaggggcgatgagttggttcaacgcctcccagctctccagcttcgctaagcaggccctgtcccaggcccagaagtctattgacagggttctggacatccaggaagaggagccgagcatctgggccgagaccattccgtatggagagccgggaataagttcccctgtcagtggaggatgggatacttcaacctgggggttgaaatcaaacactgaacctcagagtccaccaatagcctctcctaaagcaatcacaaagccagttcggaggactgtggtcgatgaatctgaaaatttcttcagtgcctttctctcgccaactgtaagtttgaaagtatctgaaagtgtaattgatgtgaaaacaactatggaaagtatatctaatacgtctacgcagtctctcacagcagaaacaaaggacatagctttggaacctaaggaacaaaaacatgaagacaggcagagcaatacaccttctcctcctgttagtaccttttcatcaggtacttctaccaccagtgatattgaagttttagatcatgaaagtgtaataagtgagagctcagcgagctcgagacaagagactacagattcaaaatcaagtcttcacttgatgcagacatcttttcagcttctctctgcatctgcttgtcctgaatataatcgtttagatgatttccaaaaactcactgagagttgctgttcatctgatgcttttgaaagaatagactcatttagtgtacagtcattagatagccggagtgtaagtgaaatcaattcagatgatgaattgtcaggcaagggatatgctttagtgcctattatagttaattcttcaactccaaagtctaaaacagttgaatctgctgaaggaaaatctgaagaagtaaatgaaacattagttatacccactgaggaagcagaaatggaagaaagtggacgaagtgcaactcctgttaactgtgaacagcctgatatcttggtttcttccacaccaataaatgaaggacagactgtgttagacaaggtggctgagcagtgtgaacctgctgaaagtcagccagaagcactttctgagaaggaagatgtttgcaaggtaactctaacagttgaatttctgaatgaaaagctggaaaaaagggaggctcagttattatctcttagtaaggaaaaagcacttctagaagaagcttttgataacctgaaagatgaaatgttcagagtgaaagaagaaagcagtagcatttcttccttgaaagatgagtttactcaaagaattgcagaagcagaaaagaaagttcaactagcctgcaaagagagagatgctgctaaaaaggaaatcaaaaacataaaagaagaacttgccactagattaaatagtagtgaaactgcagaccttttgaaagagaaagatgagcagatccgagggttaatggaagaaggagaaaaactttcaaaacagcagctgcacaattctaacatcatcaagaaattaagagctaaagacaaggagaatgaaaatatggttgcaaagctgaacaaaaaagttaaagagctagaagaggagttgcagcatttgaaacaggtccttgatggcaaagaagaggttgagaaacaacatagagaaaatattaaaaaactaaattccatggtagaacgccaagagaaagatcttggccgtcttcaggtagacatggatgaacttgaagaaaagaaccgaagtattcaggctgccctggatagtgcatacaaagaacttactgatcttcacaaagccaatgctgcaaaggatagtgaggcacaggaagctgctctgagccgtgaaatgaaagctaaagaagaactttctgcagcattagagaaggcccaagaagaagcccgtcagcagcaagaaacattagccattcaagtgggggaccttaggcttgcattgcagcgtacagaacaagcggctgccagaaaggaggattatttacgccatgagatcggtgaacttcagcagagactccaggaagcagagaatcgaaaccaggaactgagtcaaagtgtttcatcaacaacaagaccattgcttcgacaaatagaaaatttgcaagcaaccctgggatcccagacatcgtcgtgggagaaattagagaagaatctttctgataggcttggtgaatcccagaccttgctggcagcagcagttgagagagaacgtgcagctacagaagaactccttgctaacaaaattcagatgtcttccatggagtcacagaattctcttttaagacaggaaaacagtagatttcaagcccagctagaatcagagaaaaataggctgtgtaaactggaggatgagaacaataggtaccaggttgaattggaaaacctaaaagatgaatatgtaagaacacttgaagagacgaggaaagaaaagacattgttgaatagtcagttagaaatggaaagaatgaaagttgaacaagaaaggaagaaagccatttttactcaagaaacaataaaagaaaaggaacgcaagccattttctgtttctagcactcccaccatgtcacgctcaagttcaataagtggtgttgatatggcaggactacagacatcttttctgtctcaggatgagtctcatgatcactcatttggaccaatgcctatatcagcaaatggaagcaatctttatgatgctgtaaggatgggagcaggatcaagcataattgaaaacctacagtctcagctaaagctaagggaaggggaaatcactcatttacagctagaaattggcaatctagaaaaaactcgatcaataatggctgaagaactagttaaattaacaaatcaaaatgatgaacttgaagagaaggtgaaggagatacccaaacttagaactcagctaagagatttggatcaaaggtacaacactattctgcagatgtatggagaaaaagcagaagaggcagaagaacttcgattagatctcgaagatgtaaaaaatatgtacaaaactcaaatagatgaacttttaagacaaagtctcagttaacttgtgaaaattgaattcccatcaaactgaatgtaagcatttaatatctaaacatttaatgtggacttccaataaattcttttatagaattagaaagtgggatttactgtagagtgtaaaaatttttttaaaattgttttacactatgtagtaatatttacagttaaattattttgtgcaatatttgaactttatttttgaaactattctttaaagatttattttttaaagcattcattttttttccttgaatagcacagagatttattactttatcctcatataaatatggctagagaagaagaatggtgttcatatatgtattgtagatatacaactagttgtatctataatttgtaagtgtttatatatatattaagaacatttgaagagtaatgttaacatactgaaactttgaaatctttcacatttaaaatttcaacatatcttaattactgctcatgaaaatgtacattaagtgttaaagtaaaaaattattaaatctgtggctattaaattttaaactaatttttttcctttaaaagtaagagtcacactgacactgtctgaaatttaaagagtgaatgatttaaacttaaaaaaaattttgatctgaaaatttatttcacccagctttcacaattaagtctgtataaaatgtggtaccttttggtacctatccagagaaacctgtacatattcaatgttatctagatgtgattggataatggagaaaatttatttataatgattttgcaatggcatcaataacatttaaatgattttgaagaagtattattttactaccctataaaatgaatcgaaaataataaagttcttaacataatttactctttaaaaattacctgttcatattttgtaaacccatatttttagcacattaaaaatgaatgtttgatattacagaatattcataacaaaatggaagaattataggaattaacttgaatttggcatttttaattttgtgatttatcattttattttttcttgaaatttcaaacacaaggaaagcatagaatagcttttaaaagtagctatgccttcttccaaatgttattttattcaaaaaggtaaccaggttgtgttttaaacctgtgaaatattgtgatgcattttattactgaaagttatttaactgcctttacttgcacataaaaactctcatttacggccaggtgctgtggctcatgcctgtaatcccagcactttgggaggccaaggcgggcatatcacctgatgtcaggagttcaagaccagcatggccagcagtttggtgaaaccccatctctactaaaaatacaaaaattagcctggcgtggtggtgtgcgcctgtaatcctagctactcgggaggctgaggcaggagcattgcttgaacctgggaggtggaggttacaatgagccaagattgtgccactgcactccagcatgggtgacagagaaagactccgtctcaaaaaaaaaaaaacaaactcttatttaatttttagttaaaattaaaacactagtacttcagaatatagatacaagtacaccatcttgaagaatttggagtttttcagggcaattcaaatgacctcattttttgttctttttgtattccagacagtgtttctgtcattggatctctgattggtagtgttaataaatattctttcagtgtgagccagattcataaaattaattttcttcattttagtagtaaaaagtagtctaatagctttttgtcagcttgatttttttgtgtgtgtaatattcaagggcagaatgacaggacagataagcaataagaaatgtatagaattagaaaatatagtagttccctcttacccatgggacatacgttccaagacccccagtgaacgtctgaaaccatggatagtatagacacctctatacactgttttttcctatacatatatacctatgataaagttctatttataaatcagggacagcaagagataaacaataactgcaaatagaacaattataacagtgcactgtaataaaagtgatgtaaatgtgatatgtctgtctctttctctcaaaatatcttattgtactgtactcacctgtaatcagactgtggttgaccgtgagtaaccgaaaccacagaaagcaaaatcgtggataaggggagactactctatatgaaacttaagttacaaaattctctgaagcatttgaaactagacgttttggaattataaaatagtccctttaaaatatccactagtagaaaaaaacttcatttgcagagaaaagattgcaataaaactcattcctaaacttttcaattttataaaattaaacattctttttttatccgtattaacaatttctagttacatagtttctagttacatattaccatatattactctttatctacaaataaatagctgatactcaaactgatcatattttgattgttaaacacttggatctctcaatacttctgtaagttaaagtgaacttaaacagtttcttgaaaaactccagtaggtggcagaatacctattgaatattcgttgctatactttgctgtttgtcattaaaacatctctacccatattcttgcaaaataatatttatattttaatggataggaaaatgatttgcaattagatgtttccattcttgaaagaaaaaagctgcaaataacattttcaagaatataaaaaaatgagtaaacaaagggaaggttgtttggtcatttatagacaattaagcacagactgtagatgtccttccaattcttgggaggctaaactgagtctaccatttcttacatttcttttacctattttttgagaattgccagttgtacagtgtttagcatgtggaatgtaccaaatatatctatgttgtgacttaagatattctaaatgtggataacttctgacctaggaaacatgaagtttgtagtgaagtaagtgaaaagaatgttcaggaaattttttttctccatctcttcagttggcatttattgagagttttatttgaatgcttattaaaagtatatgatttataatatttagaaaatagaagaaaaaagaaaactgtagatgttttatcttgttttaatactgtatgtttagtacgtatacatttatgttctagtgtatcaaaatttttcattttcattaaagtgaatccaattttccatattctaggtccattttaaaccatgaaaactttaatcacatattttgtaaagggctgaaagtatgatttaaactacagattgatatattttaattctaaatgaaaggtaatgtaaataagcatggatctgattgaataaagattttaaaatagt

SEQ ID NO: 31058 - DNA, 6849 bp, Homo sapiens
  source 1..6849: mol_type = unassigned DNA
gcaagcgcatgcgcacatgggcccccttcgtctcagctgtgcgggaacggccgagggtaacatcccgggctcgcgggaggctgtcggggtaatggccacacgctgacagaaccagccgagtggaaaaggggagcgaagccgttcctctgcacccttccccaggcctgaggccttcccgcttggtgctgccgccgccactgccggctgaggaggggcgatgagttggttcaacgcctcccagctctccagcttcgctaagcaggccctgtcccaggcccagaagtctattgacagggttctggacatccaggaagaggagccgagcatctgggccgagaccattccgtatggagagccgggaataagttcccctgtcagtggaggatgggatacttcaacctgggggttgaaatcaaacactgaacctcagagtccaccaatagcctctcctaaagcaatcacaaagccagttcggaggactgtggtcgatgaatctgaaaatttcttcagtgcctttctctcgccaactgatgtccagaccattcagaagagtccagtggtatcaaaacctccagcaaaatcacaacgaccagaagaagaagtgaaaagcagcttacatgaatccttgcacattggccagtcaagaactcctgaaacaactgaatcacaagtaaaagactcttctttgtgtgtttcaggggaaactctggcagcaggtacttcatcacctaaaactgaaggcaagcacgaagaaactgttaataaagaatcggatatgaaggtgccaactgtaagtttgaaagtatctgaaagtgtaattgatgtgaaaacaactatggaaagtatatctaatacgtctacgcagtctctcacagcagaaacaaaggacatagctttggaacctaaggaacaaaaacatgaagacaggcagagcaatacaccttctcctcctgttagtaccttttcatcaggtacttctaccaccagtgatattgaagttttagatcatgaaagtgtaataagtgagagctcagcgagctcgagacaagagactacagattcaaaatcaagtcttcacttgatgcagacatcttttcagcttctctctgcatctgcttgtcctgaatataatcgtttagatgatttccaaaaactcactgagagttgctgttcatctgatgcttttgaaagaatagactcatttagtgtacagtcattagatagccggagtgtaagtgaaatcaattcagatgatgaattgtcaggcaagggatatgctttagtgcctattatagttaattcttcaactccaaagtctaaaacagttgaatctgctgaaggaaaatctgaagaagtaaatgaaacattagttatacccactgaggaagcagaaatggaagaaagtggacgaagtgcaactcctgttaactgtgaacagcctgatatcttggtttcttccacaccaataaatgaaggacagactgtgttagacaaggtggctgagcagtgtgaacctgctgaaagtcagccagaagcactttctgagaaggaagatgtttgcaagacagttgaatttctgaatgaaaagctggaaaaaagggaggctcagttattatctcttagtaaggaaaaagcacttctagaagaagcttttgataacctgaaagatgaaatgttcagagtgaaagaagaaagcagtagcatttcttccttgaaagatgagtttactcaaagaattgcagaagcagaaaagaaagttcaactagcctgcaaagagagagatgctgctaaaaaggaaatcaaaaacataaaagaagaacttgccactagattaaatagtagtgaaactgcagaccttttgaaagagaaagatgagcagatccgagggttaatggaagaaggagaaaaactttcaaaacagcagctgcacaattctaacatcatcaagaaattaagagctaaagacaaggagaatgaaaatatggttgcaaagctgaacaaaaaagttaaagagctagaagaggagttgcagcatttgaaacaggtccttgatggcaaagaagaggttgagaaacaacatagagaaaatattaaaaaactaaattccatggtagaacgccaagagaaagatcttggccgtcttcaggtagacatggatgaacttgaagaaaagaaccgaagtattcaggctgccctggatagtgcatacaaagaacttactgatcttcacaaagccaatgctgcaaaggatagtgaggcacaggaagctgctctgagccgtgaaatgaaagctaaagaagaactttctgcagcattagagaaggcccaagaagaagcccgtcagcagcaagaaacattagccattcaagtgggggaccttaggcttgcattgcagcgtacagaacaagcggctgccagaaaggaggattatttacgccatgagatcggtgaacttcagcagagactccaggaagcagagaatcgaaaccaggaactgagtcaaagtgtttcatcaacaacaagaccattgcttcgacaaatagaaaatttgcaagcaaccctgggatcccagacatcgtcgtgggagaaattagagaagaatctttctgataggcttggtgaatcccagaccttgctggcagcagcagttgagagagaacgtgcagctacagaagaactccttgctaacaaaattcagatgtcttccatggagtcacagaattctcttttaagacaggaaaacagtagatttcaagcccagctagaatcagagaaaaataggctgtgtaaactggaggatgagaacaataggtaccaggttgaattggaaaacctaaaagatgaatatgtaagaacacttgaagagacgaggaaagaaaagacattgttgaatagtcagttagaaatggaaagaatgaaagttgaacaagaaaggaagaaagccatttttactcaagaaacaataaaagaaaaggaacgcaagccattttctgtttctagcactcccaccatgtcacgctcaagttcaataagtggtgttgatatggcaggactacagacatcttttctgtctcaggatgagtctcatgatcactcatttggaccaatgcctatatcagcaaatggaagcaatctttatgatgctgtaaggatgggagcaggatcaagcataattgaaaacctacagtctcagctaaagctaagggaaggggaaatcactcatttacagctagaaattggcaatctagaaaaaactcgatcaataatggctgaagaactagttaaattaacaaatcaaaatgatgaacttgaagagaaggtgaaggagatacccaaacttagaactcagctaagagatttggatcaaaggtacaacactattctgcagatgtatggagaaaaagcagaagaggcagaagaacttcgattagatctcgaagatgtaaaaaatatgtacaaaactcaaatagatgaacttttaagacaaagtctcagttaacttgtgaaaattgaattcccatcaaactgaatgtaagcatttaatatctaaacatttaatgtggacttccaataaattcttttatagaattagaaagtgggatttactgtagagtgtaaaaatttttttaaaattgttttacactatgtagtaatatttacagttaaattattttgtgcaatatttgaactttatttttgaaactattctttaaagatttattttttaaagcattcattttttttccttgaatagcacagagatttattactttatcctcatataaatatggctagagaagaagaatggtgttcatatatgtattgtagatatacaactagttgtatctataatttgtaagtgtttatatatatattaagaacatttgaagagtaatgttaacatactgaaactttgaaatctttcacatttaaaatttcaacatatcttaattactgctcatgaaaatgtacattaagtgttaaagtaaaaaattattaaatctgtggctattaaattttaaactaatttttttcctttaaaagtaagagtcacactgacactgtctgaaatttaaagagtgaatgatttaaacttaaaaaaaattttgatctgaaaatttatttcacccagctttcacaattaagtctgtataaaatgtggtaccttttggtacctatccagagaaacctgtacatattcaatgttatctagatgtgattggataatggagaaaatttatttataatgattttgcaatggcatcaataacatttaaatgattttgaagaagtattattttactaccctataaaatgaatcgaaaataataaagttcttaacataatttactctttaaaaattacctgttcatattttgtaaacccatatttttagcacattaaaaatgaatgtttgatattacagaatattcataacaaaatggaagaattataggaattaacttgaatttggcatttttaattttgtgatttatcattttattttttcttgaaatttcaaacacaaggaaagcatagaatagcttttaaaagtagctatgccttcttccaaatgttattttattcaaaaaggtaaccaggttgtgttttaaacctgtgaaatattgtgatgcattttattactgaaagttatttaactgcctttacttgcacataaaaactctcatttacggccaggtgctgtggctcatgcctgtaatcccagcactttgggaggccaaggcgggcatatcacctgatgtcaggagttcaagaccagcatggccagcagtttggtgaaaccccatctctactaaaaatacaaaaattagcctggcgtggtggtgtgcgcctgtaatcctagctactcgggaggctgaggcaggagcattgcttgaacctgggaggtggaggttacaatgagccaagattgtgccactgcactccagcatgggtgacagagaaagactccgtctcaaaaaaaaaaaaacaaactcttatttaatttttagttaaaattaaaacactagtacttcagaatatagatacaagtacaccatcttgaagaatttggagtttttcagggcaattcaaatgacctcattttttgttctttttgtattccagacagtgtttctgtcattggatctctgattggtagtgttaataaatattctttcagtgtgagccagattcataaaattaattttcttcattttagtagtaaaaagtagtctaatagctttttgtcagcttgatttttttgtgtgtgtaatattcaagggcagaatgacaggacagataagcaataagaaatgtatagaattagaaaatatagtagttccctcttacccatgggacatacgttccaagacccccagtgaacgtctgaaaccatggatagtatagacacctctatacactgttttttcctatacatatatacctatgataaagttctatttataaatcagggacagcaagagataaacaataactgcaaatagaacaattataacagtgcactgtaataaaagtgatgtaaatgtgatatgtctgtctctttctctcaaaatatcttattgtactgtactcacctgtaatcagactgtggttgaccgtgagtaaccgaaaccacagaaagcaaaatcgtggataaggggagactactctatatgaaacttaagttacaaaattctctgaagcatttgaaactagacgttttggaattataaaatagtccctttaaaatatccactagtagaaaaaaacttcatttgcagagaaaagattgcaataaaactcattcctaaacttttcaattttataaaattaaacattctttttttatccgtattaacaatttctagttacatagtttctagttacatattaccatatattactctttatctacaaataaatagctgatactcaaactgatcatattttgattgttaaacacttggatctctcaatacttctgtaagttaaagtgaacttaaacagtttcttgaaaaactccagtaggtggcagaatacctattgaatattcgttgctatactttgctgtttgtcattaaaacatctctacccatattcttgcaaaataatatttatattttaatggataggaaaatgatttgcaattagatgtttccattcttgaaagaaaaaagctgcaaataacattttcaagaatataaaaaaatgagtaaacaaagggaaggttgtttggtcatttatagacaattaagcacagactgtagatgtccttccaattcttgggaggctaaactgagtctaccatttcttacatttcttttacctattttttgagaattgccagttgtacagtgtttagcatgtggaatgtaccaaatatatctatgttgtgacttaagatattctaaatgtggataacttctgacctaggaaacatgaagtttgtagtgaagtaagtgaaaagaatgttcaggaaattttttttctccatctcttcagttggcatttattgagagttttatttgaatgcttattaaaagtatatgatttataatatttagaaaatagaagaaaaaagaaaactgtagatgttttatcttgttttaatactgtatgtttagtacgtatacatttatgttctagtgtatcaaaatttttcattttcattaaagtgaatccaattttccatattctaggtccattttaaaccatgaaaactttaatcacatattttgtaaagggctgaaagtatgatttaaactacagattgatatattttaattctaaatgaaaggtaatgtaaataagcatggatctgattgaataaagattttaaaatagtaa

SEQ ID NO: 31059 - DNA, 1846 bp, Homo sapiens
  source 1..1846: mol_type = unassigned DNA
gtagatttggttgctgtgtacgtggaagaagcaagcgcatgcgcacatgggcccccttcgtctcagctgtgcgggaacggccgagggtaacatcccgggctcgcgggaggctgtcggggtaatggccacacgctgacagaaccagccgagtggaaaaggggagcgaagccgttcctctgcacccttccccaggcctgaggccttcccgcttggtgctgccgccgccactgccggctgaggaggggcgatgagttggttcaacgcctcccagctctccagcttcgctaagcaggccctgtcccaggcccagaagtctattgacagggttctggacatccaggaagaggagccgagcatctgggccgagaccattccgtatggagagccgggaataagttcccctgtcagtggaggatgggatacttcaacctgggggttgaaatcaaacactgaacctcagagtccaccaatagcctctcctaaagcaatcacaaagccagttcggaggactgtggtcgatgaatctgaaaatttcttcagtgcctttctctcgccaactgatgtccagaccattcagaagagtccagtggtatcaaaacctccagcaaaatcacaacgaccagaagaagaagtgaaaagcagcttacatgaatccttgcacattggccagtcaagaactcctgaaacaactgaatcacaagtaaaagactcttctttgtgtgtttcaggggaaactctggcagcaggtacttcatcacctaaaactgaaggcaagcacgaagaaactgttaataaagaatcggatatgaaggtgccaactgtaagtttgaaagtatctgaaagtgtaattgatgtgaaaacaactatggaaagtatatctaatacgtctacgcagtctctcacagcagaaacaaaggacatagctttggaacctaaggaacaaaaacatgaagacaggcagagcaatacaccttctcctcctgttagtaccttttcatcaggtacttctaccaccagtgatattgaagttttagatcatgaaagtgtaataagtgagagctcagcgagctcgagacaagagactacagattcaaaatcaagtcttcacttgatgcagacatcttttcagcttctctctgcatctgcttgtcctgaatataatcgtttagatgatttccaaaaactcactgagagttgctgttcatctgatgcttttgaaagaatagactcatttagtgtacagtcattagatagccggagtgtaagtgaaatcaattcagatgatgaattgtcaggcaagggatatgctttagtgcctattatagttaattcttcaactccaaagtctaaaacagttgaatctgctgaaggaaaatctgaagaagtaaatgaaacattagttatacccactgaggaagcagaaatggaagaaagtggacgaagtgcaactcctgttaactgtgaacagcctgatatcttggtttcttccacaccaataaatgaaggacagactgtgttagacaaggtggctgagcagtgtgaacctgctgaaagtcagccagaagcactttctgagaaggaagatgtttgcaagacagttgaatttctgaatgaaaagctggaaaaaagggaggctcagttattatctcttagtaaggaaaaagcacttctagaagaagcttttgataacctgaaagatgaaatgttcagagtgaaagaagaaagcagtagcatttcttccttgaaagatgagtttactcaaagaattgcagaagcagaaaagaaagttcaactagcctgcaaagagagagatgctgctaaaaaggaagtaaaaagaaaaaaaaga

SEQ ID NO: 31060 - DNA, 6886 bp, Homo sapiens
  source 1..6886: mol_type = unassigned DNA
gtagatttggttgctgtgtacgtggaagaagcaagcgcatgcgcacatgggcccccttcgtctcagctgtgcgggaacggccgagggtaacatcccgggctcgcgggaggctgtcggggtaatggccacacgctgacagaaccagccgagtggaaaaggggagcgaagccgttcctctgcacccttccccaggcctgaggccttcccgcttggtgctgccgccgccactgccggctgaggaggggcgatgagttggttcaacgcctcccagctctccagcttcgctaagcaggccctgtcccaggcccagaagtctattgacagggttctggacatccaggaagaggagccgagcatctgggccgagaccattccgtatggagagccgggaataagttcccctgtcagtggaggatgggatacttcaacctgggggttgaaatcaaacactgaacctcagagtccaccaatagcctctcctaaagcaatcacaaagccagttcggaggactgtggtcgatgaatctgaaaatttcttcagtgcctttctctcgccaactgatgtccagaccattcagaagagtccagtggtatcaaaacctccagcaaaatcacaacgaccagaagaagaagtgaaaagcagcttacatgaatccttgcacattggccagtcaagaactcctgaaacaactgaatcacaagtaaaagactcttctttgtgtgtttcaggggaaactctggcagcaggtacttcatcacctaaaactgaaggcaagcacgaagaaactgttaataaagaatcggatatgaaggtgccaactgtaagtttgaaagtatctgaaagtgtaattgatgtgaaaacaactatggaaagtatatctaatacgtctacgcagtctctcacagcagaaacaaaggacatagctttggaacctaaggaacaaaaacatgaagacaggcagagcaatacaccttctcctcctgttagtaccttttcatcaggtacttctaccaccagtgatattgaagttttagatcatgaaagtgtaataagtgagagctcagcgagctcgagacaagagactacagattcaaaatcaagtcttcacttgatgcagacatcttttcagcttctctctgcatctgcttgtcctgaatataatcgtttagatgatttccaaaaactcactgagagttgctgttcatctgatgcttttgaaagaatagactcatttagtgtacagtcattagatagccggagtgtaagtgaaatcaattcagatgatgaattgtcaggcaagggatatgctttagtgcctattatagttaattcttcaactccaaagtctaaaacagttgaatctgctgaaggaaaatctgaagaagtaaatgaaacattagttatacccactgaggaagcagaaatggaagaaagtggacgaagtgcaactcctgttaactgtgaacagcctgatatcttggtttcttccacaccaataaatgaaggacagactgtgttagacaaggtggctgagcagtgtgaacctgctgaaagtcagccagaagcactttctgagaaggaagatgtttgcaaggtaactctaacagttgaatttctgaatgaaaagctggaaaaaagggaggctcagttattatctcttagtaaggaaaaagcacttctagaagaagcttttgataacctgaaagatgaaatgttcagagtgaaagaagaaagcagtagcatttcttccttgaaagatgagtttactcaaagaattgcagaagcagaaaagaaagttcaactagcctgcaaagagagagatgctgctaaaaaggaaatcaaaaacataaaagaagaacttgccactagattaaatagtagtgaaactgcagaccttttgaaagagaaagatgagcagatccgagggttaatggaagaaggagaaaaactttcaaaacagcagctgcacaattctaacatcatcaagaaattaagagctaaagacaaggagaatgaaaatatggttgcaaagctgaacaaaaaagttaaagagctagaagaggagttgcagcatttgaaacaggtccttgatggcaaagaagaggttgagaaacaacatagagaaaatattaaaaaactaaattccatggtagaacgccaagagaaagatcttggccgtcttcaggtagacatggatgaacttgaagaaaagaaccgaagtattcaggctgccctggatagtgcatacaaagaacttactgatcttcacaaagccaatgctgcaaaggatagtgaggcacaggaagctgctctgagccgtgaaatgaaagctaaagaagaactttctgcagcattagagaaggcccaagaagaagcccgtcagcagcaagaaacattagccattcaagtgggggaccttaggcttgcattgcagcgtacagaacaagcggctgccagaaaggaggattatttacgccatgagatcggtgaacttcagcagagactccaggaagcagagaatcgaaaccaggaactgagtcaaagtgtttcatcaacaacaagaccattgcttcgacaaatagaaaatttgcaagcaaccctgggatcccagacatcgtcgtgggagaaattagagaagaatctttctgataggcttggtgaatcccagaccttgctggcagcagcagttgagagagaacgtgcagctacagaagaactccttgctaacaaaattcagatgtcttccatggagtcacagaattctcttttaagacaggaaaacagtagatttcaagcccagctagaatcagagaaaaataggctgtgtaaactggaggatgagaacaataggtaccaggttgaattggaaaacctaaaagatgaatatgtaagaacacttgaagagacgaggaaagaaaagacattgttgaatagtcagttagaaatggaaagaatgaaagttgaacaagaaaggaagaaagccatttttactcaagaaacaataaaagaaaaggaacgcaagccattttctgtttctagcactcccaccatgtcacgctcaagttcaataagtggtgttgatatggcaggactacagacatcttttctgtctcaggatgagtctcatgatcactcatttggaccaatgcctatatcagcaaatggaagcaatctttatgatgctgtaaggatgggagcaggatcaagcataattgaaaacctacagtctcagctaaagctaagggaaggggaaatcactcatttacagctagaaattggcaatctagaaaaaactcgatcaataatggctgaagaactagttaaattaacaaatcaaaatgatgaacttgaagagaaggtgaaggagatacccaaacttagaactcagctaagagatttggatcaaaggtacaacactattctgcagatgtatggagaaaaagcagaagaggcagaagaacttcgattagatctcgaagatgtaaaaaatatgtacaaaactcaaatagatgaacttttaagacaaagtctcagttaacttgtgaaaattgaattcccatcaaactgaatgtaagcatttaatatctaaacatttaatgtggacttccaataaattcttttatagaattagaaagtgggatttactgtagagtgtaaaaatttttttaaaattgttttacactatgtagtaatatttacagttaaattattttgtgcaatatttgaactttatttttgaaactattctttaaagatttattttttaaagcattcattttttttccttgaatagcacagagatttattactttatcctcatataaatatggctagagaagaagaatggtgttcatatatgtattgtagatatacaactagttgtatctataatttgtaagtgtttatatatatattaagaacatttgaagagtaatgttaacatactgaaactttgaaatctttcacatttaaaatttcaacatatcttaattactgctcatgaaaatgtacattaagtgttaaagtaaaaaattattaaatctgtggctattaaattttaaactaatttttttcctttaaaagtaagagtcacactgacactgtctgaaatttaaagagtgaatgatttaaacttaaaaaaaattttgatctgaaaatttatttcacccagctttcacaattaagtctgtataaaatgtggtaccttttggtacctatccagagaaacctgtacatattcaatgttatctagatgtgattggataatggagaaaatttatttataatgattttgcaatggcatcaataacatttaaatgattttgaagaagtattattttactaccctataaaatgaatcgaaaataataaagttcttaacataatttactctttaaaaattacctgttcatattttgtaaacccatatttttagcacattaaaaatgaatgtttgatattacagaatattcataacaaaatggaagaattataggaattaacttgaatttggcatttttaattttgtgatttatcattttattttttcttgaaatttcaaacacaaggaaagcatagaatagcttttaaaagtagctatgccttcttccaaatgttattttattcaaaaaggtaaccaggttgtgttttaaacctgtgaaatattgtgatgcattttattactgaaagttatttaactgcctttacttgcacataaaaactctcatttacggccaggtgctgtggctcatgcctgtaatcccagcactttgggaggccaaggcgggcatatcacctgatgtcaggagttcaagaccagcatggccagcagtttggtgaaaccccatctctactaaaaatacaaaaattagcctggcgtggtggtgtgcgcctgtaatcctagctactcgggaggctgaggcaggagcattgcttgaacctgggaggtggaggttacaatgagccaagattgtgccactgcactccagcatgggtgacagagaaagactccgtctcaaaaaaaaaaaaacaaactcttatttaatttttagttaaaattaaaacactagtacttcagaatatagatacaagtacaccatcttgaagaatttggagtttttcagggcaattcaaatgacctcattttttgttctttttgtattccagacagtgtttctgtcattggatctctgattggtagtgttaataaatattctttcagtgtgagccagattcataaaattaattttcttcattttagtagtaaaaagtagtctaatagctttttgtcagcttgatttttttgtgtgtgtaatattcaagggcagaatgacaggacagataagcaataagaaatgtatagaattagaaaatatagtagttccctcttacccatgggacatacgttccaagacccccagtgaacgtctgaaaccatggatagtatagacacctctatacactgttttttcctatacatatatacctatgataaagttctatttataaatcagggacagcaagagataaacaataactgcaaatagaacaattataacagtgcactgtaataaaagtgatgtaaatgtgatatgtctgtctctttctctcaaaatatcttattgtactgtactcacctgtaatcagactgtggttgaccgtgagtaaccgaaaccacagaaagcaaaatcgtggataaggggagactactctatatgaaacttaagttacaaaattctctgaagcatttgaaactagacgttttggaattataaaatagtccctttaaaatatccactagtagaaaaaaacttcatttgcagagaaaagattgcaataaaactcattcctaaacttttcaattttataaaattaaacattctttttttatccgtattaacaatttctagttacatagtttctagttacatattaccatatattactctttatctacaaataaatagctgatactcaaactgatcatattttgattgttaaacacttggatctctcaatacttctgtaagttaaagtgaacttaaacagtttcttgaaaaactccagtaggtggcagaatacctattgaatattcgttgctatactttgctgtttgtcattaaaacatctctacccatattcttgcaaaataatatttatattttaatggataggaaaatgatttgcaattagatgtttccattcttgaaagaaaaaagctgcaaataacattttcaagaatataaaaaaatgagtaaacaaagggaaggttgtttggtcatttatagacaattaagcacagactgtagatgtccttccaattcttgggaggctaaactgagtctaccatttcttacatttcttttacctattttttgagaattgccagttgtacagtgtttagcatgtggaatgtaccaaatatatctatgttgtgacttaagatattctaaatgtggataacttctgacctaggaaacatgaagtttgtagtgaagtaagtgaaaagaatgttcaggaaattttttttctccatctcttcagttggcatttattgagagttttatttgaatgcttattaaaagtatatgatttataatatttagaaaatagaagaaaaaagaaaactgtagatgttttatcttgttttaatactgtatgtttagtacgtatacatttatgttctagtgtatcaaaatttttcattttcattaaagtgaatccaattttccatattctaggtccattttaaaccatgaaaactttaatcacatattttgtaaagggctgaaagtatgatttaaactacagattgatatattttaattctaaatgaaaggtaatgtaaataagcatggatctgattgaataaagattttaaaatagt

SEQ ID NO: 31061 - DNA, 5613 bp, Homo sapiens
  source 1..5613: mol_type = unassigned DNA
agcaggtgctggcacaagagcagcggcttgggggagccggcagcagcagtaacagcagcagcagccgccgccgccgccgccagtaaacgcggacggtaccccaggggactacccagccggccggccctggaagccgcgctcgggtcccgccgcagtcggcggtgggggatgggcaggcagtggcggtcccgcctgccgagggttaacccccgccggtcccggtcctgagctggaccagagccctcctccagaaacccctgcgtccgccacggcccaggttaaatggaaaccacccttgggaactggatgcctgtgtagctgttctaccatatcagtgtattgcaatgagtgggggaggagagcagctggatatcctgagtgttggaatcctagtgaaagaaagatggaaagtgttgagaaagattgggggtgggggctttggagaaatttacgatgccttggacatgctcaccagggaaaatgttgcactgaaggtggaatcagctcaacaaccaaaacaagttctgaaaatggaagttgctgttttgaaaaagctgcaaggaaagaccatgtttgtagatttattggctgtgggaggaatgatcgattcaactatgtggtcatgcagttgcagggtcggaatctggcagatcttcgccgtagccagtcccgaggcacattcaccattagtaccactctccggctgggtagacagattttggagtctattgaaagcattcattctgtgggattcttgcatcgagacatcaaaccgtcgaacttcgctatgggtcgctttcctagtacatgtaggaaatgttacatgcttgattttggcttggctcgacaatttaccaattcctgtggtgacgtcagaccacctcgagctgtggcaggttttcgagggacagttcgttatgcatcaatcaacgcacatcggaacagggaaatgggaagacatgatgacctttggtccttattctacatgttggtggagtttgtggttggtcagctgccctggagaaaaataaaggacaaggagcaagtaggctctattaaggagagatatgaccacaggctcatgttgaaacatctccctccagaattcagcatctttctagaccatatctcttctttggattattttacaaaaccagactaccagatgtccatcagggtgacccggaagtcctacaaggtgtccacctctggcccccaggcctttaacagcctctcctacacgagtgggcctggtgcctgcatcagctcctcgagcttctcccgaatgggcagcagcagcttccggggtggcctgggtgcaggatatggtggggccagtggaggcatcaccaccatcactgtcaaccaaagcctgctgagccctcttaacctggaggtggaccccaacatccaggccgtgcgcacccaggaggagaagcagatcaagaccctcaacaacaagtttttctccttcatagacaaggtacggttcctggagcagcagaacaagatgcttgagaccaagtggagcctcgtgcagcagcagaagatggctcggagcaacatggacaacatgttcgagagctacatcaacaaccttaagtggcagctggagactctgggccaggagaagctgaagctggaggcggagcttggcaacatgcatgggctggtggaggacttcaggaacaagtatgaggttgagatcagtaaatgtacagagatggagaatgaatttgtgctcatcaaggagtatgtagatgaagcttacatgaacaagatggagctggagtcttccctgaaagagctgactgccaagatcagcttcctcaggcagctgtatgaagaggagatcgggagctgcagtcccagatctcggatacatctgtggtgctgttcatggacaacagccgcttcctggacatggacagcatcatccctgaggtcaaggccagagggcttccctggaggctgccacgcagataccgagcagcgtggggagctagccattaaggatgccaatgccaagctgtctgagctggaggccgccctgcagctagccagtcaagacatggcgcggcagctgcgtgagtaccaggagctgatgaacgtcaagctggccctggatatcaagatcgccacctacaggaagctgttggagggcgaggagagctggctggagtctgggatgcagaacatgagtatccatatgaagaccaccagcagctatgcaggtggtcagagcttggcctatgggggcctcacaagccctggcctcagctacggcctgggctccagctttggctctggcatgggctccagctccttcagccacaccagctcctccagggccgtggtcatgaagaagatcgaaacccgtgatgggaagctagtgtctgagtcctccaacgtcctgcccaatttgagaattactgccacacttcttacatccgtgtttgacaatagcatcaagacttttggagtaattgagagtgacccttttgactgggagaagactggaaatgatggctccctaacaaccaccactacttctaccacccctcagttgcacactcgcttgacccctgctgcaattggaattgccaatgctactcccatccctggagacttgcttcgagaaaatacagatgaggtatttccagatgaacagcttagcgatggagaaaatggcatccctgttggtgtgtcaccagataaattgcctggatctctgggacacccccgtccccaggagaaggatgtttgggaagagatggatgccaacaaaaacaagataaagcttggaatttgtaaggctgctactgaagaggagaacagccatggccaggcaaatggtcttctcaatgctccaagccttgggtcaccaattcgtgtccgctcagagattactcagccagacagagatattccactggtgcgaaagttacgttccattcacagctttgagctggaaaaacgtctgaccctggagccaaagccagacactgacaagttccttgagacctgcctggagaaaatgcagaaagataccagtgcaggaaaagaatctattctccctgctctgctgcataagccttgcgttcctgctgtgtcccgtactgaccacatctggcactatgatgaagaatatcttccagatgcctccaagcctgcttctgccaacacccctgagcaggcagatggtggtggcagcaatggatttatagctgttaacctgagctcttgcaagcaagaaattgattccaaagaatgggtgattgtggacaaggagcaggaccttcaggattttaggacaaatgaggctgtaggacataaaacaactggaagtccttctgatgaggagcctgaagtacttcaagtcctggaggcatcacctcaagatgaaaagctccagttaggtccttgggcagaaaatgatcatttaaagaaggaaacctcaggtgtggtcttagcactttctgcagagggtcctcctactgctgcttcagaacaatatacagataggctggaactccagcctggagctgctagtcagtttattgcagcgacgcccacaagtctaatggaggcgcaggcagaaggaccccttacagcgattacaattcctagaccttctgtggcatctacacagtcaacttcaggaagctttcactgtggtcagcagccagagaagaaagatcttcagcccatggagcccactgtggaactttactctccaagggaaaacttctctggcttggttgtgacagagggtgaacctcctagtggaggaagcagaacagatttggggcttcagatagatcacattggtcatgacatgttacccaacattagagaaagtaacaaatctcaagacctgggaccaaaagaacttcctgatcataatagactggttgtgagagaatttgaaaatctccctggggaaactgaagagaaaagcatccttttagagtcagataatgaagatgagaagttaagtagagggcagcattgtattgagatctcctctctcccaggagatttggtaattgtggaaaaggatcactcagctactactgaacctcttgatgtgacaaaaacacagacttttagtgtggtgccaaatcaagacaaaaataatgagataatgaagcttctgacagttggaacttcagaaatttcttccagagacattgacccacatgttgaaggtcagataggccaagtggcagaaatgcaaaaaaataagatatctaaggatgatgacatcatgagtgaagacttgccaggtcatcaaggagacctctctacttttttgcaccaagagggcaagagagagaaaatcacccctagaaatggagaactatttcattgtgtttcagagaatgaacatggtgccccaacccggaaggatatggttaggtcatcctttgtaactagacacagccgaatccctgttttagcacaagagatagactcaactttggaatcatcctctccagtttctgcaaaagaaaagctcctccaaaagaaagcctatcagccagacctagtcaagcttctggtggaaaaaagacaattcaagtccttccttggcgacctctcaagtgcctctgataaattgctagaggagaaactagctactgttcctgctcccttttgtgaggaggaagtgctcactcccttttcaagactgacagtagattctcacctgagtaggtcagctgaagatagctttctgtcacccatcatctcccagtctagaaagagcaaaattccaaggccagtttcatgggtcaacacagatcaggtcaatagctcaacttcgtctcagttctttcctcggccaccaccaggaaagccacccacgaggcctggagtagaagccaggctacgcagatataaagtcctagggagtagtaactccgactcagaccttttctcccgcctggcccaaattcttcaaaatggatctcagaaaccccggagcactactcagtgcaagagtccaggatctcctcacaatccaaaaacaccacccaagagtccagttgtccctcgcaggagtcccagtgcctctcctcgaagctcatccttgcctcgcacgtctagttcctcaccatctagggctggacggccccaccatgaccagaggagttcgtccccacatctggggagaagcaagtcacctcccagccactcaggatcttcctcctccaggaggtcctgccaacaggagcattgcaaacccagcaagaatggcctgaaaggatccggcagcctccaccaccactcagccagcactaaaaccccccaagggaagagtaagccagccagtaaactcagcagataggagccaggctgcatctctttgaaaggtgtgagatcttcctcctaaacctgatgcatgtgtgtccctgtactttctatgtaaaaaaatcagtgttgatcttctcttgcaaaagaaagtaacatgatcaattatttataagaagacataatacatgataaggaattacctaaggcaggcagcaagtagattaggaatcaatgtctttgtacaagaaggaaaaatagagcaaaaatccaagggggagaaactcattaaaatga

SEQ ID NO: 31062 - DNA, 5617 bp, Homo sapiens
  source 1..5617: mol_type = unassigned DNA
agaataacgtcgggtcgggtcagcgggctctgcagtagtcgccgcagcggcgatgggagcggtggggacgaggcggcggcggcggcaggagggggagcaggtgctggcacaagagcagcggcttgggggagccggcagcagcagtaacagcagcagcagccgccgccgccgccgccagtaaacgcggacggtaccccaggggactacccagccggccggccctggaagccgcgctcgggtcccgccgcagtcggcggtgggggatgggcaggcagtggcggtcccgcctgccgagggttaacccccgccggtcccggtcctgagctggaccagagccctcctccagaaacccctgcgtccgccacggcccaggttaaatggaaaccacccttgggaactggatgcctgtgtagctgttctaccatatcagtgtattgcaatgagtgggggaggagagcagctggatatcctgagtgttggaatcctagtgaaagaaagatggaaagtgttgagaaagattgggggtgggggctttggagaaatttacgatgccttggacatgctcaccagggaaaatgttgcactgaaggtggaatcagctcaacaaccaaaacaagttctgaaaatggaagttgctgttttgaaaaagctgcaagggaaagaccatgtttgtagatttattggctgtgggaggaatgatcgattcaactatgtggtcatgcagttgcagggtcggaatctggcagatcttcgccgtagccagtcccgaggcacattcaccattagtaccactctccggctgggtagacagattttggagtctattgaaagcattcattctgtgggattcttgcatcgagacatcaaaccgtcgaacttcgctatgggtcgctttcctagtacatgtaggaaatgttacatgcttgattttggcttggctcgacaatttaccaattcctgtggtgacgtcagaccacctcgagctgtggcaggttttcgagggacagttcgttatgcatcaatcaacgcacatcggaacagggaaatgggaagacatgatgacctttggtccttattctacatgttggtggagtttgtggttggtcagctgccctggagaaaaataaaggacaaggagcaagtaggctctattaaggagagatatgaccacaggctcatgttgaaacatctccctccagaattcagcatctttctagaccatatctcttctttggattattttacaaaaccagactaccagcttcttacatccgtgtttgacaatagcatcaagacttttggagtaattgagagtgacccttttgactgggagaagactggaaatgatggctccctaacaaccaccactacttctaccacccctcagttgcacactcgcttgacccctgctgcaattggaattgccaatgctactcccatccctggagacttgcttcgagaaaatacagatgaggtatttccagatgaacagcttagcgatggagaaaatggcatccctgttggtgtgtcaccagataaattgcctggatctctgggacacccccgtccccaggagaaggatgtttgggaagagatggatgccaacaaaaacaagataaagcttggaatttgtaaggctgctactgaagaggagaacagccatggccaggcaaatggtcttctcaatgctccaagccttgggtcaccaattcgtgtccgctcagagattactcagccagacagagatattccactggtgcgaaagttacgttccattcacagctttgagctggaaaaacgtctgaccctggagccaaagccagacactgacaagttccttgagacctgcctggagaaaatgcagaaagataccagtgcaggaaaagaatctattctccctgctctgctgcataagccttgcgttcctgctgtgtcccgtactgaccacatctggcactatgatgaagaatatcttccagatgcctccaagcctgcttctgccaacacccctgagcaggcagatggtggtggcagcaatggatttatagctgttaacctgagctcttgcaagcaagaaattgattccaaagaatgggtgattgtggacaaggagcaggaccttcaggattttaggacaaatgaggctgtaggacataaaacaactggaagtccttctgatgaggagcctgaagtacttcaagtcctggaggcatcacctcaagatgaaaagctccagttaggtccttgggcagaaaatgatcatttaaagaaggaaacctcaggtgtggtcttagcactttctgcagagggtcctcctactgctgcttcagaacaatatacagataggctggaactccagcctggagctgctagtcagtttattgcagcgacgcccacaagtctaatggaggcgcaggcagaaggaccccttacagcgattacaattcctagaccttctgtggcatctacacagtcaacttcaggaagctttcactgtggtcagcagccagagaagaaagatcttcagcccatggagcccactgtggaactttactctccaagggaaaacttctctggcttggttgtgacagagggtgaacctcctagtggaggaagcagaacagatttggggcttcagatagatcacattggtcatgacatgttacccaacattagagaaagtaacaaatctcaagacctgggaccaaaagaacttcctgatcataatagactggttgtgagagaatttgaaaatctccctggggaaactgaagagaaaagcatccttttagagtcagataatgaagatgagaagttaagtagagggcagcattgtattgagatctcctctctcccaggagatttggtaattgtggaaaaggatcactcagctactactgaacctcttgatgtgacaaaaacacagacttttagtgtggtgccaaatcaagacaaaaataatgagataatgaagcttctgacagttggaacttcagaaatttcttccagagacattgacccacatgttgaaggtcagataggccaagtggcagaaatgcaaaaaaataagatatctaaggatgatgacatcatgagtgaagacttgccaggtcatcaaggagacctctctacttttttgcaccaagagggcaagagagagaaaatcacccctagaaatggagaactatttcattgtgtttcagagaatgaacatggtgccccaacccggaaggatatggttaggtcatcctttgtaactagacacagccgaatccctgttttagcacaagagatagactcaactttggaatcatcctctccagtttctgcaaaagaaaagctcctccaaaagaaagcctatcagccagacctagtcaagcttctggtggaaaaaagacaattcaagtccttccttggcgacctctcaagtgcctctgataaattgctagaggagaaactagctactgttcctgctcccttttgtgaggaggaagtgctcactcccttttcaagactgacagtagattctcacctgagtaggtcagctgaagatagctttctgtcacccatcatctcccagtctagaaagagcaaaattccaaggccagtttcatgggtcaacacagatcaggtcaatagctcaacttcgtctcagttctttcctcggccaccaccaggaaagccacccacgaggcctggagtagaagccaggctacgcagatataaagtcctagggagtagtaactccgactcagaccttttctcccgcctggcccaaattcttcaaaatggatctcagaaaccccggagcactactcagtgcaagagtccaggatctcctcacaatccaaaaacaccacccaagagtccagttgtccctcgcaggagtcccagtgcctctcctcgaagctcatccttgcctcgcacgtctagttcctcaccatctagggctggacggccccaccatgaccagaggagttcgtccccacatctggggagaagcaagtcacctcccagccactcaggatcttcctcctccaggaggtcctgccaacaggagcattgcaaacccagcaagaatggcctgaaaggatccggcagcctccaccaccactcagccagcactaaaaccccccaagggaagagtaagccagccagtaaactcagcagataggagccaggctgcatctctttgaaaggtgtgagatcttcctcctaaacctgatgcatgtgtgtccctgtactttctatgtaaaaaaatcagtgttgatcttctcttgcaaaagaaagtaacatgatcaattatttataagaagacataatacatgataaggaattacctaaggcaggcagcaagtagattaggaatcaatgtctttgtacaagaaggaaaaatagagcaaaaatccaagggggagaaactcattaaaatgagctctcattttttaagctgcctttgaaacaaaagagttgaggataggagatagaatggaattttaggggggttgcctaatttttttaagcctcaattcaaagattatatagcaaaagtgaaacttcttgtttgatattttcattcaaaactttcccaccctgaagagtcattgatcagatattagattatataagaagtctgttgccagggagccagtattcatgtatatttggcttgtgtgtttatttcgtgtattgagaatgaacacctttactttgcctcattcctagtaccctccctggagttcagatttttttttaaaattttgtatgtctcgtctgattcaatctctctgcttttattttatggtcctagttgtactatcaaatccaattacttttttttaggtccccctgattttttttttttagagcaagagttcttaacatattacatttttattatgaaaaataagaaagttaggtaaaggaaagaaaagtctaactagagctattttgcaggctttagtgtttagggagagaaagaaagtgtgggttaatagccttcaagatagaagatgccctttcatctctgttaagtgtcctcctttagaaacttgagtagaaggaaaactgaccagagtagactgcttccttaagtcttctgggttccaactgtttgtaatatcagcatccaagatgatacgagggaagcacaatgctttggactgtgatttgagatttagaaataaattagatatattattgaggcttagaatcctcaaactttgtattttatacatttagccaataaggaattaatatctggggaaataaatttaggcaaatatttcttttttaatgttttattacctgcttctcctgtgttttagttcaacatttgggcttcttggcctgattttcatacaatctcaatttacgaagctgtaaagaggaagatatttgttctaatctcactcttctaataggaatcaggcaaatgaaagtctaccagacttttaaaatgggctgtttttatactctctaggtgttttgtgttgtaaagaccttattaaggtcaggtaaattggtctgcttgctgttgaaatttgccttctagcaaacatatgtgctttctgtttgaccttgtgtttgctgccaaacctaatacagttgaattggg

SEQ ID NO: 31063 - DNA, 4968 bp, Homo sapiens
  source 1..4968: mol_type = unassigned DNA
gagccagggaaagaccatgtttgtagatttattggctgtgggaggaatgatcgattcaactatgtggtcatgcagttgcagggtcggaatctggcagatcttcgccgtagccagtcccgaggcacattcaccattagtaccactctccggctgggtagacagattttggagtctattgaaagcattcattctgtgggattcttgcatcgagacatcaaaccgtcgaacttcgctatgggtcgctttcctagtacatgtaggaaatgttacatgcttgattttggcttggctcgacaatttaccaattcctgtggtgacgtcagaccacctcgagctgtggcaggttttcgagggacagttcgttatgcatcaatcaacgcacatcggaacagggaaatgggaagacatgatgacctttggtccttattctacatgttggtggagtttgtggttggtcagctgccctggagaaaaataaaggacaaggagcaagtaggctctattaaggagagatatgaccacaggctcatgttgaaacatctccctccagaattcagcatctttctagaccatatctcttctttggattattttacaaaaccagactaccagcttcttacatccgtgtttgacaatagcatcaagacttttggagtaattgagagtgacccttttgactgggagaagactggaaatgatggctccctaacaaccaccactacttctaccacccctcagttgcacactcgcttgacccctgctgcaattggaattgccaatgctactcccatccctggagacttgcttcgagaaaatacagatgaggtatttccagatgaacagcttagcgatggagaaaatggcatccctgttggtgtgtcaccagataaattgcctggatctctgggacacccccgtccccaggagaaggatgtttgggaagagatggatgccaacaaaaacaagataaagcttggaatttgtaaggctgctactgaagaggagaacagccatggccaggcaaatggtcttctcaatgctccaagccttgggtcaccaattcgtgtccgctcagagattactcagccagacagagatattccactggtgcgaaagttacgttccattcacagctttgagctggaaaaacgtctgaccctggagccaaagccagacactgacaagttccttgagacctgcctggagaaaatgcagaaagataccagtgcaggaaaagaatctattctccctgctctgctgcataagccttgcgttcctgctgtgtcccgtactgaccacatctggcactatgatgaagaatatcttccagatgcctccaagcctgcttctgccaacacccctgagcaggcagatggtggtggcagcaatggatttatagctgttaacctgagctcttgcaagcaagaaattgattccaaagaatgggtgattgtggacaaggagcaggaccttcaggattttaggacaaatgaggctgtaggacataaaacaactggaagtccttctgatgaggagcctgaagtacttcaagtcctggaggcatcacctcaagatgaaaagctccagttaggtccttgggcagaaaatgatcatttaaagaaggaaacctcaggtgtggtcttagcactttctgcagagggtcctcctactgctgcttcagaacaatatacagataggctggaactccagcctggagctgctagtcagtttattgcagcgacgcccacaagtctaatggaggcgcaggcagaaggaccccttacagcgattacaattcctagaccttctgtggcatctacacagtcaacttcaggaagctttcactgtggtcagcagccagagaagaaagatcttcagcccatggagcccactgtggaactttactctccaagggaaaacttctctggcttggttgtgacagagggtgaacctcctagtggaggaagcagaacagatttggggcttcagatagatcacattggtcatgacatgttacccaacattagagaaagtaacaaatctcaagacctgggaccaaaagaacttcctgatcataatagactggttgtgagagaatttgaaaatctccctggggaaactgaagagaaaagcatccttttagagtcagataatgaagatgagaagttaagtagagggcagcattgtattgagatctcctctctcccaggagatttggtaattgtggaaaaggatcactcagctactactgaacctcttgatgtgacaaaaacacagacttttagtgtggtgccaaatcaagacaaaaataatgagataatgaagcttctgacagttggaacttcagaaatttcttccagagacattgacccacatgttgaaggtcagataggccaagtggcagaaatgcaaaaaaataagatatctaaggatgatgacatcatgagtgaagacttgccaggtcatcaaggagacctctctacttttttgcaccaagagggcaagagagagaaaatcacccctagaaatggagaactatttcattgtgtttcagagaatgaacatggtgccccaacccggaaggatatggttaggtcatcctttgtaactagacacagccgaatccctgttttagcacaagagatagactcaactttggaatcatcctctccagtttctgcaaaagaaaagctcctccaaaagaaagcctatcagccagacctagtcaagcttctggtggaaaaaagacaattcaagtccttccttggcgacctctcaagtgcctctgataaattgctagaggagaaactagctactgttcctgctcccttttgtgaggaggaagtgctcactcccttttcaagactgacagtagattctcacctgagtaggtcagctgaagatagctttctgtcacccatcatctcccagtctagaaagagcaaaattccaaggccagtttcatgggtcaacacagatcaggtcaatagctcaacttcgtctcagttctttcctcggccaccaccaggaaagccacccacgaggcctggagtagaagccaggctacgcagatataaagtcctagggagtagtaactccgactcagaccttttctcccgcctggcccaaattcttcaaaatggatctcagaaaccccggagcactactcagtgcaagagtccaggatctcctcacaatccaaaaacaccacccaagagtccagttgtccctcgcaggagtcccagtgcctctcctcgaagctcatccttgcctcgcacgtctagttcctcaccatctagggctggacggccccaccatgaccagaggagttcgtccccacatctggggagaagcaagtcacctcccagccactcaggatcttcctcctccaggaggtcctgccaacaggagcattgcaaacccagcaagaatggcctgaaaggatccggcagcctccaccaccactcagccagcactaaaaccccccaagggaagagtaagccagccagtaaactcagcagataggagccaggctgcatctctttgaaaggtgtgagatcttcctcctaaacctgatgcatgtgtgtccctgtactttctatgtaaaaaaatcagtgttgatcttctcttgcaaaagaaagtaacatgatcaattatttataagaagacataatacatgataaggaattacctaaggcaggcagcaagtagattaggaatcaatgtctttgtacaagaaggaaaaatagagcaaaaatccaagggggagaaactcattaaaatgagctctcattttttaagctgcctttgaaacaaaagagttgaggataggagatagaatggaattttaggggggttgcctaatttttttaagcctcaattcaaagattatatagcaaaagtgaaacttcttgtttgatattttcattcaaaactttcccaccctgaagagtcattgatcagatattagattatataagaagtctgttgccagggagccagtattcatgtatatttggcttgtgtgtttatttcgtgtattgagaatgaacacctttactttgcctcattcctagtaccctccctggagttcagatttttttttaaaattttgtatgtctcgtctgattcaatctctctgcttttattttatggtcctagttgtactatcaaatccaattacttttttttaggtccccctgattttttttttttagagcaagagttcttaacatattacatttttattatgaaaaataagaaagttaggtaaaggaaagaaaagtctaactagagctattttgcaggctttagtgtttagggagagaaagaaagtgtgggttaatagccttcaagatagaagatgccctttcatctctgttaagtgtcctcctttagaaacttgagtagaaggaaaactgaccagagtagactgcttccttaagtcttctgggttccaactgtttgtaatatcagcatccaagatgatacgagggaagcacaatgctttggactgtgatttgagatttagaaataaattagatatattattgaggcttagaatcctcaaactttgtattttatacatttagccaataaggaattaatatctggggaaataaatttaggcaaatatttcttttttaatgttttattacctgcttctcctgtgttttagttcaacatttgggcttcttggcctgattttcatacaatctcaatttacgaagctgtaaagaggaagatatttgttctaatctcactcttctaataggaatcaggcaaatgaaagtctaccagacttttaaaatgggctgtttttatactctctaggtgttttgtgttgtaaagaccttattaaggtcaggtaaattggtctgcttgctgttgaaatttgccttctagcaaacatatgtgctttctgtttgaccttgtgtttgctgccaaacctaatacagttgaattggg

SEQ ID NO: 31064 - DNA, 2478 bp, Homo sapiens
  source 1..2478: mol_type = unassigned DNA
ggaagagaccgccccgtgggcggaagtgacgcaaggcctactgtcggctgggaggggaggtgtagccggtctttgggggtaggcggtagtggcggaagaggttcggcggctgatggcggatcaggatcggaagcctgcgtaactttctcccttgatccgggagtctttccactggattcacaatgacatcctttcaagaagtcccattgcagacttccaactttgcccatgtcatctttcaaaatgtggccaagagttaccttcctaatgcacacctggaatgtcattacaccttaactccatatattcatccacatccaaaagattgggttggtatattcaaggttggatggagtactgctcgtgattattacacgtttttatggtcccctatgcctgaacattatgtggaaggatcaacagtcaattgtgtactagcattccaaggatattaccttccaaatgatgatggagaattttatcagttctgttacgttacccataagggtgaaattcgtggagcaagtacacctttccagtttcgagcttcttctccagttgaagagctgcttactatggaagatgaaggaaattctgacatgttagtggtgaccacaaaagcaggccttcttgagttgaaaattgagaaaaccatgaaagaaaaagaagaactgttaaagttaattgccgttctggaaaaagaaacagcacaacttcgagaacaagttgggagaatggaaagagaacttaaccatgagaaagaaagatgtgaccaactgcaagcagaacaaaagggtcttactgaagtaacacaaagcttaaaaatggaaaatgaagagtttaagaagaggttcagtgatgctacatccaaagcccatcagcttgaggaagatattgtgtcagtaacacataaagcaattgaaaaagaaaccgaattagacagtttaaaggacaaactcaagaaggcacaacatgaaagagaacaacttgaatgtcagttgaagacagagaaggatgaaaaggaactttataaggtacatttgaagaatacagaaatagaaaataccaagcttatgtcagaggtccagactttaaaaaatttagatgggaacaaagaaagcgtgattactcatttcaaagaagagattggcaggctgcagttatgtttggctgaaaaggaaaatctgcaaagaactttcctgcttacaacctcaagtaaagaagatacttgttttttaaaggagcaacttcgtaaagcagaggaacaggttcaggcaactcggcaagaagttgtctttctggctaaagaactcagtgatgctgtcaacgtacgagacagaacgatggcagacctgcatactgcacgcttggaaaacgagaaagtgaaaaagcagttagctgatgcagtggcagaacttaaactaaatgctatgaaaaaagatcaggacaagactgatacactggaacacgaactaagaagagaagttgaagatctgaaactccgtcttcagatggctgcagaccattataaagaaaaatttaaggaatgccaaaggctccaaaaacaaataaacaaactttcagatcaatcagctaataataataatgtcttcacaaagaaaacggggaatcagcagaaagtgaatgatgcttcagtaaacacagacccagccacttctgcctctactgtagatgtaaagccatcaccttctgcagcagaggcagattttgacatagtaacaaaggggcaagtctgtgaaatgaccaaagaaattgctgacaaaacagaaaagtataataaatgtaaacaactcttgcaggatgagaaagcaaaatgcaataaatatgctgatgaacttgcaaaaatggagctgaaatggaaagaacaagtgaaaattgctgaaaatgtaaaacttgaactagctgaagtacaggacaattataaagaacttaaaaggagtctagaaaatccagcagaaaggaaaatggaagatggagcagatggtgctttttacccagatgaaatacaaaggccacctgtcagagtcccctcttggggactggaagacaatgttgtctgcagccagcctgctcgaaactttagtcggcctgatggcttagaggactctgaggatagcaaagaagatgagaatgtgcctactgctcctgatcctccaagtcaacatttacgtgggcatgggacaggcttttgctttgattccagctttgatgttcacaagaagtgtcccctctgtgagttaatgtttcctcctaactatgatcagagcaaatttgaagaacatgttgaaagtcactggaaggtgtgcccgatgtgcagcgagcagttccctcctgactatgaccagcaggtgtttgaaaggcatgtgcagacccattttgatcagaatgttctaaattttgactagttactttttattatgagttaatatagtttagcagtaaaaaaaaaaaaaaaaa

SEQ ID NO: 31065 - DNA, 2890 bp, Homo sapiens
  source 1..2890: mol_type = unassigned DNA
gaagaggttcggcggctgatggcggatcaggatcggaagcctgcgtaactttctcccttgatccgggagtctttccactggattcacaatgacatcctttcaagaagtcccattgcagacttccaactttgcccatgtcatctttcaaaatgtggccaagagttaccttcctaatgcacacctggaatgtcattacaccttaactccatatattcatccacatccaaaagattgggttggtatattcaaggttggatggagtactgctcgtgattattacacgtttttatggtcccctatgcctgaacattatgtggaaggatcaacagtcaattgtgtactagcattccaaggatattaccttccaaatgatgatggagaattttatcagttctgttacgttacccataagggtgaaattcgtggagcaagtacacctttccagtttcgagcttcttctccagttgaagagctgcttactatggaagatgaaggaaattctgacatgttagtggtgaccacaaaagcaggccttcttgagttgaaaattgagaaaaccatgaaagaaaaagaagaactgttaaagttaattgccgttctggaaaaagaaacagcacaacttcgagaacaagttgggagaatggaaagagaacttaaccatgagaaagaaagatgtgaccaactgcaagcagaacaaaagggtcttactgaagtaacacaaagcttaaaaatggaaaatgaagagtttaagaagaggttcagtgatgctacatccaaagcccatcagcttgaggaagatattgtgtcagtaacacataaagcaattgaaaaagaaaccgaattagacagtttaaaggacaaactcaagaaggcacaacatgaaagagaacaacttgaatgtcagttgaagacagagaaggatgaaaaggaactttataaggtacatttgaagaatacagaaatagaaaataccaagcttatgtcagaggtccagactttaaaaaatttagatgggaacaaagaaagcgtgattactcatttcaaagaagagattggcaggctgcagttatgtttggctgaaaaggaaaatctgcaaagaactttcctgcttacaacctcaagtaaagaagatacttgttttttaaaggagcaacttcgtaaagcagaggaacaggttcaggcaactcggcaagaagttgtctttctggctaaagaactcagtgatgctgtcaacgtacgagacagaacgatggcagacctgcatactgcacgcttggaaaacgagaaagtgaaaaagcagttagctgatgcagtggcagaacttaaactaaatgctatgaaaaaagatcaggacaagactgatacactggaacacgaactaagaagagaagttgaagatctgaaactccgtcttcagatggctgcagaccattataaagaaaaatttaaggaatgccaaaggctccaaaaacaaataaacaaactttcagatcaatcagctaataataataatgtcttcacaaagaaaacggggaatcagcagaaagtgaatgatgcttcagtaaacacagacccagccacttctgcctctactgtagatgtaaagccatcaccttctgcagcagaggcagattttgacatagtaacaaaggggcaagtctgtgaaatgaccaaagaaattgctgacaaaacagaaaagtataataaatgtaaacaactcttgcaggatgagaaagcaaaatgcaataaatatgctgatgaacttgcaaaaatggagctgaaatggaaagaacaagtgaaaattgctgaaaatgtaaaacttgaactagctgaagtacaggacaattataaagaacttaaaaggagtctagaaaatccagcagaaaggaaaatggaaggtcagaattcccagagtcctcaatgtttcaaaacatgctcagagcaaaatggttatgttctcacattgtcaaatgcacaaccagttctgcaatatggtaatccttatgcatctcaggaaacaagagatggagcagatggtgctttttacccagatgaaatacaaaggccacctgtcagagtcccctcttggggactggaagacaatgttgtctgcagccagcctgctcgaaactttagtcggcctgatggcttagaggactctgaggatagcaaagaagatgagaatgtgcctactgctcctgatcctccaagtcaacatttacgtgggcatgggacaggcttttgctttgattccagctttgatgttcacaagaagtgtcccctctgtgagttaatgtttcctcctaactatgatcagagcaaatttgaagaacatgttgaaagtcactggaaggtgtgcccgatgtgcagcgagcagttccctcctgactatgaccagcaggtgtttgaaaggcatgtgcagacccattttgatcagaatgttctaaattttgactagttactttttattatgagttaatatagtttagcagtaaaaaaaaaaaaaaaaaccacacctaaaatagaccactgaggagaccatagagcggatgctttcatgcaccctttactgcactttctgaccaggagctactttgagtttggtgttactaggatcagggtcagtctttggcttatcaataaattttaatctctgttaatcttacctgctttaaaaaaaagttcttgtgtgttcgtatctttatttattccctagtttgcagaactgtctgaataaaggatacaaggattatttcaatgttactgcactgaaaaacgtgtatgtattagtgtgctagattatttagcagaatattcacaagtttctgttgaccttgttgattgagcatgactactaaatattatgtaataaaaagcatttgtcataaca

SEQ ID NO: 31066 - DNA, 641 bp, Homo sapiens
  source 1..641: mol_type = unassigned DNA
acatatcctttctggtgctattgcaaggtttgtcagggttttacggcaacagaagactatgatgaattcgaatgggacacatttgcttctgtggagttacgattcaaactgaatgtccaatataggaaggcaacatatacaacaagcaaaagtgattttagaaataacagaacgcgggagaaaattcacacacggaaaatgatacggataacaaaagcagattcacaatgacatcctttcaagaagtcccattgcagacttccaactttgcccatgtcatctttcaaaatgtggccaagagttaccttcctaatgcacacctggaatgtcattacaccttaactccatatattcatccacatccaaaagattgggttggtatattcaaggttggatggagtactgctcgtgattattacacgtttttatggtcccctatgcctgaacattatgtggaaggatcaacagtcaattgtgtactagcattccaaggatattaccttccaaatgatgatggagaattttatcagttctgttacgttacccataagggtgaaattcgtggagcaagtacacctttccagtttcgagcttcttctccagttgaagagctgcttactatggaagatgaaggaaattct

SEQ ID NO: 31067 - DNA, 570 bp, Homo sapiens
  source 1..570: mol_type = unassigned DNA
aatagaatcagagggcattagaactgaaaagctcctaggagctttcagtgaacaaaacttcatagccaaaaaagcacacgactgggccaggagttcagagacagtcttggtgctcaggggtttgcagccctagccgtgtggtcactcccttgcttctctggctatttccttatctataaaatgagtgggctagtttaggccgactgagacgcagacagggatacggtactgtccatggacctctgagctgccctttccacatcgctgattcacaatgacatcctttcaagaagtcccattgcagacttccaactttgcccatgtcatctttcaaaatgtggccaagagttaccttcctaatgcacacctggaatgtcattacaccttaactccatatattcatccacatccaaaagattgggttggtatattcaaggttggatggagtactgctcgtgattattacacgtttttatggtcccctatgcctgaacattatgtggaaggatcaacagtcaattgtgtactagcattccaaggatattaccttccaaatgatgatggagaatt

SEQ ID NO: 31068 - DNA, 2221 bp, Homo sapiens
  source 1..2221: mol_type = unassigned DNA
aggggaggtgtagccggtctttgggggtaggcggtagtggcggaagaggttcggcggctgatggcggatcaggatcggaagcctgcgtaactttctcccttgatccgggagtctttccactggattcacaatgacatcctttcaagaagtcccattgcagacttccaactttgcccatgtcatctttcaaaatgtggccaagagttaccttcctaatgcacacctggaatgtcattacaccttaactccatatattcatccacatccaaaagattgggttggtatattcaaggttggatggagtactgctcgtgattattacacgtttttatggtcccctatgcctgaacattatgtggaaggatcaacagtcaattgtgtactagcattccaagttgaaaattgagaaaaccatgaaagaaaaagaagaactgttaaagttaattgccgttctggaaaaagaaacagcacaacttcgagaacaagttgggagaatggaaagagaacttaaccatgagaaagaaagatgtgaccaactgcaagcagaacaaaagggtcttactgaagtaacacaaagcttaaaaatggaaaatgaagagtttaagaagaggttcagtgatgctacatccaaagcccatcagcttgaggaagatattgtgtcagtaacacataaagcaattgaaaaagaaaccgaattagacagtttaaaggacaaactcaagaaggcacaacatgaaagagaacaacttgaatgtcagttgaagacagagaaggatgaaaaggaactttataaggtacatttgaagaatacagaaatagaaaataccaagcttatgtcagaggtccagactttaaaaaatttagatgggaacaaagaaagcgtgattactcatttcaaagaagagattggcaggctgcagttatgtttggctgaaaaggaaaatctgcaaagaactttcctgcttacaacctcaagtaaagaagatacttgttttttaaaggagcaacttcgtaaagcagaggaacaggttcaggcaactcggcaagaagttgtctttctggctaaagaactcagtgatgctgtcaacgtacgagacagaacgatggcagacctgcatactgcacgcttggaaaacgagaaagtgaaaaagcagttagctgatgcagtggcagaacttaaactaaatgctatgaaaaaagatcaggacaagactgatacactggaacacgaactaagaagagaagttgaagatctgaaactccgtcttcagatggctgcagaccattataaagaaaaatttaaggaatgccaaaggctccaaaaacaaataaacaaactttcagatcaatcagctaataataataatgtcttcacaaagaaaacggggaatcagcagaaagtgaatgatgcttcagtaaacacagacccagccacttctgcctctactgtagatgtaaagccatcaccttctgcagcagaggcagattttgacatagtaacaaaggggcaagtctgtgaaatgaccaaagaaattgctgacaaaacagaaaagtataataaatgtaaacaactcttgcaggatgagaaagcaaaatgcaataaatatgctgatgaacttgcaaaaatggagctgaaatggaaagaacaagtgaaaattgctgaaaatgtaaaacttgaactagctgaagtacaggacaattataaagaacttaaaaggagtctagaaaatccagcagaaaggaaaatggaagatggagcagatggtgctttttacccagatgaaatacaaaggccacctgtcagagtcccctcttggggactggaagacaatgttgtctgcagccagcctgctcgaaactttagtcggcctgatggcttagaggactctgaggatagcaaagaagatgagaatgtgcctactgctcctgatcctccaagtcaacatttacgtgggcatgggacaggcttttgctttgattccagctttgatgttcacaagaagtgtcccctctgtgagttaatgtttcctcctaactatgatcagagcaaatttgaagaacatgttgaaagtcactggaaggtgtgcccgatgtgcagcgagcagttccctcctgactatgaccagcaggtgtttgaaaggcatgtgcagacccattttgatcagaatgttctaaattttgactagttactttttattatgagttaatatagtttagcagt

SEQ ID NO: 31069 - DNA, 2693 bp, Homo sapiens
  source 1..2693: mol_type = unassigned DNA
acggcaacagaagactatgatgaattcgaatgggacacatttgcttctgtggagttacgattcaaactgaatgtccaatataggaaggcaacatatacaacaagcaaaagtgattttagaaataacagaacgcgggagaaaattcacacacggaaaatgatacggataacaaaagcagattcacaatgacatcctttcaagaagtcccattgcagacttccaactttgcccatgtcatctttcaaaatgtggccaagagttaccttcctaatgcacacctggaatgtcattacaccttaactccatatattcatccacatccaaaagattgggttggtatattcaaggttggatggagtactgctcgtgattattacacgtttttatggtcccctatgcctgaacattatgtggaaggatcaacagtcaattgtgtactagcattccaaggatattaccttccaaatgatgatggagaattttatcagttctgttacgttacccataagggtgaaattcgtggagcaagtacacctttccagtttcgagcttcttctccagttgaagagctgcttactatggaagatgaaggaaattctgacatgttagtggtgaccacaaaagcaggccttcttgagttgaaaattgagaaaaccatgaaagaaaaagaagaactgttaaagttaattgccgttctggaaaaagaaacagcacaacttcgagaacaagttgggagaatggaaagagaacttaaccatgagaaagaaagatgtgaccaactgcaagcagaacaaaagggtcttactgaagtaacacaaagcttaaaaatggaaaatgaagagtttaagaagaggttcagtgatgctacatccaaagcccatcagcttgaggaagatattgtgtcagtaacacataaagcaattgaaaaagaaaccgaattagacagtttaaaggacaaactcaagaaggcacaacatgaaagagaacaacttgaatgtcagttgaagacagagaaggatgaaaaggaactttataaggtacatttgaagaatacagaaatagaaaataccaagcttatgtcagaggtccagactttaaaaaatttagatgggaacaaagaaagcgtgattactcatttcaaagaagagattggcaggctgcagttatgtttggctgaaaaggaaaatctgcaaagaactttcctgcttacaacctcaagtaaagaagatacttgttttttaaaggagcaacttcgtaaagcagaggaacaggttcaggcaactcggcaagaagttgtctttctggctaaagaactcagtgatgctgtcaacgtacgagacagaacgatggcagacctgcatactgcacgcttggaaaacgagaaagtgaaaaagcagttagctgatgcagtggcagaacttaaactaaatgctatgaaaaaagatcaggacaagactgatacactggaacacgaactaagaagagaagttgaagatctgaaactccgtcttcagatggctgcagaccattataaagaaaaatttaaggaatgccaaaggctccaaaaacaaataaacaaactttcagatcaatcagctaataataataatgtcttcacaaagaaaacggggaatcagcagaaagtgaatgatgcttcagtaaacacagacccagccacttctgcctctactgtagatgtaaagccatcaccttctgcagcagaggcagattttgacatagtaacaaaggggcaagtctgtgaaatgaccaaagaaattgctgacaaaacagaaaagtataataaatgtaaacaactcttgcaggatgagaaagcaaaatgcaataaatatgctgatgaacttgcaaaaatggagctgaaatggaaagaacaagtgaaaattgctgaaaatgtaaaacttgaactagctgaagtacaggacaattataaagaacttaaaaggagtctagaaaatccagcagaaaggaaaatggaagatggagcagatggtgctttttacccagatgaaatacaaaggccacctgtcagagtcccctcttggggactggaagacaatgttgtctgcagccagcctgctcgaaactttagtcggcctgatggcttagaggactctgaggatagcaaagaagatgagaatgtgcctactgctcctgatcctccaagtcaacatttacgtgggcatgggacaggcttttgctttgattccagctttgatgttcacaagaagtgtcccctctgtgagttaatgtttcctcctaactatgatcagagcaaatttgaagaacatgttgaaagtcactggaaggtgtgcccgatgtgcagcgagcagttccctcctgactatgaccagcaggtgtttgaaaggcatgtgcagacccattttgatcagaatgttctaaattttgactagttactttttattatgagttaatatagtttagcagtaaaaaaaaaaaaaaaaaccacacctaaaatagaccactgaggagaccatagagcggatgctttcatgcaccctttactgcactttctgaccaggagctactttgagtttggtgttactaggatcagggtcagtctttggcttatcaataaattttaatctctgttaatcttacctgctttaaaaaaaagttcttgtgtgttcgtatctttatttattccctagtttgca

SEQ ID NO: 31070 - DNA, 4119 bp, Homo sapiens
  source 1..4119: mol_type = unassigned DNA
ctcttcggctgctgctcctggtgccgccaccgtccgccggtgcctgttgctgccgccgccgcgggacctgctgtgtcctcagctgggtggagaagaggcgggcgccgagccgaggggagccccctccccgtccccccgcggcgggaagagcgcagccagccgggtgcgatggactccccgcccgcccaggccgtccccaggatgcccccaagcacctgcgcgtcccggcccggccccgggctctgagcgcgccgcggcacaggtttctgcatatgaagtgtgtaaaatagattgcttgatccaaaacagaaaaacagtgataactgttttgctgagttcccagacccttcccaagatggaaccaataacattcacagcaaggaaacatctgctttctaacgaggtctcggtggattttggcctgcagctggtgggctccctgcctgtgcattccctgaccaccatgcccatgctgccctgggttgtggctgaggtgcgaagactcagcaggcagtccaccagaaaggaacctgtaaccaagcaagtccggctttgcgtttcaccctctggactgagatgtgaacctgagccagggagaagtcaacagtgggatcccctgatctattccagcatctttgagtgcaagcctcagcgtgttcacaaactgattcacaacagtcatgacccaagttactttgcttgtctgattaaggaagacgctgtccaccggcagagtatctgctatgtgttcaaagccgatgatcaaacaaaagtgcctgagatcatcagctccatccgtcaggcggggaagatcgcccggcaggaggagctgcactgcccgtccgagttcgacgacacgttttccaagaagttcgaggtgctcttctgcggccgcgtgacggtggcgcacaagaaggctccgccggccctgatcgacgagtgcatcgagaagttcaatcacgtcagcggcagccgggggtccgagagcccccgccccaacccgccccatgccgcgcccacagggagccaggagcctgtgcgcaggcccatgcgcaagtccttctcccagcccggcctgcgctcgctggcctttaggaaggagctgcaggatgggggcctccgaagcagcggcttcttcagctccttcgaggagagcgacattgagaaccacctcattagcggacacaatattgtgcagcccacagatatcgaggaaaatcgaactatgctcttcacgattggccagtctgaagtttacctcatcagtcctgacaccaaaaaaatagcattggagaaaaattttaaggagatatccttttgctctcagggcatcagacacgtggaccactttgggtttatctgtcgggagtcttccggaggtggcggctttcattttgtctgttacgtgtttcagtgcacaaatgaggctctggttgatgaaattatgatgaccctgaaacaggccttcacggtggccgcagtgcagcagacagctaaggcgccagcccagctgtgtgagggctgccccctgcaaagcctgcacaagctctgtgagaggatagagggaatgaattcttccaaaacaaaactagaactgcaaaagcacctgacgacattaaccaatcaggagcaggcgactatttttgaagaggttcagaaattgagaccgagaaatgagcagcgagagaatgaattgattatttcttttctgagatgtttatatgaagagaaacagaaagaacacatccatattggggagatgaagcagacatcgcagatggcagcagagaatattggaagtgaattaccacccagtgccactcgatttaggctagatatgctgaaaaacaaagcaaagagatctttaacagagtctttagaaagtattttgtcccggggtaataaagccagaggcctgcaggaacactccatcagtgtggatctggatagctccctgtctagtacattaagtaacaccagcaaagagccatctgtgtgtgaaaaggaggccttgcccatctctgagagctcctttaagctcctcggctcctcggaggacctgtccagtgactcggagagtcatctcccagaagagccagctccgctgtcgccccagcaggccttcaggaggcgagcaaacaccctgagtcacttccccatcgaatgccaggaacctccacaacctgcccgggggtccccgggggtttcgcaaaggaaacttatgaggtatcactcagtgagcacagagacgcctcatgaacgaaatgtggatccttcacctgtgggtgagtctaagcaccgcccaggtcagtcttcagctcctgctcctccacctcgtcttaacccctccgcctcctcgccaaacttttttaagtacctaaaacataattccagtggagaacaaagtgggaatgctgtgccaaagagcatctcctaccgtaatgccctgcggaaaaaacttcattcttcttcctctgtgccaaattttctaaaatttctggctcctgtagatgaaaataacacctctgattttatgaacacaaaaagggactttgaatccaaagcaaaccatcttggtgattctggtgggactcctgtgaagacccggaggcattcctggaggcagcagatattcctccgagtagccaccccgcagaaggcgtgcgattcttccagcagatatgaagattattcagagctgggagagcttcccccacgatctcctttagaaccagtttgtgaagatgggccctttggccccccaccagaggaaaagaaaaggacatctcgtgagctccgagagctgtggcaaaaggctattcttcaacagatactgctgcttagaatggagaaggaaaatcagaagctccaagcctctgaaaatgatttgctgaacaagcgcctgaagctcgattatgaagaaattactccctgtcttaaagaagtaactacagtgtgggaaaagatgcttagcactccaggaagatcaaaaattaagtttgacatggaaaaaatgcactcggctgttgggcaaggtgtgccacgtcatcaccgaggtgaaatctggaaatttctagctgagcaattccaccttaaacaccagtttcccagcaaacagcagccaaaggatgtgccatacaaagaactcttaaagcagctgacttcccagcagcatgcgattcttattgaccttgggcgaacctttcctacacacccatacttctctgcccagcttggagcaggacagctatcgctttacaacattttgaaggcctactcacttctagaccaggaagtgggatattgccaaggtctcagctttgtagcaggcattttgcttcttcatatgagtgaggaagaggcgtttaaaatgctcaagtttctgatgtttgacatggggctgcggaaacagtatcggccagacatgattattttacagatggaaaagaccatcaatcaggtatttgaaatggacatcgctaaacagttacaagcttatgaagttgagtaccacgtccttcaagaagaacttatcgattcctctcctctcagtgacaaccaaagaatggataaattagagaaaaccaacagcagcttacgcaaacagaaccttgacctccttgaacagttgcaggtggcaaatggtaggatccaaagccttgaggccaccattgagaagctcctgagcagtgagagcaagctgaagcaggccatgcttaccttagaactggagcggtcggccctgctgcagacggtggaggagctgcggcggcggagcgcagagcccagcgaccgggagcctgagtgcacgcagcccgagcccacgggcgactgacagctctgcaggagagattgcaacaccatcccacactgtccaggccttaactgagagggacagaagacgctggaaggagagaaggaagcgggaagtgtgcttctcagggaggaaaccggcttgccagcaagtagattcttacgaactccaacttgcaattcagggggcatgtcccagtgttttttttgttgtttttagatactaaatcgtcccttctccagtcctgattactgtacacagtagctttagatggcgtggacgtgaataaatgcaacttatgtttt

SEQ ID NO: 31071 - DNA, 5700 bp, Homo sapiens
  source 1..5700: mol_type = unassigned DNA
ctcttcggctgctgctcctggtgccgccaccgtccgccggtgcctgttgctgccgccgccgcgggacctgctgtgtcctcagctgggtggagaagaggcgggcgccgagccgaggggagccccctccccgtccccccgcggcgggaagagcgcagccagccgggtgcgatggactccccgcccgcccaggccgtccccaggatgcccccaagcacctgcgcgtcccggcccggccccgggctctgagcgcgccgcggcacaggtttctgcatatgaagtgtgtaaaatagattgcttgatccaaaacagaaaaacagtgataactgttttgctgagttcccagacccttcccaagatggaaccaataacattcacagcaaggaaacatctgctttctaacgaggtctcggtggattttggcctgcagctggtgggctccctgcctgtgcattccctgaccaccatgcccatgctgccctgggttgtggctgaggtgcgaagactcagcaggcagtccaccagaaaggaacctgtaaccaagcaagtccggctttgcgtttcaccctctggactgagatgtgaacctgagccagggagaagtcaacagtgggatcccctgatctattccagcatctttgagtgcaagcctcagcgtgttcacaaactgattcacaacagtcatgacccaagttactttgcttgtctgattaaggaagacgctgtccaccggcagagtatctgctatgtgttcaaagccgatgatcaaacaaaagtgcctgagatcatcagctccatccgtcaggcggggaagatcgcccggcaggaggagctgcactgcccgtccgagttcgacgacacgttttccaagaagttcgaggtgctcttctgcggccgcgtgacggtggcgcacaagaaggctccgccggccctgatcgacgagtgcatcgagaagttcaatcacgtcagcggcagccgggggtccgagagcccccgccccaacccgccccatgccgcgcccacagggagccaggagcctgtgcgcaggcccatgcgcaagtccttctcccagcccggcctgcgctcgctggcctttaggaaggagctgcaggatgggggcctccgaagcagcggcttcttcagctccttcgaggagagcgacattgagaaccacctcattagcggacacaatattgtgcagcccacagatatcgaggaaaatcgaactatgctcttcacgattggccagtctgaagtttacctcatcagtcctgacaccaaaaaaatagcattggagaaaaattttaaggagatatccttttgctctcagggcatcagacacgtggaccactttgggtttatctgtcgggagtcttccggaggtggcggctttcattttgtctgttacgtgtttcagtgcacaaatgaggctctggttgatgaaattatgatgaccctgaaacaggccttcacggtggccgcagtgcagcagacagctaaggcgccagcccagctgtgtgagggctgccccctgcaaagcctgcacaagctctgtgagaggatagagggaatgaattcttccaaaacaaaactagaactgcaaaagcacctgacgacattaaccaatcaggagcaggcgactatttttgaagaggttcagaaattgagaccgagaaatgagcagcgagagaatgaattgattatttcttttctgagatgtttatatgaagagaaacagaaagaacacatccatattggggagatgaagcagacatcgcagatggcagcagagaatattggaagtgaattaccacccagtgccactcgatttaggctagatatgctgaaaaacaaagcaaagagatctttaacagagtctttagaaagtattttgtcccggggtaataaagccagaggcctgcaggaacactccatcagtgtggatctggatagctccctgtctagtacattaagtaacaccagcaaagagccatctgtgtgtgaaaaggaggccttgcccatctctgagagctcctttaagctcctcggctcctcggaggacctgtccagtgactcggagagtcatctcccagaagagccagctccgctgtcgccccagcaggccttcaggaggcgagcaaacaccctgagtcacttccccatcgaatgccaggaacctccacaacctgcccgggggtccccgggggtttcgcaaaggaaacttatgaggtatcactcagtgagcacagagacgcctcatgaacgaaaggactttgaatccaaagcaaaccatcttggtgattctggtgggactcctgtgaagacccggaggcattcctggaggcagcagatattcctccgagtagccaccccgcagaaggcgtgcgattcttccagcagatatgaagattattcagagctgggagagcttcccccacgatctcctttagaaccagtttgtgaagatgggccctttggccccccaccagaggaaaagaaaaggacatctcgtgagctccgagagctgtggcaaaaggctattcttcaacagatactgctgcttagaatggagaaggaaaatcagaagctccaagcctctgaaaatgatttgctgaacaagcgcctgaagctcgattatgaagaaattactccctgtcttaaagaagtaactacagtgtgggaaaagatgcttagcactccaggaagatcaaaaattaagtttgacatggaaaaaatgcactcggctgttgggcaaggtgtgccacgtcatcaccgaggtgaaatctggaaatttctagctgagcaattccaccttaaacaccagtttcccagcaaacagcagccaaaggatgtgccatacaaagaactcttaaagcagctgacttcccagcagcatgcgattcttattgaccttgggcgaacctttcctacacacccatacttctctgcccagcttggagcaggacagctatcgctttacaacattttgaaggcctactcacttctagaccaggaagtgggatattgccaaggtctcagctttgtagcaggcattttgcttcttcatatgagtgaggaagaggcgtttaaaatgctcaagtttctgatgtttgacatggggctgcggaaacagtatcggccagacatgattattttacagatccagatgtaccagctctcgaggttgcttcatgattaccacagagacctctacaatcacctggaggagcacgagatcggccccagcctctacgctgccccctggttcctcaccatgtttgcctcacagttcccgctgggattcgtagccagagtctttgatatgatttttcttcagggaacagaggtcatatttaaagtggctttaagtctgttgggaagccataagcccttgattctgcagcatgaaaacctagaaaccatagttgactttataaaaagcacgctacccaaccttggcttggtacagatggaaaagaccatcaatcaggtatttgaaatggacatcgctaaacagttacaagcttatgaagttgagtaccacgtccttcaagaagaacttatcgattcctctcctctcagtgacaaccaaagaatggataaattagagaaaaccaacagcagcttacgcaaacagaaccttgacctccttgaacagttgcaggtggcaaatggtaggatccaaagccttgaggccaccattgagaagctcctgagcagtgagagcaagctgaagcaggccatgcttaccttagaactggagcggtcggccctgctgcagacggtggaggagctgcggcggcggagcgcagagcccagcgaccgggagcctgagtgcacgcagcccgagcccacgggcgactgacagctctgcaggagagattgcaacaccatcccacactgtccaggccttaactgagagggacagaagacgctggaaggagagaaggaagcgggaagtgtgcttctcagggaggaaaccggcttgccagcaagtagattcttacgaactccaacttgcaattcagggggcatgtcccagtgttttttttgttgtttttagatactaaatcgtcccttctccagtcctgattactgtacacagtagctttagatggcgtggacgtgaataaatgcaacttatgttttcttgttggttcctttttgagtgtcactgtgtttgtaaagagcattcacaatacggtggaatttcaaaagctggaagagctcgagatcatgcctcaggcaaaggcgtgggtccatcgttcttccgagagggtttgtgtggcgactacaccctcagcgtccctggcaaggtgcagttggctctcgcccattcttgttatggaaacctaagatgatcattgggaagatcagtgatcttgggtcattgatccctggctcagaggatagcggtttccatcataaaccaagatgatgagttcagcctttatccctcgtggttccactagatgtaacttaaaggagttaacatttgaggactttgttctacatcagattttactatttgaatgtttaagatcactttattgaatttgaagatcatcaaattaaataaaatgatttatttaatttggatatcctgatcactgtcaagtgaaatggatctctctctttggtatttaaggaagtttgtctttaaaaaaaaaatagagtgttttcatacatttttgcttatcccataagtacagttgatcaaagtcatagtaggtaaatgctttatgggacagctgacaccttttagaccctaccaggtattgctagcatgtgagctgcagttgtggggtctgagatatttctttgtggtagtttcatacccatactatagagtcatgtatttatttttgcctgttgtgtgatgtaatgcaatcatgttcctttgagtctccatcccttggaaatctgacttcttgcagaaggagtaggcacatcaagatattcaggggtgccccaagagtctgggactttcaaaaaaaaaagatcaggctgaaactgcagtcagatttatgacagctgacagtttttcagaggtcgcacacagtgactctcctctctcaggatgacgaggacctgtgccttcaacaagcaaaatgctgctcacggttgtcctgcttgcagccagtcactgtgtaaagcctctctgatgtgcacttaagagtgggttgctttctcacaaagatggggttctgtgcagtcacaggtcacttccttgacaacacaatcatttctgatctttatcactgtaaccacgtcttctattccataggagtttcttttgattctctcagttgcggggggcatctcttaatcctggggtaaaaggagagattgccatacttagactcactgtgagtctccccggccatttcacgaggagaccacagtgctgccaccagtgcctaaacaggtggctggcattcgagacttcctcctgttccctgggtcagaggatagcggtttccatcataaaccaagatgatgagttcagcctttatccctcgtggttccgctagatgtaacttataggagttaacatttgaggactttgttctgcatcagatcttactatttgaatgtttactgttggattttgggcatcttattactgttactcaaaaacattgactctgcatcaagaaagaaacaagaaagcaataaaacaagaaataattcatgctcaca

SEQ ID NO: 31072 - DNA, 2383 bp, Homo sapiens
  source 1..2383: mol_type = unassigned DNA
cccaggtttctgcatatgaagtgtgtaaaatagattgcttgatccaaaacagaaaaacagtgataactgttttgctgagttcccagacccttcccaagatggaaccaataacattcacagcaaggaaacatctgctttctaacgaggtctcggtggattttggcctgcagctggtgggctccctgcctgtgcattccctgaccaccatgcccatgctgccctgggttgtggctgaggtgcgaagactcagcaggcagtccaccagaaaggaacctgtaaccaagcaagtccggctttgcgtttcaccctctggactgagatgtgaacctgagccagggagaagtcaacagtgggatcccctgatctattccagcatctttgagtgcaagcctcagcgtgttcacaaactgattctggtgggactcctgtgaagacccggaggcattcctggaggcagcagatattcctccgagtagccaccccgcagaaggcgtgcgattcttccagcagatatgaagattattcagagctgggagagcttcccccacgatctcctttagaaccagtttgtgaagatgggccctttggccccccaccagaggaaaagaaaaggacatctcgtgagctccgagagctgtggcaaaaggctattcttcaacagatactgctgcttagaatggagaaggaaaatcagaagctccaagcctctgaaaatgatttgctgaacaagcgcctgaagctcgattatgaagaaattactccctgtcttaaagaagtaactacagtgtgggaaaagatgcttagcactccaggaagatcaaaaattaagtttgacatggaaaaaatgcactcggctgttgggcaaggtgtgccacgtcatcaccgaggtgaaatctggaaatttctagctgagcaattccaccttaaacaccagtttcccagcaaacagcagccaaaggatgtgccatacaaagaactcttaaagcagctgacttcccagcagcatgcgattcttattgaccttgggcgaacctttcctacacacccatacttctctgcccagcttggagcaggacagctatcgctttacaacattttgaaggcctactcacttctagaccaggaagtgggatattgccaaggtctcagctttgtagcaggcattttgcttcttcatatgagtgaggaagaggcgtttaaaatgctcaagtttctgatgtttgacatggggctgcggaaacagtatcggccagacatgattattttacagatccagatgtaccagctctcgaggttgcttcatgattaccacagagacctctacaatcacctggaggagcacgagatcggccccagcctctacgctgccccctggttcctcaccatgtttgcctcacagttcccgctgggattcgtagccagagtctttgatatgatttttcttcagggaacagaggtcatatttaaagtggctttaagtctgttgggaagccataagcccttgattctgcagcatgaaaacctagaaaccatagttgactttataaaaagcacgctacccaaccttggcttggtacagatggaaaagaccatcaatcaggtatttgaaatggacatcgctaaacagttacaagcttatgaagttgagtaccacgtccttcaagaagaacttatcgattcctctcctctcagtgacaaccaaagaatggataaattagagaaaaccaacagcagcttacgcaaacagaaccttgacctccttgaacagttgcaggtggcaaatggtaggatccaaagccttgaggccaccattgagaagctcctgagcagtgagagcaagctgaagcaggccatgcttaccttagaactggagcggtcggccctgctgcagacggtggaggagctgcggcggcggagcgcagagcccagcgaccgggagcctgagtgcacgcagcccgagcccacgggcgactgacagctctgcaggagagattgcaacaccatcccacactgtccaggccttaactgagagggacagaagacgctggaaggagagaaggaagcgggaagtgtgcttctcagggaggaaaccggcttgccagcaagtagattcttacgaactccaacttgcaattcagggggcatgtcccagtgttttttttgttgtttttagatactaaatcgtcccttctccagtcctgattactgtacacagtagctttagatggcgtggacgtgaataaatgcaacttatgttttcttgttggttcctttttgagtgtcactgtgtttgtaaagagcattcacaatacggtggaatttcaaaagctggaagagctcgagatcatgcctcaggcaaaggcgtgggtccatcgttcttccg

SEQ ID NO: 31073 - DNA, 1520 bp, Homo sapiens
  source 1..1520: mol_type = unassigned DNA
ggaggaggaggaagtgagaggaggaggccccgggcaccatggcccaggccctgggggaggacctggtgcagcctcccgagctgcaggatgactccagctccttggggtccgactcagagctcagcgggcctggcccatatcgccaggccgaccgctatggattcattgggggcagctcagcagagccagggccgggccacccacctgcagacctcatccgccaacgggagatgaagtgggtggagatgacctcgcactgggagaaaaccatgtcccggcggtacaagaaggtaaagatgcagtgccggaaaggcatcccgtctgccctgcgcgcccgatgctggcccctgttgtgtggggcccatgtgtgccagaagaacagccctggcacctatcaggagctggcagaggcccctggagacccacagtggatggagaccattggcagggacctgcaccgtcaattccctctgcacgagatgtttgtgtcgcctcagggccacggcaggggctcctgcaggtgctcaaggcctacaccctgtatcgaccggagcagggctactgccaggcccaggggcccgtggctgctgtgctgctcatgcacctgcccccagaggaggccttctggtgcctggtgcagatctgtgaggtctacctccctgggtactacgggccccacatggtgccagagtactgttccgtgtggggctgacactggtgcgcctggcgctgggcactgcagagcagcgaggggcctgccctggcctcctggagacactgggagcccttcgagccatcccccccgcgcagctgcaggaggaggccttcatgtcacaggtgcacagcgtggtgctgtcagagcgggacctgcagcgggagatcaaggcccagctggcccagctgcccgattccgcgccgggacccccgccccggccacaggtccgcctcgccggggcccaagccatctttgaggcccagcagctggcaggagtgcgacgaggcgccaagcctgaggtgcctcggattgtggtgcagcccccggaggagcccagaccaccgcggcggaaaccccagacccgcggcaagactttccatgggctcctgactcgggcccggggcccccccatcgaggggccccccaggccccaacgaggctccacctccttcctggacacccgcttctgagaggaccatggacttagtgtcccccagtctcaattgcctgatggctgatgccggcccggcaaataggcaccgcactttactcttgggactcggggacttggcttccttcctggcaaggaccaggcagtggggaaggaggaggtcctccgtggtacatactgggtcaggcactagcatggaggagggtcacagagtggggcacgtgaggacccatggaaccgtcctggtgcccaggccctcacaagtaccaaagccagcaccaaaggagtcagggaaggggttggctgagtcaagggaccccagagggcaccaggaataaaatcttcttgaacaga

SEQ ID NO: 31074 - DNA, 6578 bp, Homo sapiens
  source 1..6578: mol_type = unassigned DNA
gctgaggagaaagcggcgcgcggagggtgtgagatggcagacaggtttgcaggaaaccctcagaaagggggctggaggatttagccactctgtcctccccttccggcagtccagggcctcctcccgagcacagcggcgctatggactctccaggatacaactgcttcgtggacaaagacaagatggacgctgccatccaggacctggggcccaaggagctgagctgcactgaactgcaggaactgaagcagctggcgcgccagggctactgggcccaaagccacgccctgcggggaaaggtgtaccagcgcctgatccgggacattccctgccgcacggtcacgcctgacgccagcgtgtacagcgacatcgtgggcaagatcgtgggcaagcacagcagcagctgcctgccgctgcccgagttcgtggacaacacgcaggtgcccagctactgcctgaatgcacgcggcgagggggccgtgcgcaagatcctcctgtgcctggccaaccagttccccgacatctccttctgccccgccctgccggccgtggtggccctgctgctgcactacagcatcgacgaggccgagtgcttcgagaaggcctgccgcatcctggcctgcaatgaccccggcaggaggctgatcgaccagagcttcctggcctttgagtcgtcctgcatgacgtttggggacctggtgaacaagtactgccaggcggcccacaagctgatggtggccgtgtcggaggatgtcctgcaggtctatgcggactggcagcgctggctgtttggggagctgcccctctgctacttcgcccgggtctttgacgtcttcctggtggagggctacaaggtgctgtaccgcgtggcgctggccatcctcaagttcttccacaaggtgagggccgggcagccgctggagtcggacagcgtgaagcaggacatccgcacgttcgtcagagacatcgcgaagacggtgtcccctgagaagctgctggagaaagcgttcgccatccgcctcttctcccgcaaggagatccagctcctgcagatggccaatgagaaagccctgaagcagaagggcatcaccgtgaagcagaagaggcagtttgtacacttggccgtccatgcagagaacttccgctcggagatcgtcagcgtgagggagatgagagacatctggtcctgggtccccgagcgctttgccctgtgccagccccttctgctgttctcctccctgcagcacgggtacagcctggccaggttctacttccagtgtgaaggacatgagcctaccctcttgctcatcaagaccacgcagaaggaggtgtgtggtgcttacctgtccacagactggagtgagagaaataagtttggaggcaaactgggcttctttgggaccggagaatgctttgtgtttaggctgcagcctgaggtgcagcgctacgagtgggtggtgatcaagcaccccgagctgaccaagcccccacccttgatggctgccgagcccaccgccccactcagccactccgcctcctcagaccccgctgaccgcctctcgcccttcctggccgctcgccacttcaacctgccctccaagaccgagtccatgttcatggcggggggcagcgactgcctcatcgtcgggggaggaggcggccaggcgctctacatcgatggggacctgaaccggggccgcacaagccactgcgacaccttcaacaaccagcccctctgctccgagaacttcctcattgctgccgtggaggcctggggcttccaggaccctgacacccagtgacggcctgtgccacggtgactgagccgtggtggggcggtgggccgaggctgggctgccgcctcgggcagcagagagcagatgaaacccccatgtggtaggcagggttgggggacggcaggaccccatggccaagcctggcgttgcctggacctgctgctgcctctacctggggtttgggctgggcttccccagtccacctgcatctgggtcagagctggagggcctgctgtgcccccagccccacccagagctggcataggaagtaccttcctcctccgtggaggcttccatagcccaaggccttgggagtgtctgggtcttgctgcccctgagcctctctaggcagcctgagcccctggggtgggagtacaacggcagtgggaacgtgcagctaagggtgggcctgtggtgccccctgctggtgccgcatagcatcgcgccctcctgagcagggccctgcagcctggctggctggcgactgaatcccagcgtagatcccgagaacagactggcacccttgggcctgccccctggcggaccccaccccctgtcctgggcgtttgccccagttccctccccaggcctcctgggccacctctcacattaacccttcttggctgcctctgaggctcccctgggctgcgtttgggagctgctgggtgggaggaggagggtgggatttgtgctgggctccacccccagggagggtgggagctggagggggatgtcacatgtccttgtgtttctgcagagcctgaagcttttgctgggcctccctgcgtgttcccatctgaagaggtagccccgggagaggccctcagggaccgacccagaccagcaagctccatttccaggggtctgcccagagaagcctggacccagggggcttctcagctcccctcccttccagcccaggcctccttgagctcctgtagcctctgcagctgcccatttcacctctttgtcattgcaatgacctggggcccagggtcacgcccaagcccctctttgtggcatgctcatctcagtgcagccccaactgcttctctgcaccaggccccgtgccctcccctggccctggccacacagcacctccttggccaccttgcatggatgcatgtcctccctctgtccctcttgtggtgctgtggctggccacgtgtcagggttttctgtgagcctctcaccttacagcctttgggcccctgggcccctgccctgcctgagccctgcgctggccagacgcaggtaggtgccaggggaggccttgcctctgggcactatagggggcagccccctgccttgtgacctccctccatgccccatgacctccttcaactcgtcttgagggtctggtcaccacggaggggagaagggagacacagaggcccaagtggctgttctgggaccatggaagcctgggtcacagaggcaggtaccagcagtcctgcccccacccccgtccctgctggcctccagccagtgccacttggagtcccctgcaccgtgccactttccatccccacaccattgcctgctcctcccatggggctttagcctcccctgaccatctgctcatgtagcctctgactgggcgcacagtggtgcaggaggaaggaccgggaaccctgtgtggctttgggcaagctgacaaacccgtctggaactcagtttccccagctgtgaaatggggccagtccccatgccctgctgtcctcctcacaggactgttgagaggctcgcagggggatggggtgaatccctctcacggggagaggtatgggagggaagtcgccactcatctcagcccaccgcagccctccaggcccccgcctgagcccctgaggccctcatctgtaccgccagctttggtgttcattaaacatggtcttgctgcatcaactccagggctccaagctgagtctgatctcttcagccagaggggcctccgggggcttcctgggcctacagccaagcaggtgtgggaggctgcccgctgtagtgctcacccacattctatgactggaatgctgcaagcctcttccagagggagccctccaggagcagggaagtcatatccgtggaccatttgtaggtttccctctgcaaacttcctgaactgggtggtgatttttctggcgagttaagtccagcaggttctgcgtggctgcccccagggggccccacccgggccttccagtgatctggaccaggaagacggattgctgctgggtcatgatttccacatcatgagcgaagttctttgttttttgtgtgcatgcaaaatattgtttctttaaatttaatatcttttcctaacttttctactaacctagaaggtatgtgtgattattatcttttttattcttatcactgtacttgttagtatctgatattaggtattcccaaatagaacataatttattttgttaatgttctctatttcttcttgattatttattagctttggatgttaaaaattagccaaaagtggctgctctgcctatgaagtagccattctttgtttaaaaaaaaaaaaagccaacatttgttgaaactgcataataaattatcatttgtttttagaaacattcaaagaattattttttgattttttttttttttgggacagagtcacccaggctggagtgcagtggcatgatcttggctcactgcaacctccgcctcctgggttcaagcgattctcctgcctcagcctcctgagtagctgggattacaggcatacgccaccacgcccagctaaattttttttgtatttttagtagaggcagggtttcactgtgttggtcaggctggtcttgaactcctgacctcgtgatccacccccccctcagcctcccaaagtgctgggattacaggcgtgagccaccgcgcctagcctattttttaatttttttgaatagaccactttgtgctgaataaatgtttaacatttatttttaaaacaacaattgcacctaatttaaaatagtttattaaatgaattcattaaagcagattatatgcctttggggcttcagaaaatcagtttaagcaaaagaacttatgagagtaagtcatttgtacttgaattttttcagagttttaatgaactaaagtattttaatttttctatttttgtaagccgcatacttcattttttgagtttttcagtggaatttgttttaaaacgttttgaagatttcagaggccttcatatttctcttatccactttctgaacccataaagcctttgcagtctccttgagtagtttatatttagtaatttagttgtgtacctttttattttgaagtaatttttgatttgcagaagagttgcagagacggtacagggtttccatgtaccctcaccttcccccaagtcaatatcaaaacaaagaaataagcattgttgcattgctgttaactaaaccacaggcctattgagattgtcccttttttttttttttttttttttgagacagagtctcgctctgtcgcccaggctggagtgcagtggcgcgatctcggctcaccgcaagccccgcctcccggattcacgccattctcctgcctcagcctcctgagtagctgggactacaggcacctgctaccacacccggctaatttttttatatttttagtagagatggggtttcaccgtgttagccaggatggtcttgatctcctgacctcgtgatctgccctcctcggcctcccaaagtgctgggattacaggcgtgagcaaccgcgcccagccgagattgccccgtttttttcccactgtccaggaatcgatttaatttttacagttgtttactttctcacatttttactaagtccagaatatcatcaaactcacaaaaccactggtcaaaaaaacccaaatggccactaattaggcaatacagcacctgcctcaaatttgggttcatatagatttttttcctccctttttgtggagaacatagtcttgctgtgttgcccaggctagtcttgaactcctggactcaagcaatcctcccgcctctgcctccctaaattctgggattacaggcgtgagctgctgtgcccagctcatccagattcttgctggttctctttctcagcctaaatgtcttgtttgcgtggagaaattatcaaatgaagcaggagtgccaaacaagcctcataggctcttcaccctacaacatctatgttaggtagaaaagtatgtggatttttaaaaatcatctggtataaagagtttttaagaactatcttcatcatcttagtatcagattgtgcttgagaagttaggtacaatgtaatgtgattcattgctaaaaacaaaatgcctcccacaattgcagactcactcattttaccaaactatggaatttgtcaacaccttttcttgggaccaaggaagcaaagtcagtggataccgtgtcctgtagacatgtcacttgtgataaggcacggacaacatgaactggcaaaaacattggcatttggtcaaatgcttatgagctaaggatagaagggaaaaaatagttgtgtgaatgattttacctcttagttcttacgaaggatggttatcgggctggaaaaatgtttattggactgatgctttggagcctctcaatgaatgtaataaaaaaaatgtgtagtgagcacaaatgtatggatttgcagcacaatccaactttgaaaatgtgaaaataagtgagttagtgatatgtttggttggtgttaatttgagtcctaaataaaatcgagaactggtaaaagaag

SEQ ID NO: 31075 - DNA, 2077 bp, Homo sapiens
  source 1..2077: mol_type = unassigned DNA
ggggtccgcggcgcccattgggcgtggggggagagctccggggtgggcctggagccccgccccccggccttgcggcggccaataggcgccgcgcgtgggcggggcgtcggcggcagcagggcggctgaggtggccgctggagctcaggcggcgggcgcggctgggatggcgaagagcaacggagagaatgggccgcgcgcgcccgcggccggggaaagcctgtcgggaacccgggagagcctggcccagggccccgacgccgcaaccaccgacgaactcagctctctcgggtctgactcggaggccaacggcttcgccgagcgccgcatcgacaagttcggcttcatcgtgggctcgcagggcgccgagggcgcgctggaggaagtacccctggaggtgctgaggcagagggagtccaagtggctggacatgctcaacaactgggacaaatggatggccaagaagcacaaaaagattcgtctgcggtgccaaaagggcatcccgccttctctgcggggccgtgcttggcagtacctgtcaggaggcaaggtgaagttacagcagaaccctggaaagtttgacgagctggacatgtcccctggggaccccaagtggctggacgtgattgagcgtgacctgcaccggcagttcccattccatgagatgtttgtgtcccgggggggccacggccagcaggacctattccgtgtgctgaaggcctacacgctgtaccggcccgaggagggctactgccaggcccaggcgcccattgccgctgtcttgctcatgcatatgcctgctgagcaagccttctggtgcctggtacagatctgtgagaagtacctgcccggctactacagcgagaaactggaggcgatccagctggacggggagatccttttctcgctgttgcagaaggtgtcgccggtggcccacaagcacctcagccgtcagaagatcgacccgctcctctatatgacagaatggttcatgtgcgccttctcccgaaccttgccctggagctctgtgctgcgtgtctgggacatgttcttctgtgaaggggtcaagatcatcttccgggtggggctggtgctgctgaagcacgcgctgggctcccctgagaaggtcaaagcctgccagggccagtacgagaccatcgagcgactgcggagcctcagccccaagatcatgcaggaggcctttctggtccaggaggtggtggagttgcccgtgacagagcgccagattgagcgcgaacacctcattcagctgcggcgctggcaggagacccggggtgagctgcagtgccgctccccgcccaggctgcatggtgccaaggctatcttggatgcagaacctggtccccggcctgccctacaaccttcaccatccatccgcctgcccctagatgcccccctccctggctccaaagccaagcccaagccacccaagcaggcccagaaggagcagcggaaacagatgaaggggagagggcagctggagaagcccccagccccaaatcaagccatggtggtggccgctgcaggagatgcatgtcccccacagcatgtgcccccgaaggactcagcccccaaggactcagcccctcaggatttggctccccaggtctcagcccaccaccgctcccaggagagcttgacgtcccaagagagtgaggacacctacttgtaaccctggcagctaaggcctccagggcggggtctccatataactacacggttcatgaactgacattccacatcctgcccaccctctgagggccaagctgcctggccactgggctgggctggagtctggctggtccaacacagattctgcctggtccaacacagattctgcctgagcctccttatttattttctttacagtggcactcaggctggcccagccagggcaggcagaagctagggcctggggggtggggcctccttcagccccctcctcctgggggatgctccccagggttagggtgctggtgtgaggggaaagggtggggtgttctttgtgtaaaatagaaacatggttttgtacagaaataaacagccttgtatagaga

SEQ ID NO: 31076 - DNA, 1833 bp, Homo sapiens
  source 1..1833: mol_type = unassigned DNA
cccggaaggcggacgttgcagtgagccgagatcgcgccattgcactccagcctgggcaacaagcgcaaaactccgtctcaaaaaaataaaataaaaaggggagaatgatgttatagtagggttattacaaaaggtacatgtgataaaggctggaggaagtacccctggaggtgctgaggcagagggagtccaagtggctggacatgctcaacaactgggacaaatggatggccaagaagcacaaaaagattcgtctgcggtgccaaaagggcatcccgccttctctgcggggccgtgcttggcagtacctgtcaggaggcaaggtgaagttacagcagaaccctggaaagtttgacgagctggacatgtcccctggggaccccaagtggctggacgtgattgagcgtgacctgcaccggcagttcccattccatgagatgtttgtgtcccgggggggccacggccagcaggacctattccgtgtgctgaaggcctacacgctgtaccggcccgaggagggctactgccaggcccaggcgcccattgccgctgtcttgctcatgcatatgcctgctgagcaagccttctggtgcctggtacagatctgtgagaagtacctgcccggctactacagcgagaaactggaggcgatccagctggacggggagatccttttctcgctgttgcagaaggtgtcgccggtggcccacaagcacctcagccgtcagaagatcgacccgctcctctatatgacagaatggttcatgtgcgccttctcccgaaccttgccctggagctctgtgctgcgtgtctgggacatgttcttctgtgaaggggtcaagatcatcttccgggtggggctggtgctgctgaagcacgcgctgggctcccctgagaaggtcaaagcctgccagggccagtacgagaccatcgagcgactgcggagcctcagccccaagatcatgcaggaggcctttctggtccaggaggtggtggagttgcccgtgacagagcgccagattgagcgcgaacacctcattcagctgcggcgctggcaggagacccggggtgagctgcagtgccgctccccgcccaggctgcatggtgccaaggctatcttggatgcagaacctggtccccggcctgccctacaaccttcaccatccatccgcctgcccctagatgcccccctccctggctccaaagccaagcccaagccacccaagcaggcccagaaggagcagcggaaacagatgaaggggagagggcagctggagaagcccccagccccaaatcaagccatggtggtggccgctgcaggagatgcatgtcccccacagcatgtgcccccgaaggactcagcccccaaggactcagcccctcaggatttggctccccaggtctcagcccaccaccgctcccaggagagcttgacgtcccaagagagtgaggacacctacttgtaaccctggcagctaaggcctccagggcggggtctccatataactacacggttcatgaactgacattccacatcctgcccaccctctgagggccaagctgcctggccactgggctgggctggagtctggctggtccaacacagattctgcctggtccaacacagattctgcctgagcctccttatttattttctttacagtggcactcaggctggcccagccagggcaggcagaagctagggcctggggggtggggcctccttcagccccctcctcctgggggatgctccccagggttagggtgctggtgtgaggggaaagggtggggtgttctttgtgtaaaatagaaacatggttttgtacagaaata

SEQ ID NO: 31077 - DNA, 1950 bp, Homo sapiens
  source 1..1950: mol_type = unassigned DNA
aggcggcgggcgcggctgggatggcgaagagcaacggagagaatgggccgcgcgcgcccgcggccggggaaagcctgtcgggaacccgggagagcctggcccagggccccgacgccgcaaccaccgacgaactcagctctctcgggtctgactcggaggccaacggcttcgccgagcgccgcatcgacaagttcggcttcatcgtgggctcgcagggcgccgagggcgcgccctgccctctgctccacaggctggaggaagtacccctggaggtgctgaggcagagggagtccaagtggctggacatgctcaacaactgggacaaatggatggccaagaagcacaaaaagattcgtctgcggtgccaaaagggcatcccgccttctctgcggggccgtgcttggcagtacctgtcaggaggcaaggtgaagttacagcagaaccctggaaagtttgacgagctggacatgtcccctggggaccccaagtggctggacgtgattgagcgtgacctgcaccggcagttcccattccatgagatgtttgtgtcccgggggggccacggccagcaggacctattccgtgtgctgaaggcctacacgctgtaccggcccgaggagggctactgccaggcccaggcgcccattgccgctgtcttgctcatgcatatgcctgctgagcaagccttctggtgcctggtacagatctgtgagaagtacctgcccggctactacagcgagaaactggaggcgatccagctggacggggagatccttttctcgctgttgcagaaggtgtcgccggtggcccacaagcacctcagccgtcagaagatcgacccgctcctctatatgacagaatggttcatgtgcgccttctcccgaaccttgccctggagctctgtgctgcgtgtctgggacatgttcttctgtgaaggggtcaagatcatcttccgggtggggctggtgctgctgaagcacgcgctgggctcccctgagaaggtcaaagcctgccagggccagtacgagaccatcgagcgactgcggagcctcagccccaagatcatgcaggaggcctttctggtccaggaggtggtggagttgcccgtgacagagcgccagattgagcgcgaacacctcattcagctgcggcgctggcaggagacccggggtgagctgcagtgccgctccccgcccaggctgcatggtgccaaggctatcttggatgcagaacctggtccccggcctgccctacaaccttcaccatccatccgcctgcccctagatgcccccctccctggctccaaagccaagcccaagccacccaagcaggcccagaaggagcagcggaaacagatgaaggggagagggcagctggagaagcccccagccccaaatcaagccatggtggtggccgctgcaggagatgcatgtcccccacagcatgtgcccccgaaggactcagcccccaaggactcagcccctcaggatttggctccccaggtctcagcccaccaccgctcccaggagagcttgacgtcccaagagagtgaggacacctacttgtaaccctggcagctaaggcctccagggcggggtctccatataactacacggttcatgaactgacattccacatcctgcccaccctctgagggccaagctgcctggccactgggctgggctggagtctggctggtccaacacagattctgcctggtccaacacagattctgcctgagcctccttatttattttctttacagtggcactcaggctggcccagccagggcaggcagaagctagggcctggggggtggggcctccttcagccccctcctcctgggggatgctccccagggttagggtgctggtgtgaggggaaagggtggggtgttctttgtgtaaaatagaaacatggttttgtacagaaataaacagccttgtatag

SEQ ID NO: 31078 - DNA, 3350 bp, Homo sapiens
  source 1..3350: mol_type = unassigned DNA
ggctggcctcgccgggaggcccgaggggcggcgccttctgcggcctccccggcggggggatgtgaggggcggcccgcggccatggagacgggcacggcgcccctggtggccccgccgcgccgtcatggcgcccccgcggccccctcgccgccgccccggggttcccgggccgggcccgtcgtggtggtggctccgggacctccagtgactacggccacttcggcccccgtcaccctggtggcccccggggaggcgcggcccgcctgggtcccggggtcggccgagacctctgctccggccccggccccagccccggccccagccccggctgtcacgggcagcacggtggtggtgctgaccctggaggcctcgcccgaagccccaaagccgcagctcccctccggcccggaatccccagagcccgcggcagtggctggagttgagacatcgagggctctggccgcaggggcagactcgccgaagacagaggaggctcgaccctcacccgccccaggaccagggacccccaccgggacccctaccaggaccccttccagaacggctcctggtgccctgaccgccaaacccccgcttgcccccaagccgggaaccacagtggcctcaggagtgactgcacggagtgcatcaggacaagtgacaggtgggcatggagctgccgcagcaacatcagcatcagcaggacaggctcctgaggacccctcaggccctggcacaggcccctctgggacttgtgaggctccggtagctgtcgtgaccgtgaccccagctccggagcctgctgaaaactctcaagacctgggctccacgtccagcctgggacctggcatctctgggcctcgagggcaggccccggacacgctgagttacttggactccgtgagcctcatgtctgggaccttggagtccttggcggatgatgtgagctccatgggctcagattcagagataaacgggctggccctgcgcaagacggacaagtatggcttccttgggggcagccagtactcgggcagcctagagagctccattcccgtggacgtggctcggcagcgggagctcaaatggctggacatgttcagtaactgggataagtggctgtcacggcgattccagaaggtgaagctgcgctgccggaaggggatcccctcctctctcagagccaaagcctggcagtacctgtctaatagcaaggaacttctggagcagaacccaggaaagtttgaggagctggaacgggctcctggggaccccaagtggctggatgtgattgagaaggacctgcaccgccagttccctttccacgagatgtttgctgctcgaggggggcatgggcaacaggacctgtaccgaatcctgaaggcctacaccatctaccggcctgacgagggttactgccaggcccaggcccccgtggctgcggtcctgctcatgcacatgcctgcggagcaagccttttggtgcctggtgcagatctgcgacaagtacctcccaggttactacagtgcagggctggaggccattcagctggacggggagatcttttttgcactcctgcgccgggcctccccgctggcgcatcgccacctgcggcggcagcgcattgaccctgtgctctacatgacggagtggttcatgtgcatcttcgcccgcaccctgccctgggcgtcggtgctgcgtgtctgggacatgtttttctgtgaaggcgttaagatcatcttccgggtggccctggtcctgctgcgccacacgctgggctcagtggagaagctgcgctcctgccaaggcatgtatgagaccatggagcagctgcgtaacctgccccagcagtgcatgcaggaagacttcctggtgcatgaggtgaccaatctgccggtgacagaagcactgattgagcgggagaatgcagcccagctcaagaagtggcgggaaacgcggggggagctgcagtatcggccctcacggcgactgcatgggtcccgggccatccacgaggagcgccggcggcaacagccacccctgggcccctcctccagcctcctcagcctccctggcctcaagagccgaggctcccgggcagctggaggggccccgtccccgccgccccccgtccgcagagccagtgctgggcctgccccagggcctgtggtcactgctgagggactgcatccatcccttccctcacccactggcaatagcacccccttgggttccagcaaggagacccggaagcaggagaaggagcggcagaaacaggagaaggagcggcagaaacaggagaaggagcgggagaaggagcggcagaagcaggagaaagagcgagagaagcaggaaaaggagcgagagaagcaggagaaggagcggcagaagcaggagaagaaggctcaaggccggaagctttcgctgcgtcgaaaggcagatgggcccccaggcccccatgatggtggggacaggccctcagccgaggcccggcaggacgcttacttctgacctctgccctggggctggactgcatggcccccctctttccctcagccaagaacaggcctggcccaaggtgccaccccctagcaccttgtcaggctgtcccttgctggggaaagtggcttggttccccatctcctcgccagctgctgatccctacacgggcaggacagatgggcagctgcaaatgagtctggagcctctcatctcccatgaggctcagctggggtctctgtcgctcctgccccagttccctctgggtcccctcctaggtgctgtcctgaatggcccgttgtcatcccaggggtgactcctggtgatgggagtcagcagtttcagattcttacactccatagctccccttaccatgaggtggagctggcttccttttccctgtcttcagccctccctgtctcccccacttcctggccagggctctcattctggacctgtgttgtaattgtgtacagaggatggcgttggcctggggtgggggtgctcgctttgtcttctgtcctttggttctccttccataatgctcctgtacccagtttatttaaggggacatgcactggaataggaaatgtcccccatctcccttcctgcaccctgctgtgctccctccaaacccaccttgctctgtgttctcaggcccccctgcttttgtctcaccaggacccatacctttcaccttgttcccttccacccctccagttagtccctatctgggtaagggtcttcccttgagctccagggggtggaacccaatgtttacattctcttctgtctctgcccccaccccatgcagcgctttgaggaattggaaaagaacctgctgttgtacctgg

SEQ ID NO: 31079 - DNA, 1702 bp, Homo sapiens
  source 1..1702: mol_type = unassigned DNA
gtgaggtgctgcgggaggccccgggcaccatggcccaggccctgggggaggacctggtgcagcctcccgagctgcaggatgactccagctccttggggtccgactcagagctcagcgggcctggcccatatcgccaggccgaccgctatggattcattgggggcagctcagcagagccagggccgggccacccacctgcagacctcatccgccaacgggagatgaagtgggtggagatgacctcgcactgggagaaaaccatgtcccggcggtacaagaaggtaaagatgcagtgccggaaaggcatcccgtctgccctgcgcgcccgatgctggcccctgttgtgtggggcccatgtgtgccagaagaacagccctggcacctatcaggagctggcagaggcccctggagacccacagtggatggagaccattggcagggacctgcaccgtcaattccctctgcacgagatgtttgtgtcgcctcagggccacgggcagcaggggctcctgcaggtgctcaaggcctacaccctgtatcgaccggagcagggctactgccaggcccaggggcccgtggctgctgtgctgctcatgcacctgcccccagaggaggccttctggtgcctggtgcagatctgtgaggtctacctccctgggtactacgggccccacatggaggctgtgcggctggacgccgaggtgttcatggccctgctgcggcggctgcttccgcacgtgcacaagcacctgcagcaggtgggcgtcggacccctgctgtacctgcccgagtggttcctgtgcctcttcgcccgctccctgcccttccccacagtgctgcgtgtctgggatgccttcctcagtgagggtgccagagtactgttccgtgtggggctgacactggtgcgcctggcgctgggcactgcagagcagcgaggggcctgccctggcctcctggagacactgggagcccttcgagccatcccccccgcgcagctgcaggaggaggccttcatgtcacaggtgcacagcgtggtgctgtcagagcgggacctgcagcgggagatcaaggcccagctggcccagctgcccgattccgcgccgggacccccgccccggccacaggtccgcctcgccggggcccaagccatctttgaggcccagcagctggcaggagtgcgacgaggcgccaagcctgaggtgcctcggattgtggtgcagcccccggaggagcccagaccaccgcggcggaaaccccagacccgcggcaagactttccatgggctcctgactcgggcccggggcccccccatcgaggggccccccaggccccaacgaggctccacctccttcctggacacccgcttctgagaggaccatggacttagtgtcccccagtctcaattgcctgatggctgatgccggcccggcaaataggcaccgcactttactcttgggactcggggacttggcttccttcctggcaaggaccaggcagtggggaaggaggaggtcctccgtggtacatactgggtcaggcactagcatggaggagggtcacagagtggggcacgtgaggacccatggaaccgtcctggtgcccaggccctcacaagtaccaaagccagcaccaaaggagtcagggaaggggttggctgagtcaagggaccccagagggcaccaggaataaaatcttcttgaac

SEQ ID NO: 31080 - DNA, 1659 bp, Homo sapiens
  source 1..1659: mol_type = unassigned DNA
aggccccgggcaccatggcccaggccctgggggaggacctggtgcagcctcccgagctgcaggatgactccagctccttggggtccgactcagagctcagcgggcctggcccatatcgccaggccgaccgctatggattcattgggggcagctcagcagagccagggccgggccacccacctgcagacctcatccgccaacgggagatgaagtgggtggagatgacctcgcactgggagaaaaccatgtcccggcggtacaagaaggtaaagatgcagtgccggaaaggcatcccgtctgccctgcgcgcccgatgctggcccctgttgtgtggggcccatgtgtgccagaagaacagccctggcacctatcaggagctggcagaggcccctggagacccacagtggatggagaccattggcagggacctgcaccgtcaattccctctgcacgagatgtttgtgtcgcctcagggccacgggcagcaggggctcctgcaggtgctcaaggcctacaccctgtatcgaccggagcagggctactgccaggcccaggggcccgtggctgctgtgctgctcatgcacctgcccccagaggaggccttctggtgcctggtgcagatctgtgaggtctacctccctgggtactacgggccccacatggaggctgtgcggctggacgccgaggtgttcatggccctgctgcggcggctgcttccgcacgtgcacaagcacctgcagcaggtgggcgtcggacccctgctgtacctgcccgagtggttcctgtgcctcttcgcccgctccctgcccttccccacagtgctgcgtgtctgggatgccttcctcagtgagggtgccagagtactgttccgtgtggggctgacactggtgcgcctggcgctgggcactgcagagcagcgaggggcctgccctggcctcctggagacactgggagcccttcgagccatcccccccgcgcagctgcaggaggaggccttcatgtcacaggtgcacagcgtggtgctgtcagagcgggacctgcagcgggagatcaaggcccagctggcccagctgcccgattccgcgccgggacccccgccccggccacaggtccgcctcgccggggcccaagccatctttgaggcccagcagctggcaggagtgcgacgaggcgccaagcctgaggtgcctcggattgtggtgcagcccccggaggagcccagaccaccgcggcggaaaccccagacccgcggcaagactttccatgggctcctgactcgggcccggggcccccccatcgaggggccccccaggccccaacgaggctccacctccttcctggacacccgcttctgagaggaccatggacttagtgtcccccagtctcaattgcctgatggctgatgccggcccggcaaataggcaccgcactttactcttgggactcggggacttggcttccttcctggcaaggaccaggcagtggggaaggaggaggtcctccgtggtacatactgggtcaggcactagcatggaggagggtcacagagtggggcacgtgaggacccatggaaccgtcctggtgcccaggccctcacaagtaccaaagccagcaccaaaggagtcagggaaggggttggctgagtcaagggaccccaga

SEQ ID NO: 31081 - DNA, 2159 bp, Homo sapiens
  source 1..2159: mol_type = unassigned DNA
attaccaggcacgcgcaggaaacatggcggcggcgggtgttgtgagcgggaaggtttttggtttcttcttgattcaatcttgataagtagtatgtgtccaggactttatccatactccagtttgttggagtatggtaggagtatgattatatatgaacaagaaggagtatatattcactcatcttgtggaaagaccaatgaccaagacggcttgatttcaggaatattacgtgttttagaaaaggatgccgaagtaatagtggactggagaccattggatgatgcattagattcctctagtattctctatgctagaaaggactccagttcagttgtagaatggactcaggccccaaaagaaagaggtcatcgaggatcagaacatctgaacagttacgaagcagaatgggacatggttaatacagtttcatttaaaaggaaaccacataccaatggagatgctccaagtcatagaaatgggaaaagcaaatggtcattcctgttcagtttgacagacctgaaatcaatcaagcaaaacaaagagggtatgggctggtcctatttggtattctgtctaaaggatgacgtcgttctccctgctctacactttcatcaaggagatagcaaactactgattgaatctcttgaaaaatatgtggtattgtgtgaatctccacaggataaaagaacacttcttgtgaattgtcagaataagagtctttcacagtcttttgaaaatcttcttgatgagccagcatatggtttaatacaaaaaattaaaaaggacccttatacggcaactatgataggattttccaaagtcacaaactacatttttgacagtttgagaggcagcgatccctctacacatcaacgaccaccttcagaaatggcagattttcttagtgatgctattccaggtctaaagataaatcaacaagaagaaccaggatttgaagtcatcacaagaattgatttgggggaacgccctgttgttcaaaggagagaaccggtatcactggaagaatggactaagaacattgattctgaaggaagaattttaaatgtagataatatgaagcagatgatatttagagggggacttagtcatgcattgagaaagcaagcatggaaatttcttctgggttattttccctgggacagtaccaaggaggaaagaacccaattacaaaagcaaaaaactgatgaatacttcagaatgaaactgcagtggaaatccatcagccaggaacaagagaaaagaaattcgaggttaagagattatagaagtcttatcgaaaaagatgttaacagaacagatcgaacaaacaagttttatgaaggccaagataatccagggttgattttacttcatgacattttgatgacctactgtatgtatgattttgatttaggatatgttcaaggaatgagtgatttactttcccctcttttatatgtgatggaaaatgaagtggatgccttttggtgctttgcctcttacatggaccaaatgcatcagaattttgaagaacaaatgcaaggcatgaagacccagctaattcagctgagtaccttacttcgattgttagacagtggattttgcagttacttagaatctcaggactctggatacctttatttttgcttcaggtggcttttaatcagattcaaaagggaatttagttttctagatattcttcgattatgggaggtaatgtggaccgaactaccatgtacaaatttccatcttcttctctgttgtgctattctggaatcagaaaagcagcaaataatggaaaagcattatggcttcaatgaaatacttaagcatatcaatgaattgtccatgaaaattgatgtggaagatatactctgcaaggcagaagcaatttctctacagatggtaaaatgcaaggaattgccacaagcagtctgtgagatccttgggcttcaaggcagtgaagttacaacaccagattcagacgttggtgaagacgaaaatgttgtcatgactccttgtcctacatctgcatttcaaagtaatgccttgcctacactctctgccagtggagccagaaatgacagcccaacacagataccagtgtcctcagatgtctgcagattaacacctgcatgatcactgttcttgctttttt

SEQ ID NO: 31082 - DNA, 1908 bp, Homo sapiens
  source 1..1908: mol_type = unassigned DNA
aaacatggcggcggcgggtgttgtgagcgggaagattatatatgaacaagaaggagtatatattcactcatcttgtggaaagaccaatgaccaagacggcttgatttcaggaatattacgtgttttagaaaaggatgccgaagtaatagtggactggagaccattggatgatgcattagattcctctagtattctctatgctagaaaggactccagttcagttgtagaatggactcaggccccaaaagaaagaggtcatcgaggatcagaacatctgaacagttacgaagcagaatgggacatggttaatacagtttcatttaaaaggaaaccacataccaatggagatctccacaggataaaagaacacttcttgtgaattgtcagaataagagtctttcacagtcttttgaaaatcttcttgatgagccagcatatggtttaatacaaaaaattaaaaaggacccttatacggcaactatgataggattttccaaagtcacaaactacatttttgacagtttgagaggcagcgatccctctacacatcaacgaccaccttcagaaatggcagattttcttagtgatgctattccaggtctaaagataaatcaacaagaagaaccaggatttgaagtcatcacaagaattgatttgggggaacgccctgttgttcaaaggagagaaccggtatcactggaagaatggactaagaacattgattctgaaggaagaattttaaatgtagataatatgaagcagatgatatttagagggggacttagtcatgcattgagaaagcaagcatggaaatttcttctgggttattttccctgggacagtaccaaggaggaaagaacccaattacaaaagcaaaaaactgatgaatacttcagaatgaaactgcagtggaaatccatcagccaggaacaagagaaaagaaattcgaggttaagagattatagaagtcttatcgaaaaagatgttaacagaacagatcgaacaaacaagttttatgaaggccaagataatccagggttgattttacttcatgacattttgatgacctactgtatgtatgattttgatttaggatatgttcaaggaatgagtgatttactttcccctcttttatatgtgatggaaaatgaagtggatgccttttggtgctttgcctcttacatggaccaaatgcatcagaattttgaagaacaaatgcaaggcatgaagacccagctaattcagctgagtaccttacttcgattgttagacagtggattttgcagttacttagaatctcaggactctggatacctttatttttgcttcaggtggcttttaatcagattcaaaagggaatttagttttctagatattcttcgattatgggaggtaatgtggaccgaactaccatgtacaaatttccatcttcttctctgttgtgctattctggaatcagaaaagcagcaaataatggaaaagcattatggcttcaatgaaatacttaagcatatcaatgaattgtccatgaaaattgatgtggaagatatactctgcaaggcagaagcaatttctctacagatggtaaaatgcaaggaattgccacaagcagtctgtgagatccttgggcttcaaggcagtgaagttacaacaccagattcagacgttggtgaagacgaaaatgttgtcatgactccttgtcctacatctgcatttcaaagtaatgccttgcctacactctctgccagtggagccagaaatgacagcccaacacagataccagtgtcctcagatgtctgcagattaacacctgcatgatcactgttcttgcttttttgggaagagacactttgttgcaaccctttttcaagtacttgaaagttgaaaatttgaaatcttggtattgat

SEQ ID NO: 31083 - DNA, 2489 bp, Homo sapiens
  source 1..2489: mol_type = unassigned DNA
attaccaggcacgcgcaggaaacatggcggcggcgggtgttgtgagcgggaagattatatatgaacaagaaggagtatatattcactcatcttgtggaaagaccaatgaccaagacggcttgatttcaggaatattacgtgttttagaaaaggatgccgaagtaatagtggactggagaccattggatgatgcattagattcctctagtattctctatgctagaaaggactccagttcagttgtagaatggactcaggccccaaaagaaagaggtcatcgaggatcagaacatctgaacagttacgaagcagaatgggacatggttaatacagtttcatttaaaaggaaaccacataccaatggagatgctccaagtcatagaaatgggaaaagcaaatggtcattcctgttcagtttgacagacctgaaatcaatcaagcaaaacaaagagggtatgggctggtcctatttggtattctgtctaaaggatgacgtcgttctccctgctctacactttcatcaaggagatagcaaactactgattgaatctcttgaaaaatatgtggtattgtgtgaatctccacaggataaaagaacacttcttgtgaattgtcagaataagagtctttcacagtcttttgaaaatcttcttgatgagccagcatatggtttaatacaaaaaattaaaaaggacccttatacggcaactatgataggattttccaaagtcacaaactacatttttgacagtttgagaggcagcgatccctctacacatcaacgaccaccttcagaaatggcagattttcttagtgatgctattccaggtctaaagataaatcaacaagaagaaccaggatttgaagtcatcacaagaattgatttgggggaacgccctgttgttcaaaggagagaaccggtatcactggaagaatggactaagaacattgattctgaaggaagaattttaaatgtagataatatgaagcagatgatatttagagggggacttagtcatgcattgagaaagcaagcatggaaatttcttctgggttattttccctgggacagtaccaaggaggaaagaacccaattacaaaagcaaaaaactgatgaatacttcagaatgaaactgcagtggaaatccatcagccaggaacaagagaaaagaaattcgaggttaagagattatagaagtcttatcgaaaaagatgttaacagaacagatcgaacaaacaagttttatgaaggccaagataatccagggttgattttacttcatgacattttgatgacctactgtatgtatgattttgatttaggatatgttcaaggaatgagtgatttactttcccctcttttatatgtgatggaaaatgaagtggatgccttttggtgctttgcctcttacatggaccaaatgcatcagaattttgaagaacaaatgcaaggcatgaagacccagctaattcagctgagtaccttacttcgattgttagacagtggattttgcagttacttagaatctcaggactctggatacctttatttttgcttcaggtggcttttaatcagattcaaaagggaatttagttttctagatattcttcgattatgggaggtaatgtggaccgaactaccatgtacaaatttccatcttcttctctgttgtgctattctggaatcagaaaagcagcaaataatggaaaagcattatggcttcaatgaaatacttaagcatatcaatgaattgtccatgaaaattgatgtggaagatatactctgcaaggcagaagcaatttctctacagatggtaaaatgcaaggaattgccacaagcagtctgtgagatccttgggcttcaaggcagtgaagttacaacaccagattcagacgttggtgaagacgaaaatgttgtcatgactccttgtcctacatctgcatttcaaagtaatgccttgcctacactctctgccagtggagccagaaatgacagcccaacacagataccagtgtcctcagatgtctgcagattaacacctgcatgatcactgttcttgcttttttgggaagagacactttgttgcaaccctttttcaagtacttgaaagttgaaaatttgaaatcttggtattgatcatgctttaaggtttatgtaaagaaagtgtactgatgttcttacattaaagctttacaaagatttaaactaattatttttgtagttacttctaccaaatagcctttccttttcgataacattcctcagtatttttatagccaagtacattttattttcttgctgatgaactggaattggataaatattgcaagtggatgagttggaaattatgcactttgaaaaacattcactttgtttaagcttattgggtttcagatttgattaaattaaatgtggaggctttctatagcattctaagctgagaagtagattgttacccagtaatgaaataaaaaataaaaataaaagg

SEQ ID NO: 31084 - DNA, 5785 bp, Homo sapiens
  source 1..5785: mol_type = unassigned DNA
gttgttgtatgtccgagagacacgtgaggttctgctacgtcattaccaggcacgcgcaggaaacatggcggcggcgggtgttgtgagcgggaagattatatatgaacaagaaggagtatatattcactcatcttgtggaaagaccaatgaccaagacggcttgatttcaggaatattacgtgttttagaaaaggatgccgaagtaatagtggactggagaccattggatgatgcattagattcctctagtattctctatgctagaaaggactccagttcagttgtagaatggactcaggccccaaaagaaagaggtcatcgaggatcagaacatctgaacagttacgaagcagaatgggacatggttaatacagtttcatttaaaaggaaaccacataccaatggagatgctccaagtcatagaaatgggaaaagcaaatggtcattcctgttcagtttgacagacctgaaatcaatcaagcaaaacaaagagggtatgggctggtcctatttggtattctgtctaaaggatgacgtcgttctccctgctctacactttcatcaaggagatagcaaactactgattgaatctcttgaaaaatatgtggtattgtgtgaatctccacaggataaaagaacacttcttgtgaattgtcagaataagagtctttcacagtcttttgaaaatcttcttgatgagccagcatatggtttaatacaagcaggactgctagacagaagaaagctgttgtgggccattcaccactggaaaaaaattaaaaaggacccttatacggcaactatgataggattttccaaagtcacaaactacatttttgacagtttgagaggcagcgatccctctacacatcaacgaccaccttcagaaatggcagattttcttagtgatgctattccaggtctaaagataaatcaacaagaagaaccaggatttgaagtcatcacaagaattgatttgggggaacgccctgttgttcaaaggagagaaccggtatcactggaagaatggactaagaacattgattctgaaggaagaattttaaatgtagataatatgaagcagatgatatttagagggggacttagtcatgcattgagaaagcaagcatggaaatttcttctgggttattttccctgggacagtaccaaggaggaaagaacccaattacaaaagcaaaaaactgatgaatacttcagaatgaaactgcagtggaaatccatcagccaggaacaagagaaaagaaattcgaggttaagagattatagaagtcttatcgaaaaagatgttaacagaacagatcgaacaaacaagttttatgaaggccaagataatccagggttgattttacttcatgacattttgatgacctactgtatgtatgattttgatttaggatatgttcaaggaatgagtgatttactttcccctcttttatatgtgatggaaaatgaagtggatgccttttggtgctttgcctcttacatggaccaaatgcatcagaattttgaagaacaaatgcaaggcatgaagacccagctaattcagctgagtaccttacttcgattgttagacagtggattttgcagttacttagaatctcaggactctggatacctttatttttgcttcaggtggcttttaatcagattcaaaagggaatttagttttctagatattcttcgattatgggaggtaatgtggaccgaactaccatgtacaaatttccatcttcttctctgttgtgctattctggaatcagaaaagcagcaaataatggaaaagcattatggcttcaatgaaatacttaagcatatcaatgaattgtccatgaaaattgatgtggaagatatactctgcaaggcagaagcaatttctctacagatggtaaaatgcaaggaattgccacaagcagtctgtgagatccttgggcttcaaggcagtgaagttacaacaccagattcagacgttggtgaagacgaaaatgttgtcatgactccttgtcctacatctgcatttcaaagtaatgccttgcctacactctctgccagtggagccagaaatgacagcccaacacagataccagtgtcctcagatgtctgcagattaacacctgcatgatcactgttcttgcttttttgggaagagacactttgttgcaaccctttttcaagtacttgaaagttgaaaatttgaaatcttggtattgatcatgctttaaggtttatgtaaagaaagtgtactgatgttcttacattaaagctttacaaagatttaaactaattatttttgtagttacttctaccaaatagcctttccttttcgataacattcctcagtatttttatagccaagtacattttattttcttgctgatgaactggaattggataaatattgcaagtggatgagttggaaattatgcactttgaaaaacattcactttgtttaagcttattgggtttcagatttgattaaattaaatgtggaggctttctatagcattctaagctgagaagtagattgttacccagtaatgaaataaaaaataaaaataaaaggatttttttctctattgtttacgacagtactcagcttaaatatttatgctggtcaaatgtgatttaaattggacattttcatcaatgcagtctaatgtgtagataaatatttcaaccataataagtggattggcagtatattttttacattgaacttttcttcacttgtatataaagattatatataagtacttatttatgagtataagaaaggttaggcatattttcattaactgaataaacgacttgatttatataacctggtttatcaaaatttaacatggcttcagtatgagatctttttcaaaactattttcttaaacatttatttcatgagattatgttcaaccctgtacctggtgtaattttaaaattaattgcttgtaacctcactttactaataatgtttattatctttcctaataatgcattaactgattaatcaggtgtttaaatttttataaaatactcttgcaaaaagtttatttgaaaaatttctagatggtctcatgagtttcaaaataataatttttgtgtatgaacaaagctgttgtttttaccatgcagtattgcatgattttaagttatgtggaattaacataactgattttgttttaattgtaagttgttaactcctgtatatatcattaaaataaatctgaagttgaagtagtgtttttagttaaattatacttagaaatagtctgcttttttaaaattttttttcttgagaaagagtcttgctctgttgcccaggctggagtgcagtggcgcagtcctggctcactgcagcctccgccttctgggttcaagcgattctcctgtctcagcctcccgagcagctgggactacaggcttgtgccatcgcgcctgactaatttttgtattttgagtagagatggggtttcaccatgttggccaggctggtctcgaactcttgacctcaagtgatccactcgcttcagcctcccaaagtgctgagattacaggtgtgagccactgtgcccggctaattctttaatagaagaaaaaacatccaagatggacctcaattcatctcttatttttatatgattaaaatgataatctggccgggcgcggtggctcacgcctgtaatcccagcactttgggaggccgaggcgggcggatcacgaggtcaggagatcgagaccatcccggctaaaacggtgaaaccccgtctctactaaaaatacaaaaaattagccgggcgtagtggcgggcgcctgtagtcccagctacttgggaggctgaggcaggagaatggcgtgaacccgggaggcggagcttgcagtgagccgagatcccgccactgcactccagcctgggcgacagagcgagactccgtctcaaaaaaaaaaaaaaaaaaatgataatctgaataagttatggaaatgaaaaccatcctttttataactgaaaaaaaattttcattagcatggaaatgggcacagtgttgccttgaaagatacagttatttgactcagtaaagcagcttattacaactgatgctaatagtatagagaaaaaagttgtgcagttctaaaatggtcctagagattgacttttttcccccaagaaagttagggaacaaaacgaacttttttcctggttgagcattaactgacaatcacgacagtagaaccgttagagtttagtttttaatattatgtgtgttatctttcatcagttaataatgagtaagcctattcagaaaaagaacataaactgatcaaaaactcagcatctccagcctttcatttcctgctattcaggaaattgcttagaacatcttgatgtcctccttgttcttcctggacagtgactttttgggagtttgttcctgctgcgtaatgtgatacccacttcagattttttttttatcaatacatttagtaagttgaacttctgtcaagttttattacaaaattacttgttaaaacaatttttactaaactgcatttctatctagcatatttttgatatggaagtgatagtatagtatagttccaggagaagtcttaaatcagtccacagagtccagttagcaaatactctgtgccattaagattgctaaaatacacagttcaggtaaatttactagtgttttttaaaggtttatttgttttcacaagatgctctgtccacacccttataacatgtaaaatattgtgtgctgtattatgtggtaaagttgttaaaattcagtttctaacattaacttaaaagtacagacaatctaacatgatgatttgacttacaaactttcaactaaatttatgatggctttaaagcagtgcactgaatagaaaccatactttgagtacccatacagccatttttcacttttactacaatattctataaatcacatgagatatttaacactttattataaaataggctttgtgttagatgattttgcccaaatgtaaactaatgtagtgttctgagcatgtttaagttagggtaggctaaactatgtttggtaggttagatgtattaaaagcatttttgattaatgatgtcttcaatttatgatgtgtttattggaacataacctcaatataagttgaaaagcatatgtattttcaattctggcatgaacctatgggaatcttttgcatttaagaacctccccattttaataatttcatgggtctaagattcttcatctgtttataaggaactttagtcttagtgattagagactaaatttttttttgagcagtaagaaaacagccttttgggacagatagtgagtgattcttaggaacttgacattgccaagaaattttatagatgccgaagaattcttatgtgaaattcacataagcatgcccattactaaagacagtttgtataaagtaaccctaaatgtttattgaggaacctacagcttcaactgacttacgtgcagatatgtaccaggagaacatcattttagcttgggcgtctttacttggggttttcagaggatccaggaacctcactgtatgcaaagtcttgtggatgtacctgaatgtttttggaggcaggtcacatagtttctgaaagtgttctcttattttcctcaaatgtaggtaaccattgttacaagttatttaacaggagaatagtaacaatgtctaacttatgctaatgattttgtgtgctgagctcccattaattaaaatgtcttcagaa

SEQ ID NO: 31085 - DNA, 3046 bp, Homo sapiens
  source 1..3046: mol_type = unassigned DNA
tggtggtcccgcggacccctcgtccctccgcagtctccggctggcagcgatggagggcgctggggagaacgccccggagtccagctcctctgcccctgggtccgaagagtctgccagggatccacaggtgccgcctccggaggaagaatcgggggactgcgcccggtccctggaggcggtccccaagaaactctgtgggtatttaagtaagttcggcggcaaagggcccatccggggctggaaatcccgctggttcttctacgacgaaaggaaatgtcagctgtattactcgcggaccgctcaggatgccaatcccttggacagcatcgacctctccagtgcagtgtttgactgtaaggcggacgctgaggaggggatcttcgaaatcaagactcccagccgggttattaccctgaagggcaagaagaggcagagctggaggagttcctgtgccctgtgaaaacaccccctgggctagtgggcgtggcagctgccttgcagcccttccctgcccttcagaatatttccctcaagcacctggggactgaaatacagaacacaatgcacaacatccgtggcaacaagcaggcccagggaacaggccatgaacctccaggggaagattctccacagagtggggagcctcagagggaggagcagcccttggcctctgacgccagcaccccagggagagagccagaggattctccaaagcctgcacccaagccttctctgaccatcagtttcgctcagaaagccaagcgccagaacaacaccttcccattcttttctgaaggaatcacacggaaccgaactgcccaggagaaagtggcagccttggagcaacaggttctgatgctcaccaaggagttaaagtctcagaaggagctagtgaagatcctgcacaaggcactggaggccgcccagcaggagaagcgggcgtccagcgcatacctggcggcggctgaggacaaggaccggctggagctggtgcggcacaaagtgcggcagatcgcggagctgggccggcgggtggaggccctggagcaggagcgggagagcctggcgcacacagcgagcctgcgggagcagcaggtgcaggagctacagcagcacgtgcagctgcttatggacaagaaccacgccaagcagcaggtcatctgcaagctctctgagaaggtcacccaggacttcacgcacccccctgaccagtctcctttgcgccccgacgctgccaacagggacttcctgagccagcaggggaagatagagcacctgaaggatgacatggaagcttaccggacccagaactgcttcctcaactccgagatccaccaggtcacaaagatctggagaaaggtggctgagaaggagaaggcccttctgacgaagtgcgcctacctccaagccagaaactgccaggtggaaagcaagtacctggccggtctgagaaggctgcaggaggccctgggggacgaagccagcgagtgctcagagctgctgaggcagcttgtccaggaggcactgcagtgggaagctggggaggcctcatctgacagcatcgagctgagccccatcagtaagtatgatgagtacggcttcctgacggtgcccgactatgaggtggaagacctgaagctgctggccaagatccaggcattggagtcacgatcccaccacctgctgggcctcgaggctgtggatcggccgctgagggagcgctgggctgccctgggcgatcttgtgccctcagccgagctcaagcagctactgcgggcaggagtaccccgtgaacaccggcctcgtgtctggaggtggctggtccacctccgtgtccagcacctgcacactccaggctgctaccaggaactgctgagccggggccaggcccgcgagcaccctgctgcccgccagattgagctggacctgaaccggaccttccccaacaacaaacacttcacctgccccacctccagcttccccgacaagctccgccgggtgctgctggccttctcctggcagaaccccaccatcggctactgccagggcctgaacaggctggcggccattgccctgctggtcctagaggaggaggagagcgccttctggtgcctggtggccattgtggagaccatcatgcccgctgattactactgcaacacgctgacggcatcccaggtggaccagcgggtgctccaggacctgctctcggagaagctgcccaggctgatggcccatctggggcagcaccacgtggatctctccctcgtcaccttcaactggttcctcgtggtctttgcggacagtctcattagcaacatcctccttcgggtctgggatgccttcctgtacgaggggacgaaggtggtgtttcgctatgccttggccattttcaagtacaacgagaaggagatcttgaggctacagaatggcctggaaatctaccagtacctgcgcttcttcaccaagaccatctccaacagccggaagctgatgaacatcgccttcaatgacatgaaccccttccgcatgaaacagctgcggcagctgcgcatggtccaccgggagcggctggaggctgagctgcgggagctggagcagcttaaggcagagtacctggagaggcgggcatcccggcgcagagctgtgtccgagggctgtgccagcgaggacgaggtggagggggaagcctgacttggccacctcccctccccacagccttcctcacccttggctggcagacccactggaggtcaggcacggaccagtggcccagccctgggtgtcccatcaccatgtgaccttggacatgtcccttcccctctctggccctcagtttccccactgggacattgtgtgctgcaaagccattggttgggctacttcttcataggcacttacttacccagggatgccaccctttcgtcacctcttccacagagcactttggcatgtaaacaagcaagagcactgcctctatagggtaacctggaacattctctaggttatatcaatataaaacaatgtaaatggtggaaatcattca

SEQ ID NO: 31086 - DNA, 2097 bp, Homo sapiens
  source 1..2097: mol_type = unassigned DNA
aactgcccagtaggttagttggtatttgccccttttacagatgaggaaacagagggtcagagtggttcagtggcctgcctgaggccttccagccagaacatcagccaggacttaaattcagacctactggtccctttaccacatcatgctgacatcaagaatagagaagggtgctatgagtattttatttttctttcagacttcctcttctgttgccattattggaaatttctaaggaaaagaagctttgggggctcatttgagggtgtgactccccaggaccagggagatgtttatgtccaactgataacatattttactctcttctccaggatgacatggaagcttaccggacccagaactgcttcctcaactccgagatccaccaggtcacaaagatctggagaaaggtggctgagaaggagaaggcccttctgacgaagtgcgcctacctccaagccagaaactgccaggtggaaagcaagtacctggccggtctgagaaggctgcaggaggccctgggggacgaagccagcgagtgctcagagctgctgaggcagcttgtccaggaggcactgcagtgggaagctggggaggcctcatctgacagcatcgagctgagccccatcagtaagtatgatgagtacggcttcctgacggtgcccgactatgaggtggaagacctgaagctgctggccaagatccaggcattggagtcacgatcccaccacctgctgggcctcgaggctgtggatcggccgctgagggagcgctgggctgccctgggcgatcttgtgccctcagccgagctcaagcagctactgcgggcaggagtaccccgtgaacaccggcctcgtgtctggaggtggctggtccacctccgtgtccagcacctgcacactccaggctgctaccaggaactgctgagccggggccaggcccgcgagcaccctgctgcccgccagattgagctggacctgaaccggaccttccccaacaacaaacacttcacctgccccacctccagcttccccgacaagctccgccgggtgctgctggccttctcctggcagaaccccaccatcggctactgccagggcctgaacaggctggcggccattgccctgctggtcctagaggaggaggagagcgccttctggtgcctggtggccattgtggagaccatcatgcccgctgattactactgcaacacgctgacggcatcccaggtggaccagcgggtgctccaggacctgctctcggagaagctgcccaggctgatggcccatctggggcagcaccacgtggatctctccctcgtcaccttcaactggttcctcgtggtctttgcggacagtctcattagcaacatcctccttcgggtctgggatgccttcctgtacgaggggacgaaggtggtgtttcgctatgccttggccattttcaagtacaacgagaaggagatcttgaggctacagaatggcctggaaatctaccagtacctgcgcttcttcaccaagaccatctccaacagccggaagctgatgaacatcgccttcaatgacatgaaccccttccgcatgaaacagctgcggcagctgcgcatggtccaccgggagcggctggaggctgagctgcgggagctggagcagcttaaggcagagtacctggagaggcgggcatcccggcgcagagctgtgtccgagggctgtgccagcgaggacgaggtggagggggaagcctgacttggccacctcccctccccacagccttcctcacccttggctggcagacccactggaggtcaggcacggaccagtggcccagccctgggtgtcccatcaccatgtgaccttggacatgtcccttcccctctctggccctcagtttccccactgggacattgtgtgctgcaaagccattggttgggctacttcttcataggcacttacttacccagggatgccaccctttcgtcacctcttccacagagcactttggcatgtaaacaagcaagagcactgcctctatagggtaacctggaacattctctaggttatatcaatataaaacaatgtaaatggtggaaatcattca

SEQ ID NO: 31087 - DNA, 3174 bp, Homo sapiens
  source 1..3174: mol_type = unassigned DNA
gcggacccctcgtccctccgcagtctccggctggcagcgatggagggcgctggggagaacgccccggagtccagctcctctgcccctgggtccgaagagtctgccagggatccacaggtgccgcctccggaggaagaatcgggggactgcgcccggtccctggaggcggtccccaagaaactctgtgggtatttaagtaagttcggcggcaaagggcccatccggggctggaaatcccgctggttcttctacgacgaaaggaaatgtcagctgtattactcgcggaccgctcaggatgccaatcccttggacagcatcgacctctccagtgcagtgtttgactgtaaggcggacgctgaggaggggatcttcgaaatcaagactcccagccgggttattaccctgaaggccgccaccaagcaagcgatgctgtactggctgcagcagctgcagatgaagcgctgggaattccacaacagcccgccggcacctcctgccacccctgatgccgccctggctgggaatgggcccgtcctgcacctcgagctagggcaagaagaggcagagctggaggagttcctgtgccctgtgaaaacaccccctgggctagtgggcgtggcagctgccttgcagcccttccctgcccttcagaatatttccctcaagcacctggggactgaaatacagaacacaatgcacaacatccgtggcaacaagcaggcccagggaacaggccatgaacctccaggggaagattctccacagagtggggagcctcagagggaggagcagcccttggcctctgacgccagcaccccagggagagagccagaggattctccaaagcctgcacccaagccttctctgaccatcagtttcgctcagaaagccaagcgccagaacaacaccttcccattcttttctgaaggaatcacacggaaccgaactgcccaggagaaagtggcagccttggagcaacaggttctgatgctcaccaaggagttaaagtctcagaaggagctagtgaagatcctgcacaaggcactggaggccgcccagcaggagaagcgggcgtccagcgcatacctggcggcggctgaggacaaggaccggctggagctggtgcggcacaaagtgcggcagatcgcggagctgggccggcgggtggaggccctggagcaggagcgggagagcctggcgcacacagcgagcctgcgggagcagcaggtgcaggagctacagcagcacgtgcagctgcttatggacaagaaccacgccaagcagcaggtcatctgcaagctctctgagaaggtcacccaggacttcacgcacccccctgaccagtctcctttgcgccccgacgctgccaacagggacttcctgagccagcaggggaagatagagcacctgaaggatgacatggaagcttaccggacccagaactgcttcctcaactccgagatccaccaggtcacaaagatctggagaaaggtggctgagaaggagaaggcccttctgacgaagtgcgcctacctccaagccagaaactgccaggtggaaagcaagtacctggccggtctgagaaggctgcaggaggccctgggggacgaagccagcgagtgctcagagctgctgaggcagcttgtccaggaggcactgcagtgggaagctggggaggcctcatctgacagcatcgagctgagccccatcagtaagtatgatgagtacggcttcctgacggtgcccgactatgaggtggaagacctgaagctgctggccaagatccaggcattggagtcacgatcccaccacctgctgggcctcgaggctgtggatcggccgctgagggagcgctgggctgccctgggcgatcttgtgccctcagccgagctcaagcagctactgcgggcaggagtaccccgtgaacaccggcctcgtgtctggaggtggctggtccacctccgtgtccagcacctgcacactccaggctgctaccaggaactgctgagccggggccaggcccgcgagcaccctgctgcccgccagattgagctggacctgaaccggaccttccccaacaacaaacacttcacctgccccacctccagcttccccgacaagctccgccgggtgctgctggccttctcctggcagaaccccaccatcggctactgccagggcctgaacaggctggcggccattgccctgctggtcctagaggaggaggagagcgccttctggtgcctggtggccattgtggagaccatcatgcccgctgattactactgcaacacgctgacggcatcccaggtggaccagcgggtgctccaggacctgctctcggagaagctgcccaggctgatggcccatctggggcagcaccacgtggatctctccctcgtcaccttcaactggttcctcgtggtctttgcggacagtctcattagcaacatcctccttcgggtctgggatgccttcctgtacgaggggacgaaggtggtgtttcgctatgccttggccattttcaagtacaacgagaaggagatcttgaggctacagaatggcctggaaatctaccagtacctgcgcttcttcaccaagaccatctccaacagccgctgatgaacatcgccttcaatgacatgaaccccttccgcatgaaacagctgcggcagctgcgcatggtccaccgggagcggctggaggctgagctgcgggagctggagcagcttaaggcagagtacctggagaggcgggcatcccggcgcagagctgtgtccgagggctgtgccagcgaggacgaggtggagggggaagcctgacttggccacctcccctccccacagccttcctcacccttggctggcagacccactggaggtcaggcacggaccagtggcccagccctgggtgtcccatcaccatgtgaccttggacatgtcccttcccctctctggccctcagtttccccactgggacattgtgtgctgcaaagccattggttgggctacttcttcataggcacttacttacccagggatgccaccctttcgtcacctcttccacagagcactttggcatgtaaacaagcaagagcactgcctctatagggtaacctggaacattctctaggttatatcaatataaaacaatgtaaatggtggaaatcattca

SEQ ID NO: 31088 - DNA, 3198 bp, Homo sapiens
  source 1..3198: mol_type = unassigned DNA
ctccctttgggaagctgcccgccgagtctccgagatttgtccctggtggtcccgcggacccctcgtccctccgcagtctccggctggcagcgatggagggcgctggggagaacgccccggagtccagctcctctgcccctgggtccgaagagtctgccagggatccacaggtgccgcctccggaggaagaatcgggggactgcgcccggtccctggaggcggtccccaagaaactctgtgggtatttaagtaagttcggcggcaaagggcccatccggggctggaaatcccgctggttcttctacgacgaaaggaaatgtcagctgtattactcgcggaccgctcaggatgccaatcccttggacagcatcgacctctccagtgcagtgtttgactgtaaggcggacgctgaggaggggatcttcgaaatcaagactcccagccgggttattaccctgaaggccgccaccaagcaagcgatgctgtactggctgcagcagctgcagatgaagcgctgggaattccacaacagcccgccggcacctcctgccacccctgatgccgccctggctgggaatgggcccgtcctgcacctcgagctagggcaagaagaggcagagctggaggagttcctgtgccctgtgaaaacaccccctgggctagtgggcgtggcagctgccttgcagcccttccctgcccttcagaatatttccctcaagcacctggggactgaaatacagaacacaatgcacaacatccgtggcaacaagcaggcccagggaacaggccatgaacctccaggggaagattctccacagagtggggagcctcagagggaggagcagcccttggcctctgacgccagcaccccagggagagagccagaggattctccaaagcctgcacccaagccttctctgaccatcagtttcgctcagaaagccaagcgccagaacaacaccttcccattcttttctgaaggaatcacacggaaccgaactgcccaggagaaagtggcagccttggagcaacaggttctgatgctcaccaaggagttaaagtctcagaaggagctagtgaagatcctgcacaaggcactggaggccgcccagcaggagaagcgggcgtccagcgcatacctggcggcggctgaggacaaggaccggctggagctggtgcggcacaaagtgcggcagatcgcggagctgggccggcgggtggaggccctggagcaggagcgggagagcctggcgcacacagcgagcctgcgggagcagcaggtgcaggagctacagcagcacgtgcagctgcttatggacaagaaccacgccaagcagcaggtcatctgcaagctctctgagaaggtcacccaggacttcacgcacccccctgaccagtctcctttgcgccccgacgctgccaacagggacttcctgagccagcaggggaagatagagcacctgaaggatgacatggaagcttaccggacccagaactgcttcctcaactccgagatccaccaggtcacaaagatctggagaaaggtggctgagaaggagaaggcccttctgacgaagtgcgcctacctccaagccagaaactgccaggtggaaagcaagtacctggccggtctgagaaggctgcaggaggccctgggggacgaagccagcgagtgctcagagctgctgaggcagcttgtccaggaggcactgcagtgggaagctggggaggcctcatctgacagcatcgagctgagccccatcagtaagtatgatgagtacggcttcctgacggtgcccgactatgaggtggaagacctgaagctgctggccaagatccaggcattggagtcacgatcccaccacctgctgggcctcgaggctgtggatcggccgctgagggagcgctgggctgccctgggcgatcttgtgccctcagccgagctcaagcagctactgcgggcaggagtaccccgtgaacaccggcctcgtgtctggaggtggctggtccacctccgtgtccagcacctgcacactccaggctgctaccaggaactgctgagccggggccaggcccgcgagcaccctgctgcccgccagattgagctggacctgaaccggaccttccccaacaacaaacacttcacctgccccacctccagcttccccgacaagctccgccgggtgctgctggccttctcctggcagaaccccaccatcggctactgccagggcctgaacaggctggcggccattgccctgctggtcctagaggaggaggagagcgccttctggtgcctggtggccattgtggagaccatcatgcccgctgattactactgcaacacgctgacggcatcccaggtggaccagcgggtgctccaggacctgctctcggagaagctgcccaggctgatggcccatctggggcagcaccacgtggatctctccctcgtcaccttcaactggttcctcgtggtctttgcggacagtctcattagcaacatcctccttcgggtctgggatgccttcctgtacgaggggacgaagtacaacgagaaggagatcttgaggctacagaatggcctggaaatctaccagtacctgcgcttcttcaccaagaccatctccaacagccggaagctgatgaacatcgccttcaatgacatgaaccccttccgcatgaaacagctgcggcagctgcgcatggtccaccgggagcggctggaggctgagctgcgggagctggagcagcttaaggcagagtacctggagaggcgggcatcccggcgcagagctgtgtccgagggctgtgccagcgaggacgaggtggagggggaagcctgacttggccacctcccctccccacagccttcctcacccttggctggcagacccactggaggtcaggcacggaccagtggcccagccctgggtgtcccatcaccatgtgaccttggacatgtcccttcccctctctggccctcagtttccccactgggacattgtgtgctgcaaagccattggttgggctacttcttcataggcacttacttacccagggatgccaccctttcgtcacctcttccacagagcactttggcatgtaaacaagcaagagcactgcctctatagggtaacctggaacattctctaggttatatcaatataaaacaatgtaaatggtggaaatcattca

SEQ ID NO: 31089 - DNA, 4393 bp, Homo sapiens
  source 1..4393: mol_type = unassigned DNA
atgccgagcgggtgctacgtcccgcggtcggagccgcgtcttctcccggctccgccaccagccggggctcgggtgggggccctccggagtgcgcagggcgacggccccacctccggccactgggacggcggcgcggagaaggcagactttaacgccaaaaggaaaaagaaagtggcagagatacaccaggctctgaacagtgatcccactgatgtggctgcccttagacgcatggctatcagtgaaggagggctcctgactgatgagatcagacgaaaagtgtggcccaagctcctcaatgtcaatgccaatgacccacctcctatatcagggaagaacctacggcagatgagcaaggactaccaacaagtgttgctggacgtccggcggtcattgcggcggttccctcctggcatgccagaggaacagagagaagggctccaggaagaactgattgacatcatcctcctcatcttggagcgcaaccctcagctgcactactaccagggctaccatgacattgtggtcacatttctgctggtggtaggcgagaggctggcaacatccctggtagaaaaattatctacccaccacctcagggattttatggatccaacaatggacaacaccaagcatatattaaactatctgatgcccatcattgaccaggtgaatccagagctccatgacttcatgcagagtgctgaggtagggaccatctttgccctcagctggctcatcacctggtttgggcatgtcctgtctgacttcaggcacgtcgtgcggttatatgacttcttcctggcctgccacccactgatgccgatttactttgcagccgtgattgtgttgtatcgcgagcaggaagtcctggactgtgactgtgacatggcctcggtccaccacctgttgtcccagatccctcaggacttgccctatgagacactgatcagcagagcaggagacctttttgttcagtttcccccatccgaacttgctcgggaggccgctgcccaacagcaagctgagaggacggcagcctctactttcaaagactttgagctggcatcagcccagcagaggcctgatatggtgctgcggcagcggtttcggggacttctgcggcctgaagatcgaacaaaagatgtcctgaccaagccaaggaccaaccgctttgtgaaattggcagtgatggggctgacagtggcacttggagcggctgcactggctgtggtgaaaagtgccctggaatgggcccctaagtttcagctgcagctgtttccctgaaagccagagaagaccttcctcttacatcacattaaggtctcacccttccatggaaggattgggaggggtggaatttcctttattaaaagggtttctgtccagagttttttattcctgccaccctgccctgcccgtttgtgtttgcctttacttcagaggccagtagcagagcctacctgacacagaggggacctgggggcctggcacagaatcttatgcctctcccagtgggcttttggatgggctctctgccacctccctggtgttggaggaagtgggtttctgaagcttgcagctgcttttgcaacctgctgggcctgggctgccctagttaccgggaacctcctagtcaccccatagaaggtgaactggaacatgggatgccctcttactgctcctgcttgcctgcatcagatggacacagaaggagggggctgctgctgaaggagtcaggcttgggatggagagcaagaggccaaaggactcgtctgggagcatgatcggcccctcttactagcagctccatcagctgatcagaaatcagagacagaagggaactaggttactcgttaaatcctacctattttcagcctagaaatcacatgggcgtttccagtcaagtgggaaggaagctcatttttagggcctagacctagactagttttgcctgcctttttttcctccctgctttcttctacaagccacacaacattgcttataaaaggtacttttattactatttttagaatatatacaccccatatgtaaattaccctcacttttaaagtaataatagttccttcacggaaaaaaaaatagttctcatcagaaggatgagcttctaagatcctgaattttactttctacttgattaacattttcgctttagccagagttgctatttgcaaacagctttccacttccaaagtgccactttctgaccggtttttcttcctgttttcctcaaatcatcctactcccaaataggcacccactcactaccttggcgtcgttttttgggtctgacttgactcgtcaactgctggtctctcccacctggttggaaatgtcgttggaaacttgcaaagactctccagaccttagggaacaagaggcatcactcagtccttctgggacagcttccctgtaagcaaagccaggtttgttttagattcactctggcctgaaaaaaaaagtgccttttgctgctttaaagaattggggtatatggtatgaagcagccatgtacttgtattttcctggtctttcctgggcactcttctctcttggcagatgttttcttaaagtgaacacaccagaagcactctaccccaccatatccagtcctctttgcatgcctgttgtgtgcagggtggagggtgtcccacgtgccagagcagctgggagccctgtccgctgagttacactaagcactttatttttatttattttattattattttcttttttctgagatggagtctcactctgttgcccaggctggagtgcagtggtgcagtctcagctcactgcaacctccgcctcccaagttcaggcaattctcgctgcctcagcctcccgagtagctgggactacaggcacctgctaccacgcctgactaatttttgtatttttagtagagatggggtttcgccacgttggccaggctggtctcgaactcctgacctcaggtgatctgcccgtctcgtcctcccaaagtgctgggattacaggtgtgagccaccacgcccagccaccactacgcactttaaaaccaaaaaaagctcaaagggatggatcattgtccatggctcaggagccccactgtggggtaagtgtgatgtcgatggattaatttagacagtggtgtattcatcagggcaaaggaaattcttccagaggtgatgatgcggcagatattcccagtgctctcccaaagcaagctggccctcttgtcatcctctcagtgggcggcaccagctgcccctccttccacaagtactcaagcctgtttgtaaatactgaaggaattgatggggttgaggaaaggaggtgcatgtgaccagggtcccaaggccacagcttttcagatcctaggaagcaagtggcatttgcttgagttgtggcctcggaaggagaatgtttatctgttttctaactttgctgacaccaggattctccctgtcattgagaagaaagcattatctaattaccttcaggtggtttacttattctgtaaagaatatgtgtaaatattttgtacagagccctgtatcaaataaacagccatatgtggttactaatcacctcttctgtcattccgtccttggccaccgctcagtgggaatggtctctgatctggatgctcccaccttccatgtcaggcccagaactgtgccatggtctgtggactcctggtcagccttgactggctaggagaccttgggcagtacctacagtcttgctgtttctgtttcatctgcaagaattatgacccacacactccagctgcagcccagggcactgtgatattttatacgtgtgtagatgtttttgtccacagttcctggttcatcactcccataaccctttgttataatgttgggacactgcaggcctcagaaaacggaatctctgtctgtgaccttctcctgccccatttcacttgctcaacaccagactttaatctgactgtagctcataagaccctcattccagagagggtgctgccccatacccggaaggaggaacgctgcacagagaggccaagaagcatctggacagacaggccttgctgggtttagaccttatgctttttgtccagtttcatctcaacacagctgccatgcttcagccatgcctatccaatgacgtctccataaaaggcccaggaacacgggagcttctgaagagctgaacatgtggagggaggggaacgagaacttgtccatgtgccaagagggtggcgcacccccactccatggggacagaagctccagcatttgcccaggacccgtccagacctcaccctgtgtgtatcttcatctggctgtttacttatttgtatccttttctaataatgtttgtaataaactggtaaacataa

SEQ ID NO: 31090 - DNA, 4466 bp, Homo sapiens
  source 1..4466: mol_type = unassigned DNA
agcggggcgcctgcgcgcctgcgcgccgctggccgacggaggggagcctgccgatgccgagcgggtgctacgtcccgcggtcggagccgcgtcttctcccggctccgccaccagccggggctcgggtgggggcccggggccccggggcatggccctccggagtgcgcagggcgacggccccacctccggccactgggacggcggcgcggagaaggcagactttaacgccaaaaggaaaaagaaagtggcagagatacaccaggctctgaacagtgatcccactgatgtggctgcccttagacgcatggctatcagtgaaggagggctcctgactgatgagatcagacgaaaagtgtggcccaagctcctcaatgtcaatgccaatgacccacctcctatatcagggaagaacctacggcagatgagcaaggactaccaacaagtgttgctggacgtccggcggtcattgcggcggttccctcctggcatgccagaggaacagagagaagggctccaggaagaactgattgacatcatcctcctcatcttggagcgcaaccctcagctgcactactaccagggctaccatgacattgtggtcacatttctgctggtggtaggcgagaggctggcaacatccctggtagaaaaattatctacccaccacctcagggattttatggatccaacaatggacaacaccaagcatatattaaactatctgatgcccatcattgaccaggtgaatccagagctccatgacttcatgcagagtgctgaggtagggaccatctttgccctcagctggctcatcacctggtttgggcatgtcctgtctgacttcaggcacgtcgtgcggttatatgacttcttcctggcctgccacccactgatgccgatttactttgcagccgtgattgtgttgtatcgcgagcaggaagtcctggactgtgactgtgacatggcctcggtccaccacctgttgtcccagatccctcaggacttgccctatgagacactgatcagcagagcaggagacctttttgttcagtttcccccatccgaacttgctcgggaggccgctgcccaacagcaagctgagaggacggcagcctctactttcaaagactttgagctggcatcagcccagcagaggcctgatatggtgctgcggcagcggtttcggggacttctgcggcctgaagatcgaacaaaagatgtcctgaccaagccaaggaccaaccgctttgtgaaattggcagtgatggggctgacagtggcacttggagcggctgcactggctgtggtgaaaagtgccctggaatgggcccctaagtttcagctgcagctgtttccctgaaagccagagaagaccttcctcttacatcacattaaggtctcacccttccatggaaggattgggaggggtggaatttcctttattaaaagggtttctgtccagagttttttattcctgccaccctgccctgcccgtttgtgtttgcctttacttcagaggccagtagcagagcctacctgacacagaggggacctgggggcctggcacagaatcttatgcctctcccagtgggcttttggatgggctctctgccacctccctggtgttggaggaagtgggtttctgaagcttgcagctgcttttgcaacctgctgggcctgggctgccctagttaccgggaacctcctagtcaccccatagaaggtgaactggaacatgggatgccctcttactgctcctgcttgcctgcatcagatggacacagaaggagggggctgctgctgaaggagtcaggcttgggatggagagcaagaggccaaaggactcgtctgggagcatgatcggcccctcttactagcagctccatcagctgatcagaaatcagagacagaagggaactaggttactcgttaaatcctacctattttcagcctagaaatcacatgggcgtttccagtcaagtgggaaggaagctcatttttagggcctagacctagactagttttgcctgcctttttttcctccctgctttcttctacaagccacacaacattgcttataaaaggtacttttattactatttttagaatatatacaccccatatgtaaattaccctcacttttaaagtaataatagttccttcacggaaaaaaaaatagttctcatcagaaggatgagcttctaagatcctgaattttactttctacttgattaacattttcgctttagccagagttgctatttgcaaacagctttccacttccaaagtgccactttctgaccggtttttcttcctgttttcctcaaatcatcctactcccaaataggcacccactcactaccttggcgtcgttttttgggtctgacttgactcgtcaactgctggtctctcccacctggttggaaatgtcgttggaaacttgcaaagactctccagaccttagggaacaagaggcatcactcagtccttctgggacagcttccctgtaagcaaagccaggtttgttttagattcactctggcctgaaaaaaaaagtgccttttgctgctttaaagaattggggtatatggtatgaagcagccatgtacttgtattttcctggtctttcctgggcactcttctctcttggcagatgttttcttaaagtgaacacaccagaagcactctaccccaccatatccagtcctctttgcatgcctgttgtgtgcagggtggagggtgtcccacgtgccagagcagctgggagccctgtccgctgagttacactaagcactttatttttatttattttattattattttcttttttctgagatggagtctcactctgttgcccaggctggagtgcagtggtgcagtctcagctcactgcaacctccgcctcccaagttcaggcaattctcgctgcctcagcctcccgagtagctgggactacaggcacctgctaccacgcctgactaatttttgtatttttagtagagatggggtttcgccacgttggccaggctggtctcgaactcctgacctcaggtgatctgcccgtctcgtcctcccaaagtgctgggattacaggtgtgagccaccacgcccagccaccactacgcactttaaaaccaaaaaaagctcaaagggatggatcattgtccatggctcaggagccccactgtggggtaagtgtgatgtcgatggattaatttagacagtggtgtattcatcagggcaaaggaaattcttccagaggtgatgatgcggcagatattcccagtgctctcccaaagcaagctggccctcttgtcatcctctcagtgggcggcaccagctgcccctccttccacaagtactcaagcctgtttgtaaatactgaaggaattgatggggttgaggaaaggaggtgcatgtgaccagggtcccaaggccacagcttttcagatcctaggaagcaagtggcatttgcttgagttgtggcctcggaaggagaatgtttatctgttttctaactttgctgacaccaggattctccctgtcattgagaagaaagcattatctaattaccttcaggtggtttacttattctgtaaagaatatgtgtaaatattttgtacagagccctgtatcaaataaacagccatatgtggttactaatcacctcttctgtcattccgtccttggccaccgctcagtgggaatggtctctgatctggatgctcccaccttccatgtcaggcccagaactgtgccatggtctgtggactcctggtcagccttgactggctaggagaccttgggcagtacctacagtcttgctgtttctgtttcatctgcaagaattatgacccacacactccagctgcagcccagggcactgtgatattttatacgtgtgtagatgtttttgtccacagttcctggttcatcactcccataaccctttgttataatgttgggacactgcaggcctcagaaaacggaatctctgtctgtgaccttctcctgccccatttcacttgctcaacaccagactttaatctgactgtagctcataagaccctcattccagagagggtgctgccccatacccggaaggaggaacgctgcacagagaggccaagaagcatctggacagacaggccttgctgggtttagaccttatgctttttgtccagtttcatctcaacacagctgccatgcttcagccatgcctatccaatgacgtctccataaaaggcccaggaacacgggagcttctgaagagctgaacatgtggagggaggggaacgagaacttgtccatgtgccaagagggtggcgcacccccactccatggggacagaagctccagcatttgcccaggacccgtccagacctcaccctgtgtgtatcttcatctggctgtttacttatttgtatccttttctaataatgtttgtaataaactggtaaacataa

SEQ ID NO: 31091 - DNA, 2024 bp, Homo sapiens
  source 1..2024: mol_type = unassigned DNA
gcgccgctggccgacggaggggagcctgccgatgccgagcgggtgctacgtcccgcggtcggagccgcgtcttctcccggctccgccaccagccggggctcgggtgggggcccggggccccggggcatggccctccggagtgcgcagggcgacggccccacctccggccactgggacggcggcgcggagaaggcagactttaacgccaaaaggaaaaagaaagtggcagagatacaccaggctctgaacagtgatcccactgatgtggctgcccttagacgcatggctatcagtgaaggagggctcctgactgatgagatcagacgaaaagtgtggcccaagctcctcaatgtcaatgccaatgacccacctcctatatcagggaagaacctacggcagatgagcaaggactaccaacaagtgttgctggacgtccggcggtcattgcggcggttccctcctggcatgccagaggaacagagagaagggctccaggaagaactgattgacatcatcctcctcatcttggagcgcaaccctcagctgcactactaccagggctaccatgacattgtggtcacatttctgctggtggtaggcgagaggctggcaacatccctggtagaaaaattatctacccaccacctcagggattttatggatccaacaatggacaacaccaagcatatattaaactatctgatgcccatcattgaccaggtgaatccagagctccatgacttcatgcagagtgctgaggtagggaccatctttgccctcagctggctcatcacctggtttgggcatgtcctgtctgacttcaggcacgtcgtgcggttatatgacttcttcctggcctgccacccactgatgccgatttactttgcagccgtgattgtgttgtatcgcgagcaggaagtcctggactgtgactgtgacatggcctcggtccaccacctgttgtcccagatccctcaggacttgccctatgagacactgatcagcagagcaggagacctttttgttcagtttcccccatccgaacttgctcgggaggccgctgcccaacagcaagctgagaggacggcagcctctactttcaaagactttgagctggcatcagcccagcagaggcctgatatggtgctgcggcagcggtttcggggacttctgcggcctgaagatcgaacaaaagatgtcctgaccaagccaaggaccaaccgctttgtgaaattggcagtgatggggctgacagtggcacttggagcggctgcactggctgtggtgaaaagtgccctggaatgggcccctaagtttcagctgcagctgtttccctgaaagccagagaagaccttcctcttacatcacattaaggcacccactcactaccttggcgtcgttttttgggtctgacttgactcgtcaactgctggtctctcccacctggttggaaatgtcgttggaaacttgcaaagactctccagaccttagggaacaagaggcatcactcagtccttctgggacagcttccctgcctcagaaaacggaatctctgtctgtgaccttctcctgccccatttcacttgctcaacaccagactttaatctgactgtagctcataagaccctcattccagagagggtgctgccccatacccggaaggaggaacgctgcacagagaggccaagaagcatctggacagacaggccttgctgggtttagaccttatgctttttgtccagtttcatctcaacacagctgccatgcttcagccatgcctatccaatgacgtctccataaaaggcccaggaacacgggagcttctgaagagctgaacatgtggagggaggggaacgagaacttgtccatgtgccaagagggtggcgcacccccactccatggggacagaagctccagcatttgcccaggacccgtccagacctcaccctgtgtgtatcttcatctggctgtttacttatttgtatccttttctaataatgtttgtaataaactggtaaacataa

SEQ ID NO: 31092 - DNA, 4329 bp, Homo sapiens
  source 1..4329: mol_type = unassigned DNA
gctgaggagaaagcggcgcgcggagggtgtgagatggcagacaggtttgcaggaaaccctcagaaagggggctggaggatttagccactctgtcctccccttccggcagtccagggcctcctcccgagcacagcggcgctatggactctccaggatacaactgcttcgtggacaaagacaagatggacgctgccatccaggacctggggcccaaggagctgagctgcactgaactgcaggaactgaagcagctggcgcgccagggctactgggcccaaagccacgccctgcggggaaaggtgtaccagcgcctgatccgggacattccctgccgcacggtcacgcctgacgccagcgtgtacagcgacatcgtgggcaagatcgtgggcaagcacagcagcagctgcctgccgctgcccgagttcgtggacaacacgcaggtgcccagctactgcctgaatgcacgcggcgagggggccgtgcgcaagatcctcctgtgcctggccaaccagttccccgacatctccttctgccccgccctgccggccgtggtggccctgctgctgcactacagcatcgacgaggccgagtgcttcgagaaggcctgccgcatcctggcctgcaatgaccccggcaggaggctgatcgaccagagcttcctggcctttgagtcgtcctgcatgacgtttggggacctggtgaacaagtactgccaggcggcccacaagctgatggtggccgtgtcggaggatgtcctgcaggtctatgcggactggcagcgctggctgtttggggagctgcccctctgctacttcgcccgggtctttgacgtcttcctggtggagggctacaaggtgctgtaccgcgtggcgctggccatcctcaagttcttccacaaggtgagggccgggcagccgctggagtcggacagcgtgaagcaggacatccgcacgttcgtcagagacatcgcgaagacggtgtcccctgagaagctgctggagaaagcgttcgccatccgcctcttctcccgcaaggagatccagctcctgcagatggccaatgagaaagccctgaagcagaagggcatcaccgtgaagcagaagaggcagtttgtacacttggccgtccatgcagagaacttccgctcggagatcgtcagcgtgagggagatgagagacatctggtcctgggtccccgagcgctttgccctgtgccagccccttctgctgttctcctccctgcagcacgggtacagcctggccaggttctacttccagtgtgaaggacatgagcctaccctcttgctcatcaagaccacgcagaaggaggtgtgtggtgcttacctgtccacagactggagtgagagaaataagtttggaggcaaactgggcttctttgggaccggagaatgctttgtgtttaggctgcagcctgaggtgcagcgctacgagtgggtggtgatcaagcaccccgagctgaccaagcccccacccttgatggctgccgagcccaccgccccactcagccactccgcctcctcagaccccgctgaccgcctctcgcccttcctggccgctcgccacttcaacctgccctccaagaccgagtccatgttcatggcggggggcagcgactgcctcatcgtcgggggaggaggcggccaggcgctctacatcgatggggacctgaaccggggccgcacaagccactgcgacaccttcaacaaccagcccctctgctccgagaacttcctcattgctgccgtggaggcctggggcttccaggaccctgacacccagtgacggcctgtgccacggtgactgagccgtggtggggcggtgggccgaggctgggctgccgcctcgggcagcagagagcagatgaaacccccatgtggtaggcagggttgggggacggcaggaccccatggccaagcctggcgttgcctggacctgctgctgcctctacctggggtttgggctgggcttccccagtccacctgcatctgggtcagagctggagggcctgctgtgcccccagccccacccagagctggcataggaagtaccttcctcctccgtggaggcttccatagcccaaggccttgggagtgtctgggtcttgctgcccctgagcctctctaggcagcctgagcccctggggtgggagtacaacggcagtgggaacgtgcagctaagggtgggcctgtggtgccccctgctggtgccgcatagcatcgcgccctcctgagcagggccctgcagcctggctggctggcgactgaatcccagcgtagatcccgagaacagactggcacccttgggcctgccccctggcggaccccaccccctgtcctgggcgtttgccccagttccctccccaggcctcctgggccacctctcacattaacccttcttggctgcctctgaggctcccctgggctgcgtttgggagctgctgggtgggaggaggagggtgggatttgtgctgggctccacccccagggagggtgggagctggagggggatgtcacatgtccttgtgtttctgcagagcctgaagcttttgctgggcctccctgcgtgttcccatctgaagaggtagccccgggagaggccctcagggaccgacccagaccagcaagctccatttccaggggtctgcccagagaagcctggacccagggggcttctcagctcccctcccttccagcccaggcctccttgagctcctgtagcctctgcagctgcccatttcacctctttgtcattgcaatgacctggggcccagggtcacgcccaagcccctctttgtggcatgctcatctcagtgcagccccaactgcttctctgcaccaggccccgtgccctcccctggccctggccacacagcacctccttggccaccttgcatggatgcatgtcctccctctgtccctcttgtggtgctgtggctggccacgtgtcagggttttctgtgagcctctcaccttacagcctttgggcccctgggcccctgccctgcctgagccctgcgctggccagacgcaggtaggtgccaggggaggccttgcctctgggcactatagggggcagccccctgccttgtgacctccctccatgccccatgacctccttcaactcgtcttgagggtctggtcaccacggaggggagaagggagacacagaggcccaagtggctgttctgggaccatggaagcctgggtcacagaggcaggtaccagcagtcctgcccccacccccgtccctgctggcctccagccagtgccacttggagtcccctgcaccgtgccactttccatccccacaccattgcctgctcctcccatggggctttagcctcccctgaccatctgctcatgtagcctctgactgggcgcacagtggtgcaggaggaaggaccgggaaccctgtgtggctttgggcaagctgacaaacccgtctggaactcagtttccccagctgtgaaatggggccagtccccatgccctgctgtcctcctcacaggactgttgagaggctcgcagggggatggggtgaatccctctcacggggagaggtatgggagggaagtcgccactcatctcagcccaccgcagccctccaggcccccgcctgagcccctgaggccctcatctgtaccgccagctttggtgttcattaaacatggtcttgctgcatcaactccagggctccaagctgagtctgatctcttcagccagaggggcctccgggggcttcctgggcctacagccaagcaggtgtgggaggctgcccgctgtagtgctcacccacattctatgactggaatgctgcaagcctcttccagagggagccctccaggagcagggaagtcatatccgtggaccatttgtaggtttccctctgcaaacttcctgaactgggtggtgatttttctggcgagttaagtccagcaggttctgcgtggctgcccccagggggccccacccgggccttccagtgatctggaccaggaagacggattgctgctgggtcatgatttccacatcatgagcgaagttctttgttttttgtgtgcatgcaaaatattgtttctttaaatttaatatcttttcctaacttttctactaacctagaaggtatgtgtgattattatcttttttattcttatcactgtacttgttagtatctgatattaggtattcccaaatagaacataatttattttgttaatgttctctatttcttcttgattatttattagctttggatgttaaaaattagccaaaagtggctgctctgcctatgaagtagccattctttgttt

SEQ ID NO: 31093 - DNA, 2423 bp, Homo sapiens
  source 1..2423: mol_type = unassigned DNA
actctgtcctccccttccggcagtccagggcctcctcccgagcacagcggcgctatggactctccaggatacaactgcttcgtggacaaagacaagatggacgctgccatccaggacctggggcccaaggagctgagctgcactgaactgcaggaactgaagcagctggcgcgccagggctactgggcccaaagccacgccctgcggggaaaggtgtaccagcgcctgatccgggacattccctgccgcacggtcacgcctgacgccagcgtgtacagcgacatcgtgggcaagatcgtgggcaagcacagcagcagctgcctgccgctgcccgagttcgtggacaacacgcaggtgcccagctactgcctgaatgcacgcggcgagggggccgtgcgcaagatcctcctgtgcctggccaaccagttccccgacatctccttctgccccgccctgccggccgtggtggccctgctgctgcactacagcatcgacgaggccgagtgcttcgagaaggcctgccgcatcctggcctgcaatgaccccggcaggaggctgatcgaccagagcttcctggcctttgagtcgtcctgcatgacgtttggggacctggtgaacaagtactgccaggcggcccacaagctgatggtggccgtgtcggaggatgtcctgcaggtctatgcggactggcagcgctggctgtttggggagctgcccctctgctacttcgcccgggtctttgacgtcttcctggtggagggctacaaggtgctgtaccgcgtggcgctggccatcctcaagttcttccacaaggtgagggccgggcagccgctggagtcggacagcgtgaagcaggacatccgcacgttcgtcagagacatcgcgaagacggtgtcccctgagaagctgctggagaaagcgttcgccatccgcctcttctcccgcaaggagatccagctcctgcagatggccaatgagaaagccctgaagcagaagggcatcaccgtgaagcagaagagtgtgtcactttctaaaaggcagtttgtacacttggccgtccatgcagagaacttccgctcggagatcgtcagcgtgagggagatgagagacatctggtcctgggtccccgagcgctttgccctgtgccagccccttctgctgttctcctccctgcagcacgggtacagcctggccaggttctacttccagtgtgaaggacatgagcctaccctcttgctcatcaagaccacgcagaaggaggtgtgtggtgcttacctgtccacagactggagtgagagaaataagtttggaggcaaactgggcttctttgggaccggagaatgctttgtgtttaggctgcagcctgaggtgcagcgctacgagtgggtggtgatcaagcaccccgagctgaccaagcccccacccttgatggctgccgagcccaccgccccactcagccactccgcctcctcagaccccgctgaccgcctctcgcccttcctggccgctcgccacttcaacctgccctccaagaccgagtccatgttcatggcggggggcagcgactgcctcatcgtcgggggaggaggcggccaggcgctctacatcgatggggacctgaaccggggccgcacaagccactgcgacaccttcaacaaccagcccctctgctccgagaacttcctcattgctgccgtggaggcctggggcttccaggaccctgacacccagtgacggcctgtgccacggtgactgagccgtggtggggcggtgggccgaggctgggctgccgcctcgggcagcagagagcagatgaaacccccatgtggtaggcagggttgggggacggcaggaccccatggccaagcctggcgttgcctggacctgctgctgcctctacctggggtttgggctgggcttccccagtccacctgcatctgggtcagagctggagggcctgctgtgcccccagccccacccagagctggcataggaagtaccttcctcctccgtggaggcttccatagcccaaggccttgggagtgtctgggtcttgctgcccctgagcctctctaggcagcctgagcccctggggtgggagtacaacggcagtgggaacgtgcagctaagggtgggcctgtggtgccccctgctggtgccgcatagcatcgcgccctcctgagcagggccctgcagcctggctggctggcgactgaatcccagcgtagatcccgagaacagactggcacccttgggcctgccccctggcggaccccaccccctgtcctgggcgtttgccccagttccctccccaggcctcctgggccacctctcacattaacccttcttggctgcctctgaggctcccctgggctgcgtttgggagctgctgggtgggaggaggagggtgggatttgtgctgg

SEQ ID NO: 31094 - DNA, 4042 bp, Homo sapiens
  source 1..4042: mol_type = unassigned DNA
cgtcagtttaacacctccgtgaatccggaagtatgctgtcaaaacaaccaaaccacggggctgggggaggcggggcctcagtaggcgtctgcacgctagctgaaatagagcaaaatgcccgacttttgggggcggggctcctggcaacagcactctaggcgcaggcgcagaggcgacctccaggcagggccaggtgggagggacggtggggggtagggtcgcgcggcgccctctgcgcctgcgccccggcacgaggtggggcggcgggcgtcagtacagtagagtgtgcgccggggtggggggcaacggtcagccgtcaccctgagacgggcggcggcgggatggcaacagcctccggggcctcggacttgtctggctccggagcgcccccgcccggtgtgggagctcaggcggcggcggccgctgaggaggaggagcgagaggtggtgcgggtccgagtcaagaaatgtgagagcttcttgccgccagagttccgctcttttgctgtagatccccagatcacctcgctcgacgtgttgcagcacatcctcatccgagcctttgatttgagtgggaagaagaactttggcatcagctacctgggccgggaccggctaggacaggaagtttacctctcacttctatctgactgggacctcagcacagcctttgccactgcctccaaaccttacctgcaattgcgtgtagatattcggccctcggaggacagcccattgctagaagactgggacataatcagccccaaagatgtcattggctccgacgtgttgctggctgagaaacggtcatcactgacgactgccgccctgccctttacacagtccatcctcactcaggtgggccgtaccttgtctaaggtccaacaagtgctgagctggtcgtatggggaagatgtcaagcccttcaagccacccctgagcgatgctgagtttcacacgtacctgaaccacgagggccagctctcccgacccgaggagttgcgcctgcggatctatcatggcggtgtggagccctcgctgcgaaaggtggtgtggcggtacctgctgaacgtgtatccagatggactgacaggccgagagcggatggactacatgaaacgcaagagccgcgagtatgagcagctcaagagcgagtgggcccagcgagcgaaccctgaggacctggaattcatccgcagcacggtcctcaaggatgtactgcgcactgaccgggcccacccctactatgcggggcctgaggatggcccacatctacgggcgctgcacgacctgctcaccacctatgccgttacccacccacaggtgtcctactgccagggcatgagtgaccttgcctcacccatcctcgctgtcatggaccatgagggccatgcctttgtttgcttttgtggcatcatgaaacgcctggccgccaacttccaccctgacggccgcgccatggccaccaagtttgcacacttgaagctgttgctgcgacacgctgaccctgacttttatcaatacctgcaagaggcaggcgctgatgacctcttcttctgttaccgctggctgctgctggaactcaagcgtgagttcgccttcgacgatgccctccgcatgcttgaggtcacttggagttcgctgccccctgatcctcctgaacatgaggtagagctggttggaccccccagccaagtggcagacgctggttttggtggccacagggggtggcccgtgcgacagaggcacatgctgaggcctgctggtggaggaggtagtacctttgaagatgctgttgaccacctggccacagccagtcaggggcctggtggtggggggcgtctcctgagacaggccagcttggatggcctccagcaactcagggataacatgggctccaggagggaccctctggtccagctgccccacccagctgcccttatcagctccaagtccctctctgagcctttattgaactccccagacccactgctctcctccttttcccaccctgattccccatcttcctcatctccaccatccacccaggaggcctctcccactggtgatatggctgtaggatcccccttgatgcaagaggtaggctccccgaaagaccctggaaagtccctgccacctgtaccaccaatgggcctgcccccaccccaggagtttggccgggggaacccattcatgctgttcctctgcctggccatcctgctggagcaccgcgaccacatcatgcgcaatgggctggattataatgagctggccatgcactttgaccgccttgtgcgaaaacaccacctggggcgcgtcctgcgccgggctagggctctctttgctgattacctgcagtcagaggtgtgggactcagaggagggggctgaggccacagccgcatcttgatcaggctttctcaagccctccatcggccccaccagatctccattctttgccatgagggccaacacatgagaccccacctccctccctgcctgccagccctagacttgttggagcatagagcccttcctccccaggcctaagtatgtggagctctgctttggcactgccccgcagaggccacgcctatttattctgtttctgttgttttgtttttaacaactatactttgcacacatgaaggtcactgtggtttgtgtgtttctctgcctcctccctgggttttgctgtagatggagtcctcaggggccctttacctgatggaggggaaatacttcacttggtggagagaggctccagcttcccccttgtgatggggagagtggatgctgacaatcagttcccaaaggtgagcccaggtggagcactgcttgaggaaggcctgagtctgtttttttggtacatccatcggcctgtaagggtctgtattatggctgtgaatatatgttttcaggacagccccctggatgagagataagagagttcctggctcaaaaaaggacaagattctttactgagattgggaagtatgggctacttagaaacgttggagcagccacccctggcattccacatgtcaccatttctaggatcttggcctctctgtgaggtttatgcaccaatgctggcagccctgggcaggggcctcggcctcctttttgttttccacttcagacaggtaccgtgcagatgttaacaaggtttgagcgaggtgcatctcacacaagtgtgaaagcccaatcatcacattgttgaattacaaaaggatctagggctcctattcttgtcacttgctttggagccagtttgaaagactggcctagcccatgcctagcggccctaaactgggattccagctcacagcacctgtcttaaccatttcagcagtagaaaccacttatttaccttctccatctcactaatatggacaaacaacaagcactgataaaacgcaggccctaatagaattcacttcgttatttggaggataatgatcaaaaaaaggtcctttttcccactgacatgctcagagggtgggattctctcacaggccaggtgctgtcatccacaaaggatgggtgaaataactggggtcctcaggtcacggtctagccacaccagcttctcccaagtactaaccaggcttgaccctgcttagcttcagaggtcagacaagatctggcatgttcaggatggtatggctgtagaccaggctgggttctggccagagctgttgcactaggcaatgctgccagagatgaggaggcatcagggcagtcatcccttctgctgtttgccccaagaatgccatacaaacctggggatgacccttaaaagtctcccgtcacccccagtattggggggaagctgactattcctcagatgatagcccagtcacttgaagaacaggacaagactattctgtgtctagggggctcaagcactgtgtgtgggtctaacgaatgcattttgtggaaatgggctcagactccccaaagggccatccaacctatgggagtgtctggccttctgaggtcctgaaatgtctcttttgtcagtaaacagctaataccctc

SEQ ID NO: 31095 - DNA, 691 bp, Homo sapiens
  source 1..691: mol_type = unassigned DNA
atggcaacagcctccggggcctcggacttgtctggctccggagcgcccccgcccggtgtgggagctcaggcggcggcggccgctgaggaggaggagcgagaggtggtgcgggtccgagtcaagcatggtgatggggcccctggtggcctaccccatgtcttctctccccagaaatgtgagagcttcttgccgccagagttccgctcttttgctgtagatccccagatcacctcgctcgacgtgttgcagcacatcctcatccgagcctttgatttgagtgggaagaagaactttggcatcagctacctgggccgggaccggctaggacaggaagtttacctctcacttctatctgactgggacctcagcacagcctttgccactgcctccaaaccttacctgcaattgcgtgtagatattcggccctcggaggacagcccattgctagaagactgggacataatcagccccaaagatgtcattggctccgacgtgttgctggctgagaaacggtcatcactgacgactgccgccctgccctttacacagtccatcctcactcaggtgggccgtaccttgtctaaggtccaacaagtgctgagctggtcgtatggggaagatgtcaagcccttcaagccacccctgagcgatgctgagtttcacacgtacctgaaccacgagggccagctct

SEQ ID NO: 31096 - DNA, 2035 bp, Homo sapiens
  source 1..2035: mol_type = unassigned DNA
aacggtcagccgtcaccctgagacgggcggcggcgggatggcaacagcctccggggcctcggacttgtctggctccggagcgcccccgcccggtgtgggagctcaggcggcggcggccgctgaggaggaggagcgagaggtggtgcgggtccgagtcaagaaatgtgagagcttcttgccgccagagttccgctcttttgctgtagatccccagatcacctcgctcgacgtgttgcagcacatcctcatccgagcctttgatttgagtgggcccattgctagaagactgggacataatcagccccaaagatgtcattggctccgacgtgttgctggctgagaaacggtcatcactgacgactgccgccctgccctttacacagtccatcctcactcaggtgggccgtaccttgtctaaggtccaacaagtgctgagctggtcgtatggggaagatgtcaagcccttcaagccacccctgagcgatgctgagtttcacacgtacctgaaccacgagggccagctctcccgacccgaggagttgcgcctgcggatctatcatggcggtgtggagccctcgctgcgaaaggtggtgtggcggtacctgctgaacgtgtatccagatggactgacaggccgagagcggatggactacatgaaacgcaagagccgcgagtatgagcagctcaagagcgagtgggcccagcgagcgaaccctgaggacctggaattcatccgcagcacggtcctcaaggatgtactgcgcactgaccgggcccacccctactatgcggggcctgaggatggcccacatctacgggcgctgcacgacctgctcaccacctatgccgttacccacccacaggtgtcctactgccagggcatgagtgaccttgcctcacccatcctcgctgtcatggaccatgagggccatgcctttgtttgcttttgtggcatcatgaaacgcctggccgccaacttccaccctgacggccgcgccatggccaccaagtttgcacacttgaagctgttgctgcgacacgctgaccctgacttttatcaatacctgcaagaggcaggcgctgatgacctcttcttctgttaccgctggctgctgctggaactcaagcgtgagttcgccttcgacgatgccctccgcatgcttgaggtcacttggagttcgctgccccctgatcctcctgaacatgaggtagagctggttggaccccccagccaagtggcagacgctggttttggtggccacagggggtggcccgtgcgacagaggcacatgctgaggcctgctggtggaggaggtagtacctttgaagatgctgttgaccacctggccacagccagtcaggggcctggtggtggggggcgtctcctgagacaggccagcttggatggcctccagcaactcagggataacatgggctccaggagggaccctctggtccagctgccccacccagctgcccttatcagctccaagtccctctctgagcctttattgaactccccagacccactgctctcctccttttcccaccctgattccccatcttcctcatctccaccatccacccaggaggcctctcccactggtgatatggctgtaggatcccccttgatgcaagaggtaggctccccgaaagaccctggaaagtccctgccacctgtaccaccaatgggcctgcccccaccccaggagtttggccgggggaacccattcatgctgttcctctgcctggccatcctgctggagcaccgcgaccacatcatgcgcaatgggctggattataatgagctggccatgcactttgaccgccttgtgcgaaaacaccacctggggcgcgtcctgcgccgggctagggctctctttgctgattacctgcagtcagaggtgtgggactcagaggagggggctgaggccacagccgcatcttgatcaggctttctcaagccctccatcggccccaccagatctccattctttgccatgagggccaacacatgagaccccacctccctccc

SEQ ID NO: 31097 - DNA, 2128 bp, Homo sapiens
  source 1..2128: mol_type = unassigned DNA
agtacagtagagtgtgcgccggggtggggggcaacggtcagccgtcaccctgagacgggcggcggcgggatggcaacagcctccggggcctcggacttgtctggctccggagcgcccccgcccggtgtgggagctcaggcggcggcggccgctgaggaggaggagcgagaggtggtgcgggtccgagtcaagaaatgtgagagcttcttgccgccagagttccgctcttttgctgtagatccccagatcacctcgctcgacgtgttgcagcacatcctcatccgagcctttgatttgagtgggaagaagaactttggcatcagctacctgggccgggaccggctaggacaggaagtttacctctcacttctatctgactgggacctcagcacagcctttgccactgcctccaaaccttacctgcaattgcgtgtagatattcggccctcggaggacagtgggccgtaccttgtctaaggtccaacaagtgctgagctggtcgtatggggaagatgtcaagcccttcaagccacccctgagcgatgctgagtttcacacgtacctgaaccacgagggccagctctcccgacccgaggagttgcgcctgcggatctatcatggcggtgtggagccctcgctgcgaaaggtggtgtggcggtacctgctgaacgtgtatccagatggactgacaggccgagagcggatggactacatgaaacgcaagagccgcgagtatgagcagctcaagagcgagtgggcccagcgagcgaaccctgaggacctggaattcatccgcagcacggtcctcaaggatgtactgcgcactgaccgggcccacccctactatgcggggcctgaggatggcccacatctacgggcgctgcacgacctgctcaccacctatgccgttacccacccacaggtgtcctactgccagggcatgagtgaccttgcctcacccatcctcgctgtcatggaccatgagggccatgcctttgtttgcttttgtggcatcatgaaacgcctggccgccaacttccaccctgacggccgcgccatggccaccaagtttgcacacttgaagctgttgctgcgacacgctgaccctgacttttatcaatacctgcaagaggcaggcgctgatgacctcttcttctgttaccgctggctgctgctggaactcaagcgtgagttcgccttcgacgatgccctccgcatgcttgaggtcacttggagttcgctgccccctgatcctcctgaacatgaggtagagctggttggaccccccagccaagtggcagacgctggttttggtggccacagggggtggcccgtgcgacagaggcacatgctgaggcctgctggtggaggaggtagtacctttgaagatgctgttgaccacctggccacagccagtcaggggcctggtggtggggggcgtctcctgagacaggccagcttggatggcctccagcaactcagggataacatgggctccaggagggaccctctggtccagctgccccacccagctgcccttatcagctccaagtccctctctgagcctttattgaactccccagacccactgctctcctccttttcccaccctgattccccatcttcctcatctccaccatccacccaggaggcctctcccactggtgatatggctgtaggatcccccttgatgcaagaggtaggctccccgaaagaccctggaaagtccctgccacctgtaccaccaatgggcctgcccccaccccaggagtttggccgggggaacccattcatgctgttcctctgcctggccatcctgctggagcaccgcgaccacatcatgcgcaatgggctggattataatgagctggccatgcactttgaccgccttgtgcgaaaacaccacctggggcgcgtcctgcgccgggctagggctctctttgctgattacctgcagtcagaggtgtgggactcagaggagggggctgaggccacagccgcatcttgatcaggctttctcaagccctccatcggccccaccagatctccattctttgccatgagggccaacacatgagaccccacctccctccctgcctgccagccctagacttgttggagcatagag

SEQ ID NO: 31098 - DNA, 1899 bp, Homo sapiens
  source 1..1899: mol_type = unassigned DNA
gcagttacacacaggcagtggtatctgtgagcagctctgtggactcaaaggttttctccctgagaggcatgacccaggccagctgattcatcagaatcaggatggacgtggtagaggtcgcgggcagttggtgggcacaagagcgagaggacatcattatgaaatacgaaaagggacaccgagctgggctgccagaggacaaggggcctaagccttttcgaagctacaacaacaacgtcgatcatttggggattgtacatgagacggagctgcctcctctgactgcgcgggaggcgaagcaaattcggcgggagatcagccgaaagagcaagtgggtggatatgctgggagactgggagaaatacaaaagcagcagaaagctcatagatcgagcgtacaagggaatgcccatgaacatccggggcccgatgtggtcagtcctcctgaacattgaggaaatgaagttgaaaaaccccggaagataccagatcatgaaggagaagggcaagaggtcatctgagcacatccagcgcatcgaccgggacgtaagcgggacattaaggaagcatatattcttcagggatcgatacggaaccaagcagcgggaactactccacatcctcctggcatatgaggagtataacccggaggtgggctactgcagggacctgagccacatcgccgccttgttcctcctctatcttcctgaggaggatgcattctgggcactggtgcagctgctggccagtgagaggcactccctgcagggatttcacagcccaaatggcgggaccgtccaggggctccaagaccaacaggagcatgtggtagccacgtcacaacccaagaccatggggcatcagagcgcctcacgaagacgtccaggtgtggcccgtgggcacgtttttgcaaccggttcgttgatacctgggccagggatgaggacactgtgctcaagcatcttagggcctctatgaagaaactaacaagaaagcagggggacctgccacccccagccaaacccgagcaagggtcgtcggcatccaggcctgtgccggcttcacgtggcgggaagaccctctgcaagggggacaggcaggcccctccaggcccaccagcccggttcccgcggcccatttggtcagcttccccgccacgggcacctcgttcttccacaccctgtcctggtggggctgtccgggaagacacctaccctgtgggcactcagggtgtgcccagcccggccctggctcagggaggacctcagggttcctggagattcctgcagtggaactccatgccccgcctcccaacggacctggacgtagagggcccttggttccgccattatgatttcagacagagctgctgggtccgtgccatatcccaggaggaccagctggccccctgctggcaggctgaacaccctgcggagcgggtgagatcggctttcgctgcacccagcactgattccgaccagggcacccccttcagagctagggacgaacagccgtgtgctcccacctcagggccttgcctctgcggcctccacttggaaagttctcagttccctccaggcttctagaagcatctgggccagggctcatggctggataatttccctaggcttaacaacccaagcaagcttcgcatcctcgttttatttttggttaaacttatgaaaatgtattaagaaagagtgcagctcgagagagattcagagatggaacacaccagaccccagatcacaaagccaaccatgcccagcccctcccagcacccccagccccacgaccatcgttctgaattctgacgacaccgtgagcctgcctttgtacttcaaactcatggaaggataaccaccttcatgttttgaaataaatgtttcctgttgaaatg

SEQ ID NO: 31099 - DNA, 2122 bp, Homo sapiens
  source 1..2122: mol_type = unassigned DNA
gaatgtcactggtgcttagcacctatctgctctctggcctgcctcagtggtctacagcagttacacacaggcagtggtatctgtgagcagctctgtggactcaaaggttttctccctgagaggcatgacccaggccagctgattcatcagaatcaggatggacgtggtagaggtcgcgggcagttggtgggcacaagagcgagaggacatcattatgaaatacgaaaagggacaccgagctgggctgccagaggacaaggggcctaagccttttcgaagctacaacaacaacgtcgatcatttggggattgtacatgagacggagctgcctcctctgactgcgcgggaggcgaagcaaattcggcgggagatcagccgaaagagcaagtgggtggatatgctgggagactgggagaaatacaaaagcagcagaaagctcatagatcgagcgtacaagggaatgcccatgaacatccggggcccgatgtggtcagtcctcctgaacattgaggaaatgaagttgaaaaaccccggaagataccagatcatgaaggagaagggcaagaggtcatctgagcacatccagcgcatcgaccgggacgtaagcgggacattaaggaagcatatattcttcagggatcgatacggaaccaagcagcgggaactactccacatcctcctggcatatgaggagtataacccggaggtgggctactgcagggacctgagccacatcgccgccttgttcctcctctatcttcctgaggaggatgcattctgggcactggtgcagctgctggccagtgagaggcactccctgcagggatttcacagcccaaatggcgggaccgtccaggggctccaagaccaacaggagcatgtggtagccacgtcacaacccaagaccatggggcatcaggacaagaaagatctatgtgggcagtgttccccgttaggctgcctcatccggatattgattgacgggatctctctcgggctcaccctgcgcctgtgggacgtgtatctggtagaaggcgaacaggcgttgatgccgataacaagaatcgcctttaaggttcagcagaagcgcctcacgaagacgtccaggtgtggcccgtgggcacgtttttgcaaccggttcgttgatacctgggccagggatgaggacactgtgctcaagcatcttagggcctctatgaagaaactaacaagaaagcagggggacctgccacccccagccaaacccgagcaagggtcgtcggcatccaggcctgtgccggcttcacgtggcgggaagaccctctgcaagggggacaggcaggcccctccaggcccaccagcccggttcccgcggcccatttggtcagcttccccgccacgggcacctcgttcttccacaccctgtcctggtggggctgtccgggaagacacctaccctgtgggcactcagggtgtgcccagcccggccctggctcagggaggacctcagggttcctggagattcctgcagtggaactccatgccccgcctcccaacggacctggacgtagagggcccttggttccgccattatgatttcagacagagctgctgggtccgtgccatatcccaggaggaccagctggccccctgctggcaggctgaacaccctgcggagcgggtgagatcggctttcgctgcacccagcactgattccgaccagggcacccccttcagagctagggacgaacagccgtgtgctcccacctcagggccttgcctctgcggcctccacttggaaagttctcagttccctccaggcttctagaagcatctgggccagggctcatggctggataatttccctaggcttaacaacccaagcaagcttcgcatcctcgttttatttttggttaaacttatgaaaatgtattaagaaagagtgcagctcgagagagattcagagatggaacacaccagaccccagatcacaaagccaaccatgcccagcccctcccagcacccccagccccacgaccatcgttctgaattctgacgacaccgtgagcctgcctttgtacttcaaactcatggaaggataaccaccttcatgttttgaaataaatgtttcctgttgaaatga

SEQ ID NO: 31100 - DNA, 1876 bp, Homo sapiens
  source 1..1876: mol_type = unassigned DNA
agttacacacaggcagtggtatctgtgagcagctctgtggactcaaaggttttctccctgagaggcatgacccaggccagctgattcatcagaatcaggatggacgtggtagaggtcgcgggcagttggtgggcacaagagcgagaggacatcattatgaaatacgaaaagggacaccgagctgggctgccagaggacaaggggcctaagccttttcgaagctacaacaacaacgtcgatcatttggggattgtacatgagacggagctgcctcctctgactgcgcgggaggcgaagcaaattcggcgggagatcagccgaaagagcaagtgggtggatatgctgggagactgggagaaatacaaaagcagcagaaagctcatagatcgagcgtacaagggaatgcccatgaacatccggggcccgatgtggtcagtcctcctgaacattgaggaaatgaagttgaaaaaccccggaagataccagatcatgaaggagaagggcaagaggtcatctgagcacatccagcgcatcgaccgggacgtaagcgggacattaaggaagcatatattcttcagggatttcacagcccaaatggcgggaccgtccaggggctccaagaccaacaggagcatgtggtagccacgtcacaacccaagaccatggggcatcaggacaagaaagatctatgtgggcagtgttccccgttaggctgcctcatccggatattgattgacgggatctctctcgggctcaccctgcgcctgtgggacgtgtatctggtagaaggcgaacaggcgttgatgccgataacaagaatcgcctttaaggttcagcagaagcgcctcacgaagacgtccaggtgtggcccgtgggcacgtttttgcaaccggttcgttgatacctgggccagggatgaggacactgtgctcaagcatcttagggcctctatgaagaaactaacaagaaagcagggggacctgccacccccagccaaacccgagcaagggtcgtcggcatccaggcctgtgccggcttcacgtggcgggaagaccctctgcaagggggacaggcaggcccctccaggcccaccagcccggttcccgcggcccatttggtcagcttccccgccacgggcacctcgttcttccacaccctgtcctggtggggctgtccgggaagacacctaccctgtgggcactcagggtgtgcccagcccggccctggctcagggaggacctcagggttcctggagattcctgcagtggaactccatgccccgcctcccaacggacctggacgtagagggcccttggttccgccattatgatttcagacagagctgctgggtccgtgccatatcccaggaggaccagctggccccctgctggcaggctgaacaccctgcggagcgggtgagatcggctttcgctgcacccagcactgattccgaccagggcacccccttcagagctagggacgaacagccgtgtgctcccacctcagggccttgcctctgcggcctccacttggaaagttctcagttccctccaggcttctagaagcatctgggccagggctcatggctggataatttccctaggcttaacaacccaagcaagcttcgcatcctcgttttatttttggttaaacttatgaaaatgtattaagaaagagtgcagctcgagagagattcagagatggaacacaccagaccccagatcacaaagccaaccatgcccagcccctcccagcacccccagccccacgaccatcgttctgaattctgacgacaccgtgagcctgcctttgtacttcaaactcatggaaggataaccaccttcatgttttgaaataaatgtttcctgttgaaatg

SEQ ID NO: 31101 - DNA, 2647 bp, Homo sapiens
  source 1..2647: mol_type = unassigned DNA
cttttgcctcgagtattcccaggagggacggtccatccagctgttctccaggaccaaggacccactgttcttcctcagtgacccaggaaaatgaagcctcctcctgttgggacggctcagaatggtggactccacagtccctccgcgagagacgtggtttccatgcgtacaatagatcttcctcatcccccaaacccaacaccctcctgctcaacaggcgttattcctaaagtggcttcactgttcagactgaagagccacggtagccaaagtgatgagcggagtagaaccgagcagtcgggagagatcttgttccctgtaggaaactgggcatcgctgaggccctgagcatcccaggaggccgattgcacagagacctctggtcgctgaccccagtctgcctccacatccctggaatagcccatcatgggcccttcacccttggcaggtggaaaccattcaacctgctggggccggtgtgtccccatttcatggcattgggggacaacaggattctctgtctaggtcccactgtactcaagtccttgggaagatgcccacccctgcttgggacttgagactccagagactggagcagctgtgggccactgggtctggcccctttttccctgggggcggcggtggaatgggggttacgcagccagccagcatctgggagcccggcgagagcggttcaggtgttctccgaagccgccgcgtacagtgtgacctttagacaattctgtctcacaggatggacgtggtagaggtcgcgggcagttggtgggcacaagagcgagaggacatcattatgaaatacgaaaagggacaccgagctgggctgccagaggacaaggggcctaagccttttcgaagctacaacaacaacgtcgatcatttggggattgtacatgagacggagctgcctcctctgactgcgcgggaggcgaagcaaattcggcgggagatcagccgaaagagcaagtgggtggatatgctgggagactgggagaaatacaaaagcagcagaaagctcatagatcgagcgtacaagggaatgcccatgaacatccggggcccgatgtggtcagtcctcctgaacattgaggaaatgaagttgaaaaaccccggaagataccagatcatgaaggagaagggcaagaggtcatctgagcacatccagcgcatcgaccgggacgtaagcgggacattaaggaagcatatattcttcagggatcgatacggaaccaagcagcgggaactactccacatcctcctggcatatgaggagtataacccggaggtgggctactgcagggacctgagccacatcgccgccttgttcctcctctatcttcctgaggaggatgcattctgggcactggtgcagctgctggccagtgagaggcactccctgcagggatttcacagcccaaatggcgggaccgtccaggggctccaagaccaacaggagcatgtggtagccacgtcacaacccaagaccatggggcatcagatctctctcgggctcaccctgcgcctgtgggacgtgtatctggtagaaggcgaacaggcgttgatgccgataacaagaatcgcctttaaggttcagcagaagcgcctcacgaagacgtccaggtgtggcccgtgggcacgtttttgcaaccggttcgttgatacctgggccagggatgaggacactgtgctcaagcatcttagggcctctatgaagaaactaacaagaaagcagggggacctgccacccccagccaaacccgagcaagggtcgtcggcatccaggcctgtgccggcttcacgtggcgggaagaccctctgcaagggggacaggcaggcccctccaggcccaccagcccggttcccgcggcccatttggtcagcttccccgccacgggcacctcgttcttccacaccctgtcctggtggggctgtccgggaagacacctaccctgtgggcactcagggtgtgcccagcccggccctggctcagggaggacctcagggttcctggagattcctgcagtggaactccatgccccgcctcccaacggacctggacgtagagggcccttggttccgccattatgatttcagacagagctgctgggtccgtgccatatcccaggaggaccagctggccccctgctggcaggctgaacaccctgcggagcgggtgagatcggctttcgctgcacccagcactgattccgaccagggcacccccttcagagctagggacgaacagccgtgtgctcccacctcagggccttgcctctgcggcctccacttggaaagttctcagttccctccaggcttctagaagcatctgggccagggctcatggctggataatttccctaggcttaacaacccaagcaagcttcgcatcctcgttttatttttggttaaacttatgaaaatgtattaagaaagagtgcagctcgagagagattcagagatggaacacaccagaccccagatcacaaagccaaccatgcccagcccctcccagcacccccagccccacgaccatcgttctgaattctgacgacaccgtgagcctgcctttgtacttcaaactcatggaaggataaccaccttcatgttttgaaataaatgtttcctgttg

SEQ ID NO: 31102 - DNA, 2448 bp, Homo sapiens
  source 1..2448: mol_type = unassigned DNA
ttgtgaaggtgccatggagaactgggaccttgttacttatagggagactgcattgcttattgatccaaaaaattcctgttcttcatcccgccagtgggttgctctggttgtgggacatgaacttgcccatcaatggtttggaaatcttgttactatggaatggtggactcatctttggttaaatgaaggttttgcatcctggattgaatatctgtgtgtagaccactgcttcccagagtatgatatttggactcagtttgtttctgctgattacacccgtgcccaggagcttgacgccttagataacagccatcctattgaagtcagtgtgggccatccatctgaggttgatgagatatttgatgctatatcatatagcaaaggtgcatctgtcatccgaatgctgcatgactacattggggataaggactttaagaaaggaatgaacatgtatttaaccaagttccaacaaaagaatgctgccgcaggatggacgtggtagaggtcgcgggcagttggtgggcacaagagcgagaggacatcattatgaaatacgaaaagggacaccgagctgggctgccagaggacaaggggcctaagccttttcgaagctacaacaacaacgtcgatcatttggggattgtacatgagacggagctgcctcctctgactgcgcgggaggcgaagcaaattcggcgggagatcagccgaaagagcaagtgggtggatatgctgggagactgggagaaatacaaaagcagcagaaagctcatagatcgagcgtacaagggaatgcccatgaacatccggggcccgatgtggtcagtcctcctgaacattgaggaaatgaagttgaaaaaccccggaagataccagatcatgaaggagaagggcaagaggtcatctgagcacatccagcgcatcgaccgggacgtaagcgggacattaaggaagcatatattcttcagggatcgatacggaaccaagcagcgggaactactccacatcctcctggcatatgaggagtataacccggaggtgggctactgcagggacctgagccacatcgccgccttgttcctcctctatcttcctgaggaggatgcattctgggcactggtgcagctgctggccagtgagaggcactccctgcagggatttcacagcccaaatggcgggaccgtccaggggctccaagaccaacaggagcatgtggtagccacgtcacaacccaagaccatggggcatcaggacaagaaagatctatgtgggcagtgttccccgttaggctgcctcatccggatattgattgacgggatctctctcgggctcaccctgcgcctgtgggacgtgtatctggtagaaggcgaacaggcgttgatgccgataacaagaatcgcctttaaggttcagcagaagcgcctcacgaagacgtccaggtgtggcccgtgggcacgtttttgcaaccggttcgttgatacctgggccagggatgaggacactgtgctcaagcatcttagggcctctatgaagaaactaacaagaaagcagggggacctgccacccccagccaaacccgagcaagggtcgtcggcatccaggcctgtgccggcttcacgtggcgggaagaccctctgcaagggggacaggcaggcccctccaggcccaccagcccggttcccgcggcccatttggtcagcttccccgccacgggcacctcgttcttccacaccctgtcctggtggggctgtccgggaagacacctaccctgtgggcactcagggtgtgcccagcccggccctggctcagggaggacctcagggttcctggagattcctgcagtggaactccatgccccgcctcccaacggacctggacgtagagggcccttggttccgccattatgatttcagacagagctgctgggtccgtgccatatcccaggaggaccagctggccccctgctggcaggctgaacaccctgcggagcgggtgagatcggctttcgctgcacccagcactgattccgaccagggcacccccttcagagctagggacgaacagccgtgtgctcccacctcagggccttgcctctgcggcctccacttggaaagttctcagttccctccaggcttctagaagcatctgggccagggctcatggctggataatttccctaggcttaacaacccaagcaagcttcgcatcctcgttttatttttggttaaacttatgaaaatgtattaagaaagagtgcagctcgagagagattcagagatggaacacaccagaccccagatcacaaagccaaccatgcccagcccctcccagcacccccagccccacgaccatcgttctgaattctgacgacaccgtgagcctgcctttgtacttcaaactcatggaaggataaccaccttcatgttttgaaataaatgtttcctgttg

SEQ ID NO: 31103 - DNA, 2581 bp, Homo sapiens
  source 1..2581: mol_type = unassigned DNA
cttttgcctcgagtattcccaggagggacggtccatccagctgttctccaggaccaaggacccactgttcttcctcagtgacccaggaaaatgaagcctcctcctgttgggacggctcagaatggtggactccacagtccctccgcgagagacgtggtttccatgcgtacaatagatcttcctcatcccccaaacccaacaccctcctgctcaacaggcgttattcctaaagtggcttcactgttcagactgaagagccacggtagccaaagtgatgagcggagtagaaccgagcagtcgggagagatcttgttccctgtaggaaactgggcatcgctgaggccctgagcatcccaggaggccgattgcacagagacctctggtcgctgaccccagtctgcctccacatccctggaatagcccatcatgggcccttcacccttggcaggtggaaaccattcaacctgctggggccggtgtgtccccatttcatggcattgggggacaacaggattctctgtctaggtcccactgtactcaagtccttgggaagatgcccacccctgcttgggacttgagactccagagactggagcagctgtgggccactgggtctggcccctttttccctgggggcggcggtggaatgggggttacgcagccagccagcatctgggagcccggcgagagcggttcaggtgttctccgaagccgccgcgtacagtgtgacctttagacaattctgtctcacaggatggacgtggtagaggtcgcgggtagttggtgggcacaagagcgagaggacatcattatgaaatacgaaaagggacaccgagctgggctgccagaggacaaggggcctaagccttttcgaagctacaacaacaacgtcgatcatttggggattgtacatgagacggagctgcctcctctgactgcgcgggaggcgaagcaaattcggcgggagatcagccgaaagagcaagtgggtggatatgctgggagactgggagaaatacaaaagcagcagaaagctcatagatcgagcgtacaagggaatgcccatgaacatccggggcccgatgtggtcagtcctcctgaacattgaggaaatgaagttgaaaaaccccggaagataccagatcatgaaggagaagggcaagaggtcatctgagcacatccagcgcatcgaccgggacataagcgggacattaaggaagcatatgttcttcagggatcgatacggaaccaagcagcgggaactactccacatcctcctggcatatgaggagtataacccggaggtgggctactgcagggacctgagccacatcgccgccttgttcctcctctattttcctgaggaggatgcattctgggcactggtgcagctgctggccagtgagaggcactccctgcagggatttcacagcccaaatggcgggaccgtccaggggctccaagaccaacaggagcatgtggtagccacgtcacaatccaagaccatggggcatcagatctctctcgggctcaccctgcgcctgtgggacgtgtatctggtagaaggcgaacaggcgttgatgccgataacaagaatcgcctttaaggttcagcagaagcgcctcacgaagacgtccaggtgtggcccgtgggcacgtttttgcaaccggttcgttgatacctgggccagggatgaggacactgtgctcaagcatcttagggcctctatgaagaaactaacaagaaagcagggggacctgccacccccagccaaacccgagcaagggtcgtcggcatccaggcctgtgccggcttcacgtggcgggaagaccctctgcaagggggacaggcaggcccctccaggcccaccagcccggttcccgcggcccatttggtcagcttccccgccacgggcacctcgttcttccacaccctgtcctggtggggctgtccgggaagacacctaccctgtgggcactcagggtgtgcccagcccggccctggctcagggaggacctcagggttcctggagattcctgcagtggaactccatgccccgcctcccaacggacctggacgtagagggcccttggttccgccattatgatttcagacagagctgctgggtccgtgccatatcccaggaggaccagctggccccctgctggcaggctgaacaccctgcggagcgggtgagatcggctttcgctgcacccagcactgattccgaccagggcacccccttcagagctagggacgaacagcagtatgctcccacctcagggccttgcctctgcggcctccacttggaaagttctcagttccctccaggcttctagaagcatctgggccagggctcatggctggataatttccctaggcttaacaacccaagcaagcttcgcgtcctcgttttatttttggttaaacttatgaaaatgtattaagaaagagtgcagctcgagagagattcagagatggaacacaccagaccccagatcacaaagccaaccatgcccagcccctcccagcacccccagccccacgaccatcgttctgaattctgacgacaccgtgagcct

SEQ ID NO: 31104 - DNA, 1964 bp, Homo sapiens
  source 1..1964: mol_type = unassigned DNA
atggacgtggtagaggtcgcgggtagttggtgggcacaagagcgagaggacatcattatgaaatacgaaaagggacaccgagctgggctgccagaggacaaggggcctaagccttttcgaagctacaacaacaacgtcgatcatttggggattgtacatgagacggagctgcctcctctgactgcgcgggaggcgaagcaaattcggcgggagatcagccgaaagagcaagtgggtggatatgctgggagactgggagaaatacaaaagcagcagaaagctcatagatcgagcgtacaagggaatgcccatgaacatccggggcccgatgtggtcagtcctcctgaacattgaggaaatgaagttgaaaaaccccggaagataccagatcatgaaggagaagggcaagaggtcatctgagcacatccagcgcatcgaccgggacataagcgggacattaaggaagcatatgttcttcagggatcgatacggaaccaagcagcgggaactactccacatcctcctggcatatgaggagtataacccggaggtgggctactgcagggacctgagccacatcgccgccttgttcctcctctattttcctgaggaggatgcattctgggcactggtgcagctgctggccagtgagaggcactccctgcagggatttcacagcccaaatggcgggaccgtccaggggctccaagaccaacaggagcatgtggtagccacgtcacaatccaagaccatggggcatcaggacaagaaagatctatgtgggcagtgttccccgttaggctgcctcatccggatattgattgacgggatctctctcgggctcaccctgcgcctgtgggacgtgtatctggtagaaggcgaacaggcgttgatgccgataacaagaatcgcctttaaggttcagcagaagcgcctcacgaagacgtccaggtgtggcccgtgggcacgtttttgcaaccggttcgttgatacctgggccagggatgaggacactgtgctcaagcatcttagggcctctatgaagaaactaacaagaaagcagggggacctgccacccccagccaaacccgagcaagggtcgtcggcatccaggcctgtgccggcttcacgtggcgggaagaccctctgcaagggggacaggcaggcccctccaggcccaccagcccggttcccgcggcccatttggtcagcttccccgccacgggcacctcgttcttccacaccctgtcctggtggggctgtccgggaagacacctaccctgtgggcactcagggtgtgcccagcccggccctggctcagggaggacctcagggttcctggagattcctgcagtggaactccatgccccgcctcccaacggacctggacgtagagggcccttggttccgccattatgatttcagacagagctgctgggtccgtgccatatcccaggaggaccagctggccccctgctggcaggctgaacaccctgcggagcgggtgagatcggctttcgctgcacccagcactgattccgaccagggcacccccttcagagctagggacgaacagcagtatgctcccacctcagggccttgcctctgcggcctccacttggaaagttctcagttccctccaggcttctagaagcatctgggccagggctcatggctggataatttccctaggcttaacaacccaagcaagcttcgcgtcctcgttttatttttggttaaacttatgaaaatgtattaagaaagagtgcagctcgagagagattcagagatggaacacaccagaccccagatcacaaagccaaccatgcccagcccctcccagcacccccagccccacgaccatcgttctgaattctgacgacaccgtgagcctgcctttgtactttaaactcatggaaggataactaccttcacgttttgaaataaatgtttcctgttgaaatg

SEQ ID NO: 31105 - DNA, 2039 bp, Homo sapiens
  source 1..2039: mol_type = unassigned DNA
gtgcttagcacctatctgctctctggcctgcgtcagtggtctacagcagttacacacaggcagtggtatctgtgagcagctctgtggactcaaaggttttctccctgagaggcatgacccaggccagctgattcatcagaatcaggatggacgtggtagaggtcgcgggtagttggtgggcacaagagcgagaggacatcattatgaaatacgaaaagggacaccgagctgggctgccagaggacaaggggcctaagccttttcgaagctacaacaacaacgtcgatcatttggggattgtacatgagacggagctgcctcctctgactgcgcgggaggcgaagcaaattcggcgggagatcagccgaaagagcaagtgggtggatatgctgggagactgggagaaatacaaaagcagcagaaagctcatagatcgagcgtacaagggaatgcccatgaacatccggggcccgatgtggtcagtcctcctgaacattgaggaaatgaagttgaaaaaccccggaagataccagatcatgaaggagaagggcaagaggtcatctgagcacatccagcgcatcgaccgggacataagcgggacattaaggaagcatatgttcttcagggatcgatacggaaccaagcagcgggaactactccacatcctcctggcatatgaggagtataacccggaggtgggctactgcagggacctgagccacatcgccgccttgttcctcctctattttcctgaggaggatgcattctgggcactggtgcagctgctggccagtgagaggcactccctgcagggatttcacagcccaaatggcgggaccgtccaggggctccaagaccaacaggagcatgtggtagccacgtcacaatccaagaccatggggcatcaggacaagaaagatctatgtgggcagtgttccccgttaggctgcctcatccggatattgattgacgggatctctctcgggctcaccctgcgcctgtgggacgtgtatctggtagaaggcgaacaggcgttgatgccgataacaagaatcgcctttaaggttcagcagaagcgcctcacgaagacgtccaggtgtggcccgtgggcacgtttttgcaaccggttcgttgatacctgggccagggatgaggacactgtgctcaagcatcttagggcctctatgaagaaactaacaagaaagcagggggacctgccacccccagccaaacccgagcaagggtcgtcggcatccaggcctgtgccggcttcacgtggcgggaagaccctctgcaagggggacaggcaggcccctccaggcccaccagcccggttcccgcggcccatttggtcagcttccccgccacgggcacctcgttcttccacaccctgtcctggtggggctgtccgggaagacacctaccctgtgggcactcagggtgtgcccagcccggccctggctcagggaggacctcagggttcctggagattcctgcagtggaactccatgccccgcctcccaacggacctggacgtagagggcccttggttccgccattatgatttcagacagagctgctgggtccgtgccatatcccaggaggaccagctggccccctgctggcaggctgaacaccctgcggagcgggtgagatcggctttcgctgcacccagcactgattccgaccagggcacccccttcagagctagggacgaacagcagtatgctcccacctcagggccttgcctctgcggcctccacttggaaagttctcagttccctccaggcttctagaagcatctgggccagggctcatggctggataatttccctaggcttaacaacccaagcaagcttcgcgtcctcgttttatttttggttaaacttatgaaaatgtattaagaaagagtgcagctcgagagagattcagagatggaacacaccagaccccagatcacaaagccaaccatgcccagcccctcccagcacccccagccccacgaccatcgttctgaattctgacgacaccgtgagcct

SEQ ID NO: 31106 - DNA, 2305 bp, Homo sapiens
  source 1..2305: mol_type = unassigned DNA
gaatgtcactggtgcttagcacctgtctgctctctggcctgcctcagtggtctacagcagttacacacaggcagtggtatctgtgagcagctctgtggactcaaaggttttctccctgagaggcatgacccaggccagctgattcatcagaatcaggatggacgtggtagaggtcgcgggcagttggtgggcacaagagcgagaggacatcattatgaaatacgaaaagggacaccgagctgggctgccagaggacaaggggcctaagccttttcgaagctacaacaacaacgtcgatcatttggggattgtacatgagacggagctgcctcctctgactgcgcgggaggcgaagcaaattcggcgggagatcagccgaaagagcaagtgggtggatatgctgggagactgggagaaatacaaaagcagcagaaagctcatagatcgagcgtacaagggaatgcccatgaacatccggggcccgatgtggtcagtcctcctgaacattgaggaaatgaagttgaaaaaccccggaagataccagatcatgaaggagaagggcaagaggtcatctgagcacatccagcgcatcgaccgggacataagcgggacattaaggaagcatatgttcttcagggatcgatacggaaccaagcagcgggaactactccacatcctcctggcatatgaggagtataacccggaggtgggctactgcagggacctgagccacatcgccgccttgttcctcctctatcttcctgaggaggatgcattctgggcactggtgcagctgctggccagtgagaggcactccctgcagggatttcacagcccaaatggcgggaccgtccaggggctccaagaccaacaggagcatgtggtagccacgtcacaatccaagaccatggggcatcaggacaagaaagatctatgtgggcagtgttccccgttaggctgcctcatccggatattgattgacgggatctctctcgggctcaccctgcgcctgtgggacgtgtatctggtagaaggcgaacaggcgttgatgccgataacaagaatcgcctttaaggttcagcagaagcgcctcacgaagacgtccaggtgtggcccgtgggcacgtttttgcaaccggttcgttgatacctgggccagggatgaggacactgtgctcaagcatcttagggcctctatgaagaaactaacaagaaagcagggggacctgccacccccagccaaacccgagcaagggtcgtcggcatccaggcctgtgccggcttcacgtggcgggaagaccctctgcaagggggacaggcaggcccctccaggcccaccagcctggttcccgcggcccatttggtcagcttccccgccacgggcacctcgttcttccacaccctgtcctggtggggctgtccgggaagacacctaccctgtgggcactcagggtgtgcccagcccggccctggctcagggaggacctcagggttcctggagattcctgcagtggaactccatgccccgcctcccaacggacctggacgtagagggcccttggttccgccattatgatttcagacagagctgctgggtccgtgccatatcccaggaggaccagctggccccctgctggcaggctgaacaccctgcggagcgggtgagatcggctttcgctgcacccagcactgattccgaccagggcacccccttcagagctagggacgaacagcagtgtgctcccacctcagggccttgcctctgcggcctccacttggaaagttctcagttccctccaggcttctagaagcatctgggccagggctcatggctggataatttccctaggcttaacaacccaagcaagcttcgcatcctcgttttatttttggttaaacttatgaaaatgtattaagaaagagtgcagctcgagagagattcagagatggaacacaccagaccccagatcacaaagccaaccatgcccagcccctcccagcacccccagccccacgaccatcgttctgaattctgacgacaccgtgagcctgcctttgtacttcaaactcatggaaggataaccaccttcatgttttgaaataaatgtttcctgttgaaatgattttagattttagacagaaatattgaaaaggcactatagtatcctcctataccttccatccagctgcccctaataatgatgttttgcagtcccatggcacataagaaatttaggccgggtgtggtggctcacacctgtaatcccagcaatttgagaggtcgaggcgggaggttcaggttcact

SEQ ID NO: 31107 - DNA, 2647 bp, Homo sapiens
  source 1..2647: mol_type = unassigned DNA
cttttgcctcgagtattcccaggagggacggtccatccagctgttctccaggaccaaggacccactgttcttcctcagtgacccaggaaaatgaagcctcctcctgttgggacggctcagaatggtggactccacagtccctccgcgagagacgtggtttccatgcgtacaatagatcttcctcatcccccaaacccaacaccctcctgctcaacaggcgttattcctaaagtggcttcactgttcagactgaagagccacggtagccaaagtgatgagcggagtagaaccgagcagtcgggagagatcttgttccctgtaggaaactgggcatcgctgaggccctgagcatcccaggaggccgattgcacagagacctctggtcgctgaccccagtctgcctccacatccctggaatagcccatcatgggcccttcacccttggcaggtggaaaccattcaacctgctggggccggtgtgtccccatttcatggcattgggggacaacaggattctctgtctaggtcccactgtactcaagtccttgggaagatgcccacccctgcttgggacttgagactccagagactggagcagctgtgggccactgggtctggcccctttttccctgggggcggcggtggaatgggggttacgcagccagccagcatctgggagcccggcgagagcggttcaggtgttctccgaagccgccgcgtacagtgtgacctttagacaattctgtctcacaggatggacgtggtagaggtcgcgggcagttggtgggcacaagagcgagaggacatcattatgaaatacgaaaagggacaccgagctgggctgccagaggacaaggggcctaagccttttcgaagctacaacaacaacgtcgatcatttggggattgtacatgagacggagctgcctcctctgactgcgcgggaggcgaagcaaattcggcgggagatcagccgaaagagcaagtgggtggatatgctgggagactgggagaaatacaaaagcagcagaaagctcatagatcgagcgtacaagggaatgcccatgaacatccggggcccgatgtggtcagtcctcctgaacattgaggaaatgaagttgaaaaaccccggaagataccagatcatgaaggagaagggcaagaggtcatctgagcacatccagcgcatcgaccgggacataagcgggacattaaggaagcatatgttcttcagggatcgatacggaaccaagcagcgggaactactccacatcctcctggcatatgaggagtataacccggaggtgggctactgcagggacctgagccacatcgccgccttgttcctcctctatcttcctgaggaggatgcattctgggcactggtgcagctgctggccagtgagaggcactccctgcagggatttcacagcccaaatggcgggaccgtccaggggctccaagaccaacaggagcatgtggtagccacgtcacaatccaagaccatggggcatcagatctctctcgggctcaccctgcgcctgtgggacgtgtatctggtagaaggcgaacaggcgttgatgccgataacaagaatcgcctttaaggttcagcagaagcgcctcacgaagacgtccaggtgtggcccgtgggcacgtttttgcaaccggttcgttgatacctgggccagggatgaggacactgtgctcaagcatcttagggcctctatgaagaaactaacaagaaagcagggggacctgccacccccagccaaacccgagcaagggtcgtcggcatccaggcctgtgccggcttcacgtggcgggaagaccctctgcaagggggacaggcaggcccctccaggcccaccagcctggttcccgcggcccatttggtcagcttccccgccacgggcacctcgttcttccacaccctgtcctggtggggctgtccgggaagacacctaccctgtgggcactcagggtgtgcccagcccggccctggctcagggaggacctcagggttcctggagattcctgcagtggaactccatgccccgcctcccaacggacctggacgtagagggcccttggttccgccattatgatttcagacagagctgctgggtccgtgccatatcccaggaggaccagctggccccctgctggcaggctgaacaccctgcggagcgggtgagatcggctttcgctgcacccagcactgattccgaccagggcacccccttcagagctagggacgaacagcagtgtgctcccacctcagggccttgcctctgcggcctccacttggaaagttctcagttccctccaggcttctagaagcatctgggccagggctcatggctggataatttccctaggcttaacaacccaagcaagcttcgcatcctcgttttatttttggttaaacttatgaaaatgtattaagaaagagtgcagctcgagagagattcagagatggaacacaccagaccccagatcacaaagccaaccatgcccagcccctcccagcacccccagccccacgaccatcgttctgaattctgacgacaccgtgagcctgcctttgtacttcaaactcatggaaggataaccaccttcatgttttgaaataaatgtttcctgttg

SEQ ID NO: 31108 - DNA, 2042 bp, Homo sapiens
  source 1..2042: mol_type = unassigned DNA
ctgtgagcagctctgtggactcaaaggttttctccctgagaggcatgacccaggccagctgattcatcagaatcaggatggacgtggtagaggtcgcgggtagttggtgggcacaagagcgagaggacatcattatgaaatacgaaaagggacaccgagctgggctgccagaggacaaggggcctaagccttttcgaagctacaacaacaacgtcgatcatttggggattgtacatgagacggagctgcctcctctgactgcgcgggaggcgaagcaaattcggcgggagatcagccgaaagagcaagtgggtggatatgctgggagactgggagaaatacaaaagcagcagaaagctcatagatcgagcgtacaagggaatgcccatgaacatccggggcccgatgtggtcagtcctcctgaacattgaggaaatgaagttgaaaaaccccggaagataccagatcatgaaggagaagggcaagaggtcatctgagcacatccagcgcatcgaccgggacataagcgggacattaaggaagcatatgttcttcagggatcgatacggaaccaagcagcgggaactactccacatcctcctggcatatgaggagtataacccggaggtgggctactgcagggacctgagccacatcgccgccttgttcctcctctatcttcctgaggaggatgcattctgggcactggtgcagctgctggccagtgagaggcactccctgcagggatttcacagcccaaatggcgggaccgtccaggggctccaagaccaacaggagcatgtggtagccacgtcacaatccaagaccatggggcatcaggacaagaaagatctatgtgggcagtgttccccgttaggctgcctcatccggatattgattgacgggatctctctcgggctcaccctgcgcctgtgggacgtgtatctggtagaaggcgaacaggcgttgatgccgataacaagaatcgcctttaaggttcagcagaagcgcctcacgaagacgtccaggtgtggcccgtgggcacgtttttgcaaccggttcgttgatacctgggccagggatgaggacactgtgctcaagcatcttagggcctctatgaagaaactaacaagaaagcagggggacctgccacccccagccaaacccgagcaagggtcgtcggcatccaggcctgtgccggcttcacgtggcgggaagaccctctgcaagggggacaggcaggcccctccaggcccaccagcctggttcccgcggcccatttggtcagcttccccgccacgggcacctcgttcttccacaccctgtcctggtggggctgtccgggaagacacctaccctgtgggcactcagggtgtgcccagcccggccctggctcagggaggacctcagggttcctggagattcctgcagtggaactccatgccccgcctcccaacggacctggacgtagagggcccttggttccgccattatgatttcagacagagctgctgggtccgtgccatatcccaggaggaccagctggccccctgctggcaggctgaacaccctgcggagcgggtgagatcggctttcgctgcacccagcactgattccgaccagggcacccccttcagagctagggacgaacagcagtgtgctcccacctcagggccttgcctctgcggcctccacttggaaagttctcagttccctccaggcttctagaagcatctgggccagggctcatggctggataatttccctaggcttaacaacccaagcaagcttcgcatcctcgttttatttttggttaaacttatgaaaatgtattaagaaagagtgcagctcgagagagattcagagatggaacacaccagaccccagatcacaaagccaaccatgcccagcccctcccagcacccccagccccacgaccatcgttctgaattctgacgacaccgtgagcctgcctttgtacttcaaactcatggaaggataaccaccttcatgttttgaaataaatgtttcctgttgaaatga

SEQ ID NO: 31109 - DNA, 2108 bp, Homo sapiens
  source 1..2108: mol_type = unassigned DNA
gtgcttagcacctatctgctctctggcctgcctcagtggtctacagcagttacacacaggcagtggtatctgtgagcagctctgtggactcaaaggttttctccctgagaggcatgacccaggccagctgattcatcagaatcaggatggacgtggtagaggtcgcgggcagttggtgggcacaagagcgagaggacatcattatgaaatacgaaaagggacaccgagctgggctgccagaggacaaggggcctaagccttttcgaagctacaacaacaacgtcgatcatttggggattgtacatgagacggagctgcctcctctgactgcgcgggaggcgaagcaaattcggcgggagatcagccgaaagagcaagtgggtggatatgctgggagactgggagaaatacaaaagcagcagaaagctcatagatcgagcgtacaagggaatgcccatgaacatccggggcccgatgtggtcagtcctcctgaacactgaggaaatgaagttgaaaaaccccggaagataccagatcatgaaggagaagggcaagaggtcatctgagcacatccagcgcatcgaccgggacgtaagcgggacattaaggaagcatatattcttcagggatcgatacggaaccaagcagcgggaactactccacatcctcctggcatatgaggagtataacccggaggtgggctactgcagggacctgagccacatcgccgccttgttcctcctctatcttcctgaggaggatgcattctgggcactggtgcagctgctggccagtgagaggcactccctgcagggatttcacagcccaaatggcgggaccgtccaggggctccaagaccaacaggagcatgtggtagccacgtcacaacccaagaccatggggcatcaggacaagaaagatctatgtgggcagtgttccccgttaggctgcctcatccggatattgattgacgggatctctctcgggctcaccctgcgcctgtgggacgtgtatctggtagaaggcgaacaggcgttgatgccgataacaagaatcgcctttaaggttcagcagaagcgcctcacgaagacgtccaggtgtggcccgtgggcacgtttttgcaaccggttcgttgatacctgggccagggatgaggacactgtgctcaagcatcttagggcctctatgaagaaactaacaagaaagcagggggacctgccacccccagccaaacccgagcaagggtcgtcggcatccaggcctgtgccggcttcacgtggcgggaagaccctctgcaagggggacaggcaggcccctccaggcccaccagcccggttcccgcggcccatttggtcagcttccccgccacgggcacctcgttcttccacaccctgtcctggtggggctgtccgggaagacacctaccctgtgggcactcagggtgtgcccagcccggccctggctcagggaggacctcagggttcctggagattcctgcagtggaactccatgccccgcctcccaacggacctggacgtagagggcccttggttccgccattatgatttcagacagagctgctgggtccgtgccatatcccaggaggaccagctggccccctgctggcaggctgaacaccctgcggagcgggtgagatcggctttcgctgcacccagcactgattccgaccagggcacccccttcagagctagggacgaacagccgtgtgctcccacctcagggccttgcctctgcggcctccacttggaaagttctcagttccctccaggcttctagaagcatctgggccagggctcatggctggataatttccctaggcttaacaacccaagcaagcttcgcatcctcgttttatttttggttaaacttatgaaaatgtattaagaaagagtgcagctcgagagagattcagagatggaacacaccagaccccagatcacaaagccaaccatgcccagcccctcccagcacccccagccccacgaccatcgttctgaattctgacgacaccgtgagcctgcctttgtacttcaaactcatggaaggataaccaccttcatgttttgaaataaatgtttcctgttgaaa

SEQ ID NO: 31110 - DNA, 1899 bp, Homo sapiens
  source 1..1899: mol_type = unassigned DNA
gcagttacacacaggcagtggtatctgtgagcagctctgtggactcaaaggttttctccctgagaggcatgacccaggccagctgattcatcagaatcaggatggacgtggtagaggtcgcgggcagttggtgggcacaagagcgagaggacatcattatgaaatacgaaaagggacaccgagctgggctgccagaggacaaggggcctaagccttttcgaagctacaacaacaacgtcgatcatttggggattgtacatgagacggagctgcctcctctgactgcgcgggaggcgaagcaaattcggcgggagatcagccgaaagagcaagtgggtggatatgctgggagactgggagaaatacaaaagcagcagaaagctcatagatcgagcgtacaagggaatgcccatgaacatccggggcccgatgtggtcagtcctcctgaacactgaggaaatgaagttgaaaaaccccggaagataccagatcatgaaggagaagggcaagaggtcatctgagcacatccagcgcatcgaccgggacgtaagcgggacattaaggaagcatatattcttcagggatcgatacggaaccaagcagcgggaactactccacatcctcctggcatatgaggagtataacccggaggtgggctactgcagggacctgagccacatcgccgccttgttcctcctctatcttcctgaggaggatgcattctgggcactggtgcagctgctggccagtgagaggcactccctgcagggatttcacagcccaaatggcgggaccgtccaggggctccaagaccaacaggagcatgtggtagccacgtcacaacccaagaccatggggcatcagagcgcctcacgaagacgtccaggtgtggcccgtgggcacgtttttgcaaccggttcgttgatacctgggccagggatgaggacactgtgctcaagcatcttagggcctctatgaagaaactaacaagaaagcagggggacctgccacccccagccaaacccgagcaagggtcgtcggcatccaggcctgtgccggcttcacgtggcgggaagaccctctgcaagggggacaggcaggcccctccaggcccaccagcccggttcccgcggcccatttggtcagcttccccgccacgggcacctcgttcttccacaccctgtcctggtggggctgtccgggaagacacctaccctgtgggcactcagggtgtgcccagcccggccctggctcagggaggacctcagggttcctggagattcctgcagtggaactccatgccccgcctcccaacggacctggacgtagagggcccttggttccgccattatgatttcagacagagctgctgggtccgtgccatatcccaggaggaccagctggccccctgctggcaggctgaacaccctgcggagcgggtgagatcggctttcgctgcacccagcactgattccgaccagggcacccccttcagagctagggacgaacagccgtgtgctcccacctcagggccttgcctctgcggcctccacttggaaagttctcagttccctccaggcttctagaagcatctgggccagggctcatggctggataatttccctaggcttaacaacccaagcaagcttcgcatcctcgttttatttttggttaaacttatgaaaatgtattaagaaagagtgcagctcgagagagattcagagatggaacacaccagaccccagatcacaaagccaaccatgcccagcccctcccagcacccccagccccacgaccatcgttctgaattctgacgacaccgtgagcctgcctttgtacttcaaactcatggaaggataaccaccttcatgttttgaaataaatgtttcctgttgaaatg

SEQ ID NO: 31111 - DNA, 1876 bp, Homo sapiens
  source 1..1876: mol_type = unassigned DNA
agttacacacaggcagtggtatctgtgagcagctctgtggactcaaaggttttctccctgagaggcatgacccaggccagctgattcatcagaatcaggatggacgtggtagaggtcgcgggcagttggtgggcacaagagcgagaggacatcattatgaaatacgaaaagggacaccgagctgggctgccagaggacaaggggcctaagccttttcgaagctacaacaacaacgtcgatcatttggggattgtacatgagacggagctgcctcctctgactgcgcgggaggcgaagcaaattcggcgggagatcagccgaaagagcaagtgggtggatatgctgggagactgggagaaatacaaaagcagcagaaagctcatagatcgagcgtacaagggaatgcccatgaacatccggggcccgatgtggtcagtcctcctgaacactgaggaaatgaagttgaaaaaccccggaagataccagatcatgaaggagaagggcaagaggtcatctgagcacatccagcgcatcgaccgggacgtaagcgggacattaaggaagcatatattcttcagggatttcacagcccaaatggcgggaccgtccaggggctccaagaccaacaggagcatgtggtagccacgtcacaacccaagaccatggggcatcaggacaagaaagatctatgtgggcagtgttccccgttaggctgcctcatccggatattgattgacgggatctctctcgggctcaccctgcgcctgtgggacgtgtatctggtagaaggcgaacaggcgttgatgccgataacaagaatcgcctttaaggttcagcagaagcgcctcacgaagacgtccaggtgtggcccgtgggcacgtttttgcaaccggttcgttgatacctgggccagggatgaggacactgtgctcaagcatcttagggcctctatgaagaaactaacaagaaagcagggggacctgccacccccagccaaacccgagcaagggtcgtcggcatccaggcctgtgccggcttcacgtggcgggaagaccctctgcaagggggacaggcaggcccctccaggcccaccagcccggttcccgcggcccatttggtcagcttccccgccacgggcacctcgttcttccacaccctgtcctggtggggctgtccgggaagacacctaccctgtgggcactcagggtgtgcccagcccggccctggctcagggaggacctcagggttcctggagattcctgcagtggaactccatgccccgcctcccaacggacctggacgtagagggcccttggttccgccattatgatttcagacagagctgctgggtccgtgccatatcccaggaggaccagctggccccctgctggcaggctgaacaccctgcggagcgggtgagatcggctttcgctgcacccagcactgattccgaccagggcacccccttcagagctagggacgaacagccgtgtgctcccacctcagggccttgcctctgcggcctccacttggaaagttctcagttccctccaggcttctagaagcatctgggccagggctcatggctggataatttccctaggcttaacaacccaagcaagcttcgcatcctcgttttatttttggttaaacttatgaaaatgtattaagaaagagtgcagctcgagagagattcagagatggaacacaccagaccccagatcacaaagccaaccatgcccagcccctcccagcacccccagccccacgaccatcgttctgaattctgacgacaccgtgagcctgcctttgtacttcaaactcatggaaggataaccaccttcatgttttgaaataaatgtttcctgttgaaatg

SEQ ID NO: 31112 - DNA, 3389 bp, Homo sapiens
  source 1..3389: mol_type = unassigned DNA
gtggggcccatctagggagccggtgggaatggagactgggctaggtcaggcccctgggcgctcagcagttctgtcggcaagtgagcacaagaggagcggggcagcctgagggtctggccctgtctacttggagacaaccccggtgagatgcaagggttatggccacagggtgaggggacgcctggcccagcctcagggctgttgtccagcaggtctctgagggcccacctgcccctgttctcccccattcccctagagctacagccctcactgtcccgtgaggggaaaaggcatggtgacaatgggggctgtagccctaggagaacgggggagaagatgggcagggccccgttctgggcatctcacggtgaggccagggaggcagcagggctcgcggctaaagacctgggtctggtgctgggaagggatctggggccgggtaagaggagcccagccaggagcccatccctcagggatcacaggatggagagacagaggatccctggggaggtagggcgggagggagctgacgagccgtgccacttctgaaacgcagggtgtgtggcccgggtgcagggagaggcaggtggatgctgggaggtcagaacctgcaagggccttggggctgtcaagtggggtgggcccctggtgcagccagagtacaccgggcaggtctcagggcaggctcccttgaccctggcggggggatgtggtcactccctgagggactcctgtcagggcccggtcgcccaccctgggcggcccccatcccatctcagggctaacctttctcagctccagcagaaagcaccacctcgagtccaggacgggcagccccattgggcagcctgaccgccccccacgccaggggccccagtaaccccggccaggctgtccctacactccttcttctcccaggtcctgcccctcctgggagtcagccccacaggaaggcccttgtcctcccttccctgtgccttctcctgggctgagccctgagctggaaagggacagagccagtcctttctgggggtcggcacccaggctggggccgctccaggccccgtgcagttcctcagctctgcctgggttgccttacagtgagacggagctgcctcctctgactgcgcgggaggcgaaggtaagagcctgatgcgtggaggggctggtccagggacgtagggactgggcgggtggtcagtgaggcagaggaagcagctggcctgagcggtggcgggtgagggcaacacgctgtcactgggaggggcagcagtccctgctggacctgaccccaggttgctgttcactttggcagtttgataaaattccaaaaggagaaccacagtcctggcttgggggtggctgcgcgcttgtgtcaggaccccacctagaggctgggacctaagactggtgtgtctgtggcctgaggatggtacatcccggggtcccaaagccagcccactggtgctcatttgctcaaaggctctcagcccttgaggtctgcccttccctggctccttccagctggctcccaccagggctccagagcccaagacccagcatccgcgggcggctctgggaagcctggcagctccgctaactccaacatgcctcatttgacagcaaattcggcgggagatcagccgaaagagcaagtgggtggatatgctgggagactgggagaaatacaaaagcagcagaaagctcatagatcgagcgtacaagggaatgcccatgaacatccggggcccgatgtggtcagtcctcctgaacactgaggaaatgaagttgaaaaaccccggaagataccagatcatgaaggagaagggcaagaggtcatctgagcacatccagcgcatcgaccgggacgtaagcgggacattaaggaagcatatattcttcagggatcgatacggaaccaagcagcgggaactactccacatcctcctggcatatgaggagtataacccggaggtgggctactgcagggacctgagccacatcgccgccttgttcctcctctatcttcctgaggaggatgcattctgggcactggtgcagctgctggccagtgagaggcactccctgcagggatttcacagcccaaatggcgggaccgtccaggggctccaagaccaacaggagcatgtggtagccacgtcacaacccaagaccatggggcatcaggacaagaaagatctatgtgggcagtgttccccgttaggctgcctcatccggatattgattgacgggatctctctcgggctcaccctgcgcctgtgggacgtgtatctggtagaaggcgaacaggcgttgatgccgataacaagaatcgcctttaaggttcagcagaagcgcctcacgaagacgtccaggtgtggcccgtgggcacgtttttgcaaccggttcgttgatacctgggccagggatgaggacactgtgctcaagcatcttagggcctctatgaagaaactaacaagaaagcagggggacctgccacccccagccaaacccgagcaagggtcgtcggcatccaggcctgtgccggcttcacgtggcgggaagaccctctgcaagggggacaggcaggcccctccaggcccaccagcccggttcccgcggcccatttggtcagcttccccgccacgggcacctcgttcttccacaccctgtcctggtggggctgtccgggaagacacctaccctgtgggcactcagggtgtgcccagcccggccctggctcagggaggacctcagggttcctggagattcctgcagtggaactccatgccccgcctcccaacggacctggacgtagagggcccttggttccgccattatgatttcagacagagctgctgggtccgtgccatatcccaggaggaccagctggccccctgctggcaggctgaacaccctgcggagcgggtgagatcggctttcgctgcacccagcactgattccgaccagggcacccccttcagagctagggacgaacagccgtgtgctcccacctcagggccttgcctctgcggcctccacttggaaagttctcagttccctccaggcttctagaagcatctgggccagggctcatggctggataatttccctaggcttaacaacccaagcaagcttcgcatcctcgttttatttttggttaaacttatgaaaatgtattaagaaagagtgcagctcgagagagattcagagatggaacacaccagaccccagatcacaaagccaaccatgcccagcccctcccagcacccccagccccacgaccatcgttctgaattctgacgacaccgtgagcctgcctttgtacttcaaactcatggaaggataaccaccttcatgttttgaaataaatgtttcctgttgaaatg

SEQ ID NO: 31113 - DNA, 2305 bp, Homo sapiens
  source 1..2305: mol_type = unassigned DNA
gaatgtcactggtgcttagcacctatctgctctctggcctgcgtcagtggtctacagcagttacacacaggcagtggtatctgtgagcagctctgtggactcaaaggttttctccctgagaggcatgacccaggccagctgattcatcagaatcaggatggacgtggtagaggtcgcgggtagttggtgggcacaagagcgagaggacatcattatgaaatacgaaaagggacaccgagctgggctgccagaggacaaggggcctaagccttttcgaagctacaacaacaacgtcgatcatttggggattgtacatgagacggagctgcctcctctgactgcgcgggaggcgaagcaaattcggcgggagatcagccgaaagagcaagtgggtggatatgctgggagactgggagaaatacaaaagcagcagaaagctcatagatcgagcgtacaagggaatgcccatgaacatccggggcccgatgtggtcagtcctcctgaacattgaggaaatgaagttgaaaaaccccggaagataccagatcatgaaggagaagggcaagaggtcatctgagcacatccagcgcatcgaccgggacataagcgggacattaaggaagcatatgttcttcagggatcgatacggaaccaagcagcgggaactactccacatcctcctggcatatgaggagtataacccggaggtgggctactgcagggacctgagccacatcgccgccttgttcctcctctatcttcctgaggaggatgcattctgggcactggtgcagctgctggccagtgagaggcactccctgcagggatttcacagcccaaatggcgggaccgtccaggggctccaagaccaacaggagcatgtggtagccacgtcacaacccaagaccatggggcatcaggacaagaaagatctatgtgggcagtgttccccgttaggctgcctcatccggatattgattgacgggatctctctcgggctcaccctgcgcctgtgggacgtgtatctggtagaaggcgaacaggcgttgatgccgataacaagaatcgcctttaaggttcagcagaagcgcctcacgaagacgtccaggtgtggcccgtgggcacgtttttgcaaccggttcgttgatacctgggccagggatgaggacactgtgctcaagcatcttagggcctctatgaagaaactaacaagaaagcagggggacctgccacccccagccaaacccgagcaagggtcgtcggcatccaggcctgtgccagcttcacgtggcgggaagaccctctgcaagggggacaggcaggcccctccaggcccaccagcccggttcccgcggcccatttggtcagcttccccgccacgggcacctcgttcttccacaccctgtcctggtggggctgtccgggaagacacctaccctgtgggcactcagggtgtgcccagcccggccctggctcagggaggacctcagggttcctggagattcctgcagtggaactccatgccccgcctcccaacggacctggacgtagagggcccttggttccgccattatgatttcagacagagctgctgggtccgtgccatatcccaggaggaccagctggccccctgctggcaggctgaacaccctgcggagcgggtgagatcggctttcgctgcacccagcactgattccgaccagggcacccccttcagagctagggacgaacagcagtgtgctcccacctcagggccttgcctctgcggcctccacttggaaagttctcagttccctccaggcttctagaagcatctgggccagggctcatggctggataatttccctaggcttaacaacccaagcaagcttcgcatcctcgttttatttttggttaaacttatgaaaatgtattaagaaagagtgcagctcgagagagattcagagatggaacacaccagaccccagatcacaaagccaaccatgcccagcccctcccagcaccccaagccccacgaccatcgttctgaattctgacgacaccgtgagcctgcctttgtacttcaaactcatggaaggataaccaccttcatgttttgaaataaatgtttcctgttgaaatgattttagattttagacagaaatattgaaaaggcactatagtatcctcctataccttccatccagctgcccctaataatgatgttttgcagtcccatggcacataagaaatttaggccgggtgtggtggctcacacctgtaatcccagcaatttgagaggtcgaggcgggaggttcaggttcact

SEQ ID NO: 31114 - DNA, 2110 bp, Homo sapiens
  source 1..2110: mol_type = unassigned DNA
gtgcttagcacctatctgctctctggcctgcgtcagtggtctacagcagttacacacaggcagtggtatctgtgagcagctctgtggactcaaaggttttctccctgagaggcatgacccaggccagctgattcatcagaatcaggatggacgtggtagaggtcgcgggtagttggtgggcacaagagcgagaggacatcattatgaaatacgaaaagggacaccgagctgggctgccagaggacaaggggcctaagccttttcgaagctacaacaacaacgtcgatcatttggggattgtacatgagacggagctgcctcctctgactgcgcgggaggcgaagcaaattcggcgggagatcagccgaaagagcaagtgggtggatatgctgggagactgggagaaatacaaaagcagcagaaagctcatagatcgagcgtacaagggaatgcccatgaacatccggggcccgatgtggtcagtcctcctgaacattgaggaaatgaagttgaaaaaccccggaagataccagatcatgaaggagaagggcaagaggtcatctgagcacatccagcgcatcgaccgggacataagcgggacattaaggaagcatatgttcttcagggatcgatacggaaccaagcagcgggaactactccacatcctcctggcatatgaggagtataacccggaggtgggctactgcagggacctgagccacatcgccgccttgttcctcctctatcttcctgaggaggatgcattctgggcactggtgcagctgctggccagtgagaggcactccctgcagggatttcacagcccaaatggcgggaccgtccaggggctccaagaccaacaggagcatgtggtagccacgtcacaacccaagaccatggggcatcaggacaagaaagatctatgtgggcagtgttccccgttaggctgcctcatccggatattgattgacgggatctctctcgggctcaccctgcgcctgtgggacgtgtatctggtagaaggcgaacaggcgttgatgccgataacaagaatcgcctttaaggttcagcagaagcgcctcacgaagacgtccaggtgtggcccgtgggcacgtttttgcaaccggttcgttgatacctgggccagggatgaggacactgtgctcaagcatcttagggcctctatgaagaaactaacaagaaagcagggggacctgccacccccagccaaacccgagcaagggtcgtcggcatccaggcctgtgccggcttcacgtggcgggaagaccctctgcaagggggacaggcaggcccctccaggcccaccagcccggttcccgcggcccatttggtcagcttccccgccacgggcacctcgttcttccacaccctgtcctggtggggctgtccgggaagacacctaccctgtgggcactcagggtgtgcccagcccggccctggctcagggaggacctcagggttcctggagattcctgcagtggaactccatgccccgcctcccaacggacctggacgtagaggggccttggttccgccattatgatttcagacagagctgctgggtccgtgccatatcccaggaggaccagctggccccctgctggcaggctgaacaccctgcggagcgggtgagatcggctttcgctgcacccagcactgattccgaccagggcacccccttcagagctagggacgaacagcagtgtgctcccacctcagggccttgcctctgcggcctccacttggaaagttctcagttccctccaggcttctagaagcatctgggccagggctcatggctggataatttccctaggcttaacaacccaagcaagcttcgcgtcctcgttttatttttggttaaacttatgaatatgtattaagaaagagtgcagcttgagagacattcagagatggaacacaccagaccccagatcacaaagccaaccatgcccagcccctcccagcaccccaagccccacgaccatcgttctgaattctgacgacaccgtgagcctgcctttgtactttaaactcatggaaggataactaccttcacgttttgaaataaatgtttcctgttgaaatg

SEQ ID NO: 31115 - DNA, 2652 bp, Homo sapiens
  source 1..2652: mol_type = unassigned DNA
cttttgcctcgagtattcccaggagggacggtccatccagctgttctccaggaccaaggacccactgttcttcctcagtgacccaggaaaatgaagcctcctcctgttgggacggctcagaatggtggactccacagtccctccgcgagagacgtggtttccatgcgtacaatagatcttcctcatcccccaaacccaacaccctcctgctcaacaggcgttattcctaaagtggcttcactgttcagactgaagagccacggtagccaaagtgatgagcggagtagaaccgagcagtcgggagagatcttgttccctgtaggaaactgggcatcgctgaggccctgagcatcccaggaggccgattgcacagagacctctggtcgctgaccccagtctgcctccacatccctggaatagcccatcatgggcccttcacccttggcaggtggaaaccattcaacctgctggggccggtgtgtccccatttcatggcattgggggacaacaggattctctgtctaggtcccactgtactcaagtccttgggaagatgcccacccctgcttgggacttgagactccagagactggagcagctgtgggccactgggtctggcccctttttccctgggggcggcggtggaatgggggttacgcagccagccagcatctgggagcccggcgagagcggttcaggtgttctccgaagccgccgcgtacagtgtgacctttagacaattctgtctcacaggatggacgtggtagaggtcgcgggtagttggtgggcacaagagcgagaggacatcattatgaaatacgaaaagggacaccgagctgggctgccagaggacaaggggcctaagccttttcgaagctacaacaacaacgtcgatcatttggggattgtacatgagacggagctgcctcctctgactgcgcgggaggcgaagcaaattcggcgggagatcagccgaaagagcaagtgggtggatatgctgggagactgggagaaatacaaaagcagcagaaagctcatagatcgagcgtacaagggaatgcccatgaacatccggggcccgatgtggtcagtcctcctgaacattgaggaaatgaagttgaaaaaccccggaagataccagatcatgaaggagaagggcaagaggtcatctgagcacatccagcgcatcgaccgggacataagcgggacattaaggaagcatatgttcttcagggatcgatacggaaccaagcagcgggaactactccacatcctcctggcatatgaggagtataacccggaggtgggctactgcagggacctgagccacatcgccgccttgttcctcctctatcttcctgaggaggatgcattctgggcactggtgcagctgctggccagtgagaggcactccctgcagggatttcacagcccaaatggcgggaccgtccaggggctccaagaccaacaggagcatgtggtagccacgtcacaacccaagaccatggggcatcagatctctctcgggctcaccctgcgcctgtgggacgtgtatctggtagaaggcgaacaggcgttgatgccgataacaagaatcgcctttaaggttcagcagaagcgcctcacgaagacgtccaggtgtggcccgtgggcacgtttttgcaaccggttcgttgatacctgggccagggatgaggacactgtgctcaagcatcttagggcctctatgaagaaactaacaagaaagcagggggacctgccacccccagccaaacccgagcaagggtcgtcggcatccaggcctgtgccggcttcacgtggcgggaagaccctctgcaagggggacaggcaggcccctccaggcccaccagcccggttcccgcggcccatttggtcagcttccccgccacgggcacctcgttcttccacaccctgtcctggtggggctgtccgggaagacacctaccctgtgggcactcagggtgtgcccagcccggccctggctcagggaggacctcagggttcctggagattcctgcagtggaactccatgccccgcctcccaacggacctggacgtagaggggccttggttccgccattatgatttcagacagagctgctgggtccgtgccatatcccaggaggaccagctggccccctgctggcaggctgaacaccctgcggagcgggtgagatcggctttcgctgcacccagcactgattccgaccagggcacccccttcagagctagggacgaacagcagtgtgctcccacctcagggccttgcctctgcggcctccacttggaaagttctcagttccctccaggcttctagaagcatctgggccagggctcatggctggataatttccctaggcttaacaacccaagcaagcttcgcgtcctcgttttatttttggttaaacttatgaatatgtattaagaaagagtgcagcttgagagacattcagagatggaacacaccagaccccagatcacaaagccaaccatgcccagcccctcccagcaccccaagccccacgaccatcgttctgaattctgacgacaccgtgagcctgcctttgtactttaaactcatggaaggataactaccttcacgttttgaaataaatgtttcctgttgaaatg

SEQ ID NO: 31116 - DNA, 2647 bp, Homo sapiens
  source 1..2647: mol_type = unassigned DNA
cttttgcctcgagtattcccaggagggacggtccatccagctgttctccaggaccaaggacccactgttcttcctcagtgacccaggaaaatgaagcctcctcctgttgggacggctcagaatggtggactccacagtccctccgcgagagacgtggtttccatgcgtacaatagatcttcctcatcccccaaacccaacaccctcctgctcaacaggcgttattcctaaagtggcttcactgttcagactgaagagccacggtagccaaagtgatgagcggagtagaaccgagcagtcgggagagatcttgttccctgtaggaaactgggcatcgctgaggccctgagcatcccaggaggccgattgcacagagacctctggtcgctgaccccagtctgcctccacatccctggaatagcccatcatgggcccttcacccttggcaggtggaaaccattcaacctgctggggccggtgtgtccccatttcatggcattgggggacaacaggattctctgtctaggtcccactgtactcaagtccttgggaagatgcccacccctgcttgggacttgagactccagagactggagcagctgtgggccactgggtctggcccctttttccctgggggcggcggtggaatgggggttacgcagccagccagcatctgggagcccggcgagagcggttcaggtgttctccgaagccgccgcgtacagtgtgacctttagacaattctgtctcacaggatggacgtggtagaggtcgcgggtagttggtgggcacaagagcgagaggacatcattatgaaatacgaaaagggacaccgagctgggctgccagaggacaaggggcctaagccttttcgaagctacaacaacaacgtcgatcatttggggattgtacatgagacggagctgcctcctctgactgcgcgggaggcgaagcaaattcggcgggagatcagccgaaagagcaagtgggtggatatgctgggagactgggagaaatacaaaagcagcagaaagctcatagatcgagcgtacaagggaatgcccatgaacatccggggcccgatgtggtcagtcctcctgaacattgaggaaatgaagttgaaaaaccccggaagataccagatcatgaaggagaagggcaagaggtcatctgagcacatccagcgcatcgaccgggacataagcgggacattaaggaagcatatgttcttcagggatcgatacggaaccaagcagcgggaactactccacatcctcctggcatatgaggagtataacccggaggtgggctactgcagggacctgagccacatcgccgccttgttcctcctctatcttcctgaggaggatgcattctgggcactggtgcagctgctggccagtgagaggcactccctgcagggatttcacagcccaaatggcgggaccgtccaggggctccaagaccaacaggagcatgtggtagccacgtcacaacccaagaccatggggcatcagatctctctcgggctcaccctgcgcctgtgggacgtgtatctggtagaaggcgaacaggcgttgatgccgataacaagaatcgcctttaaggttcagcagaagcgcctcacgaagacgtccaggtgtggcccgtgggcacgtttttgcaaccggttcgttgatacctgggccagggatgaggacactgtgctcaagcatcttagggcctctatgaagaaactaacaagaaagcagggggacctgccacccccagccaaacccgagcaagggtcgtcggcatccaggcctgtgccagcttcacgtggcgggaagaccctctgcaagggggacaggcaggcccctccaggcccaccagcccggttcccgcggcccatttggtcagcttccccgccacgggcacctcgttcttccacaccctgtcctggtggggctgtccgggaagacacctaccctgtgggcactcagggtgtgcccagcccggccctggctcagggaggacctcagggttcctggagattcctgcagtggaactccatgccccgcctcccaacggacctggacgtagagggcccttggttccgccattatgatttcagacagagctgctgggtccgtgccatatcccaggaggaccagctggccccctgctggcaggctgaacaccctgcggagcgggtgagatcggctttcgctgcacccagcactgattccgaccagggcacccccttcagagctagggacgaacagcagtgtgctcccacctcagggccttgcctctgcggcctccacttggaaagttctcagttccctccaggcttctagaagcatctgggccagggctcatggctggataatttccctaggcttaacaacccaagcaagcttcgcatcctcgttttatttttggttaaacttatgaaaatgtattaagaaagagtgcagctcgagagagattcagagatggaacacaccagaccccagatcacaaagccaaccatgcccagcccctcccagcaccccaagccccacgaccatcgttctgaattctgacgacaccgtgagcctgcctttgtacttcaaactcatggaaggataaccaccttcatgttttgaaataaatgtttcctgttg

SEQ ID NO: 31117 - DNA, 3389 bp, Homo sapiens
  source 1..3389: mol_type = unassigned DNA
gtggggcccatctagggagccggtgggaatggagactgggctaggtcaggcccctgggcgctcagcagttctgtcggcaagtgagcacaagaggagcggggcagcctgagggtctggccctgtctacttggagacaaccccggtgagatgcaagggttatggccacagggtgaggggacgcctggcccagcctcagggctgttgtccagcaggtctctgagggcccacctgcccctgttctcccccattcccctagagctacagccctcactgtcccgtgaggggaaaaggcatggtgacaatgggggctgtagccctaggagaacgggggagaagatgggcagggccccgttctgggcatctcacggtgaggccagggaggcagcagggctcgcggctaaagacctgggtctggtgctgggaagggatctggggccgggtaagaggagcccagccaggagcccatccctcagggatcacaggatggagagacagaggatccctggggaggtagggcgggagggagctgacgagccgtgccacttctgaaacgcagggtgtgtggctcgggtgcagggagaggcaggtggatgctgggaggtcagaacctgcaagggccttggggctgtcaagtggggtgggcccctggtgcagccagagtacaccgggcaggtctcagggcaggctcccttgaccctggcggggggatgtggtcactccctgagggactcctgtcagggcccggtcgcccaccctgggcggcccccatcccatctcagggctaacctttctcagctccagcagaaagcaccacctcgagtccaggacgggcagccccactgggcagcctgaccgccccccacgccaggggccccagtaaccccggccaggctgtccctacactccttcttctcccaggtcctgcccctcctgggagtcagccccacaggaaggcccttgtcctcccttccctgtgccttctcctgggctgagccctgagctggaaagggacagagccagtcctttctgggggtcggcacccaggctggggccgctccaggccccgtgcagttcctcagctctgcctgggttgccttacagtgagacggagctgcctcctctgactgcgcgggaggcgaaggtaagagcctgatgcgtggaggggctggtccagggacgtagggactgggcgggtggtcagtgaggcagaggaagcagctggcctgagcggtggcgggtgagggcaacacgctgtcactgggaggggcagcagtccctgctggacctgaccccaggttgctgttcactttggcagtttgataaaattccaaaaggagaaccacagtcctggcttgggggtggctgcgcgcttgtgtcaggaccccacctagaggctgggacctaagactggtgtgtctgtggcctgaggatggtacatcccggggtcccaaagccagcccactggtgctcatttgctcaaaggctctcagcccttgaggtctgcccttccctggctccttccagctggctcccaccagggctccagagcccaagacccagcatccgcgggcggctctgggaagcctggcagctccgctaactccaacatgcctcatttgacagcaaattcggcgggagatcagccgaaagagcaagtgggtggatatgctgggagactgggagaaatacaaaagcagcagaaagctcatagatcgagcgtacaagggaatgcccatgaacatccggggcccgatgtggtcagtcctcctgaacattgaggaaatgaagttgaaaaaccccggaagataccagatcatgaaggagaagggcaagaggtcatctgagcacatccagcgcatcgaccgggacataagcgggacattaaggaagcatatgttcttcagggatcgatacggaaccaagcagcgggaactactccacatcctcctggcatatgaggagtataacccggaggtgggctactgcagggacctgagccacatcgccgccttgttcctcctctatcttcctgaggaggatgcattctgggcactggtgcagctgctggccagtgagaggcactccctgcagggatttcacagcccaaatggcgggaccgtccaggggctccaagaccaacaggagcatgtggtagccacgtcacaacccaagaccatggggcatcaggacaagaaagatctatgtgggcagtgttccccgttaggctgcctcatccggatattgattgacgggatctctctcgggctcaccctgcgcctgtgggacgtgtatctggtagaaggcgaacaggcgttgatgccgataacaagaatcgcctttaaggttcagcagaagcgcctcacgaagacgtccaggtgtggcccgtgggcacgtttttgcaaccggttcgttgatacctgggccagggatgaggacactgtgctcaagcatcttagggcctctatgaagaaactaacaagaaagcagggggacctgccacccccagccaaacccgagcaagggtcgtcggcatccaggcctgtgccagcttcacgtggcgggaagaccctctgcaagggggacaggcaggcccctccaggcccaccagcccggttcccgcggcccatttggtcagcttccccgccacgggcacctcgttcttccacaccctgtcctggtggggctgtccgggaagacacctaccctgtgggcactcagggtgtgcccagcccggccctggctcagggaggacctcagggttcctggagattcctgcagtggaactccatgccccgcctcccaacggacctggacgtagagggcccttggttccgccattatgatttcagacagagctgctgggtccgtgccatatcccaggaggaccagctggccccctgctggcaggctgaacaccctgcggagcgggtgagatcggctttcgctgcacccagcactgattccgaccagggcacccccttcagagctagggacgaacagcagtgtgctcccacctcagggccttgcctctgcggcctccacttggaaagttctcagttccctccaggcttctagaagcatctgggccagggctcatggctggataatttccctaggcttaacaacccaagcaagcttcgcatcctcgttttatttttggttaaacttatgaaaatgtattaagaaagagtgcagctcgagagagattcagagatggaacacaccagaccccagatcacaaagccaaccatgcccagcccctcccagcaccccaagccccacgaccatcgttctgaattctgacgacaccgtgagcctgcctttgtacttcaaactcatggaaggataaccaccttcatgttttgaaataaatgtttcctgttgaaatg

SEQ ID NO: 31118 - DNA, 2255 bp, Homo sapiens
  source 1..2255: mol_type = unassigned DNA
gtcagtggtctacagcagttacacacaggcagtggtatctgtgagcagctctgtggactcaaaggttttctccctgagaggcatgacccaggccagctgattcatcagaatcaggatggacgtggtagaggtcgcgggcagttggtgggcacaagagcgagaggacatcattatgaaatacgaaaagggacaccaagctgggctgccagaggacaaggggcctaagccttttcgaagctacaacaacaacgtcgatcatttggggattgtacagtcgggtcaacctcctttccagggacagaactcctccctgactcccctgcaggtccagcccgaggttgttaggccagaggtgtggggcccatctagggagccggtgggaatggagactgggctaggtcaggcccctgggcgctcagcagttctgtcggcaagtgagcacaagaggagcggggcagcctgagggtctggccctgtctacttggagacaaacccgtgagacggagctgcctcctctgactgcgcgggaggcgaagcaaattcggcgggagatcagccgaaagagcaagtgggtggatatgctgggagactgggagaaatacaaaagcagcagaaagctcatagatcgagcgtacaagggaatgcccatgaacatccggggcccgatgtggtcagtcctcctgaacattgaggaaatgaagttgaaaaaccccggaagataccagatcatgaaggagaagggcaagaggtcatctgagcacatccagcgcatcgaccgggacataagcgggacattaaggaagcatatgttcttcagggatcgatacggaaccaagcagcgggaactactccacatcctcctggcatatgaggagtataacccggaggtgggctactgcagggacctgagccacatcgccgccttgttcctcctctatcttcctgaggaggatgcattctgggcactggtgcagctgctggccagtgagaggcactccctgcagggatttcacagcccaaatggcgggaccgtccaggggctccaagaccaacaggagcatgtggtagccacgtcacaacccaagaccatggggcatcaggacaagaaagatctatgtgggcagtgttccccgttaggctgcctcatccggatattgattgacgggatctctctcgggctcaccctgcgcctgtgggacgtgtatctggtagaaggcgaacaggcgttgatgccgataacaagaatcgcctttaaggttcagcagaagcgcctcacgaagacgtccaggtgtggcccgtgggcacgtttttgcaaccggttcgttgatacctgggccagggatgaggacactgtgctcaagcatcttagggcctctatgaagaaactaacaagaaagcagggggacctgccacccccagccaaacccgagcaagggtcgtcggcatccaggcctgtgccggcttcacgtggcgggaagaccctctgcaagggggacaggcaggcccctccaggcccaccagcctggttcccgcggcccatttggtcagcttccccgccacgggcacctcgttcttccacaccctgtcctggtggggctgtccgggaagacacctaccctgtgggcactcagggtgtgcccagcccggccctggctcagggaggacctcagggttcctggagattcctgcagtggaactccatgccccgcctcccaacggacctggacgtagagggcccttggttccgccattatgatttcagacagagctgctgggtccgtgccatatcccaggaggaccagctggccccctgctggcaggctgaacaccctgcggagcgggtgagatcggctttcgctgcacccagcactgattccgaccagggcacccccttcagagctagggacgaacagcagtgtgctcccacctcagggccttgcctctgcggcctccacttggaaagttctcagttccctccaggcttctagaagcatctgggccagggctcatggctggataatttccctaggcttaacaacccaagcaagcttcgcatcctcgttttatttttggttaaacttatgaaaatgtattaagaaagagtgcagctcgagagagattcagagatggaacacaccagaccccagatcacaaagccaaccatgcccagcccctcccagcacccccagccccacgaccatcgttctgaattctgacgacaccgtgagcctgcctttgtacttcaaactcatgga

SEQ ID NO: 31119 - DNA, 2105 bp, Homo sapiens
  source 1..2105: mol_type = unassigned DNA
gtgcttagcacctgtctgctctctggcctgcctcagtggtctacagcagttacacacaggcagtggtatctgtgagcagctctgtggactcaaaggttttctccctgagaggcatgacccaggccagctgattcatcagaatcaggatggacgtggtagaggtcgcgggcagttggtgggcacaagagcgagaggacatcattatgaaatacgaaaagggacaccaagctgggctgccagaggacaaggggcctaagccttttcgaagctacaacaacaacgtcgatcatttggggattgtacatgagacggagctgcctcctctgactgcgcgggaggcgaagcaaattcggcgggagatcagccgaaagagcaagtgggtggatatgctgggagactgggagaaatacaaaagcagcagaaagctcatagatcgagcgtacaagggaatgcccatgaacatccggggcccgatgtggtcagtcctcctgaacattgaggaaatgaagttgaaaaaccccggaagataccagatcatgaaggagaagggcaagaggtcatctgagcacatccagcgcatcgaccgggacataagcgggacattaaggaagcatatgttcttcagggatcgatacggaaccaagcagcgggaactactccacatcctcctggcatatgaggagtataacccggaggtgggctactgcagggacctgagccacatcgccgccttgttcctcctctatcttcctgaggaggatgcattctgggcactggtgcagctgctggccagtgagaggcactccctgcagggatttcacagcccaaatggcgggaccgtccaggggctccaagaccaacaggagcatgtggtagccacgtcacaacccaagaccatggggcatcaggacaagaaagatctatgtgggcagtgttccccgttaggctgcctcatccggatattgattgacgggatctctctcgggctcaccctgcgcctgtgggacgtgtatctggtagaaggcgaacaggcgttgatgccgataacaagaatcgcctttaaggttcagcagaagcgcctcacgaagacgtccaggtgtggcccgtgggcacgtttttgcaaccggttcgttgatacctgggccagggatgaggacactgtgctcaagcatcttagggcctctatgaagaaactaacaagaaagcagggggacctgccacccccagccaaacccgagcaagggtcgtcggcatccaggcctgtgccagcttcacgtggcgggaagaccctctgcaagggggacaggcaggcccctccaggcccaccagcccggttcccgcggcccatttggtcagcttccccgccacgggcacctcgttcttccacaccctgtcctggtggggctgtccgggaagacacctaccctgtgggcactcagggtgtgcccagcccggccctggctcagggaggacctcagggttcctggagattcctgcagtggaactccatgccccgcctcccaacggacctggacgtagagggcccttggttccgccattatgatttcagacagagctgctgggtccgtgccatatcccaggaggaccagctggccccctgctggcaggctgaacaccctgcggagcgggtgagatcggctttcgctgcacccagcactgattccgaccagggcacccccttcagagctagggacgaacagcagtgtgctcccacctcagggccttgcctctgcggcctccacttggaaagttctcagttccctccaggcttctagaagcatctgggccagggctcatggctggataatttccctaggcttaacaacccaagcaagcttcgcatcctcgttttatttttggttaaacttatgaaaatgtattaagaaagagtgcagctcgagagagattcagagatggaacacaccagaccccagatcacaaagccaaccatgcccagcccctcccagcaccccaagccccacgaccatcgttctgaattctgacgacaccgtgagcctgcctttgtacttcaaactcatggaaggataaccaccttcatgttttgaaataaatgtttcctgttg

SEQ ID NO: 31120 - DNA, 3389 bp, Homo sapiens
  source 1..3389: mol_type = unassigned DNA
gtggggcccatctagggagccggtgggaatggagactgggctaggtcaggcccctgggcgctcagcagttctgtcggcaagtgagcacaagaggagcggggcagcctgagggtctggccctgtctacttggagacaaccccggtgagatgcaagggttatggccacagggtgaggggacgcctggcccagcctcagggctgttgtccagcaggtctctgagggcccacctgcccctgttctcccccattcccctagagctacagccctcactgtcccgtgaggggaaaaggcatggtgacaatgggggctgtagccctaggagaacgggggagaagatgggcagggccccgttctgggcatctcacggtgaggccagggaggcagcagggctcgcggctaaagacctgggtctggtgctgggaagggatctggggccgggtaagaggagcccagccaggagcccatccctcagggatcacaggatggagagacagaggatccctggggaggtagggcgggagggagctgacgagccgtgccacttctgaaacgcagggtgtgtggctcgggtgcagggagaggcaggtggatgctgggaggtcagaacctgcaagggccttggggctgtcaagtggggtgggcccctggtgcagccagagtacaccgggcaggtctcagggcaggctcccttgaccctggcggggggatgtggtcactccctgagggactcctgtcagggcccggtcgcccaccctgggcggcccccatcccatctcagggctaacctttctcagctccagcagaaagcaccacctcgagtccaggacgggcagccccactgggcagcctgaccgccccccacgccaggggccccagtaaccccggccaggctgtccctacactccttcttctcccaggtcctgcccctcctgggagtcagccccacaggaaggcccttgtcctcccttccctgtgccttctcctgggctgagccctgagctggaaagggacagagccagtcctttctgggggtcggcacccaggctggggccgctccaggccccgtgcagttcctcagctctgcctgggttgccttacagtgagacggagctgcctcctctgactgcgcgggaggcgaaggtaagagcctgatgcgtggaggggctggtccagggacgtagggactgggcgggtggtcagtgaggcagaggaagcagctggcctgagcggtggcgggtgagggcaacacgctgtcactgggaggggcagcagtccctgctggacctgaccccaggttgctgttcactttggcagtttgataaaattccaaaaggagaaccacagtcctggcttgggggtggctgcgcgcttgtgtcaggaccccacctagaggctgggacctaagactggtgtgtctgtggcctgaggatggtacatcccggggtcccaaagccagcccactggtgctcatttgctcaaaggctctcagcccttgaggtctgcccttccctggctccttccagctggctcccaccagggctccagagcccaagacccagcatccgcgggcggctctgggaagcctggcagctccgctaactccaacatgcctcatttgacagcaaattcggcgggagatcagccgaaagagcaagtgggtggatatgctgggagactgggagaaatacaaaagcagcagaaagctcatagatcgagcgtacaagggaatgcccatgaacatccggggcccgatgtggtcagtcctcctgaacattgaggaaatgaagttgaaaaaccccggaagataccagatcatgaaggagaagggcaagaggtcatctgagcacatccagcgcatcgaccgggacataagcgggacattaaggaagcatatgttcttcagggatcgatacggaaccaagcagcgggaactactccacatcctcctggcatatgaggagtataacccggaggtgggctactgcagggacctgagccacatcgccgccttgttcctcctctatcttcctgaggaggatgcattctgggcactggtgcagctgctggccagtgagaggcactccctgcagggatttcacagcccaaatggcgggaccgtccaggggctccaagaccaacaggagcatgtggtagccacgtcacaacccaagaccatggggcatcaggacaagaaagatctatgtgggcagtgttccccgttaggctgcctcatccggatattgattgacgggatctctctcgggctcaccctgcgcctgtgggacgtgtatctggtagaaggcgaacaggcgttgatgccgataacaagaatcgcctttaaggttcagcagaagcgcctcacgaagacgtccaggtgtggcccgtgggcacgtttttgcaaccggttcgttgatacctgggccagggatgaggacactgtgctcaagcatcttagggcctctatgaagaaactaacaagaaagcagggggacctgccacccccagccaaacccgagcaagggtcgtcggcatccaggcctgtgccggcttcacgtggcgggaagaccctctgcaagggggacaggcaggcccctccaggcccaccagcctggttcccgcggcccatttggtcagcttccccgccacgggcacctcgttcttccacaccctgtcctggtggggctgtccgggaagacacctaccctgtgggcactcagggtgtgcccagcccggccctggctcagggaggacctcagggttcctggagattcctgcagtggaactccatgccccgcctcccaacggacctggacgtagagggcccttggttccgccattatgatttcagacagagctgctgggtccgtgccatatcccaggaggaccagctggccccctgctggcaggctgaacaccctgcggagcgggtgagatcggctttcgctgcacccagcactgattccgaccagggcacccccttcagagctagggacgaacagcagtgtgctcccacctcagggccttgcctctgcggcctccacttggaaagttctcagttccctccaggcttctagaagcatctgggccagggctcatggctggataatttccctaggcttaacaacccaagcaagcttcgcatcctcgttttatttttggttaaacttatgaaaatgtattaagaaagagtgcagctcgagagagattcagagatggaacacaccagaccccagatcacaaagccaaccatgcccagcccctcccagcacccccagccccacgaccatcgttctgaattctgacgacaccgtgagcctgcctttgtacttcaaactcatggaaggataaccaccttcatgttttgaaataaatgtttcctgttgaaatg

SEQ ID NO: 31121 - DNA, 6174 bp, Homo sapiens
  source 1..6174: mol_type = unassigned DNA
gcggccgcggggaccctcggcgtggtcctctgaccctgcaaacccgcgacggaggaaggggaggtcctgcccgaggcgccagcccaaggaggaggatgcccatttaacccgccctcgcctgccgggcgcttgcctcggtgcccgccgccggagcctccgagccgcgcccgtggaagtgctgcatggggcagggctgctgaagcgcggagttcggggtcgcgccgctcccaggcaggcgcgggagcccggtgcggcagttggcacagtttcggcggcgccttctgcgcgggagtggggggcgcggtgcgcccggccggcctccgcggtgccctggtgaggcgagagttatggagccgcccagctgcattcaggatgagccgttcccgcaccccctggagcccgagccgggcgtctcagctcagcccggccccgggaagccaagcgataagcggttccggctgtggtacgttggggggtcgtgcctggaccacaggaccacgctgcctatgctgccctggctcatggccgagatccgcaggcgcagccagaagcccgaggcgggcggctgcggggcgccggcggcccgagaggtgatcctggtgctcagcgcgcccttcctgcgttgcgtccccgcgccgggcgctggggcctcggggggcactagtccgtcggccacgcagcccaacccggcggtattcatcttcgagcacaaggcgcagcatatctcgcgcttcatccacaacagccacgacctcacctactttgcctacctgatcaaggcgcagcccgacgaccccgagtcgcagatggcctgccacgttttccgcgccacagaccccagccaggttcctgatgttattagcagcataaggcaattatctaaagcggccatgaaagaggatgccaaacccagcaaagataatgaggacgccttttacaactctcagaagttcgaagtcctgtactgtggaaaggtgaccgtgacccacaagaaggccccctcaagcctcatcgatgactgcatggagaagttcagcctgcacgaacagcagcgcctgaagatccaaggggagcagcgcggtccggacccaggagaggacctggctgacttggaggtggtggtgcccgggtcccccggagactgcctgccggaggaggctgacggcaccgacacccaccttggcttacctgccggggccagccagcctgccctgaccagctctcgggtctgcttccctgagcggattttggaagattctggctttgatgagcagcaggagtttcggtctcggtgcagcagtgtcaccggcgtgcaacggagagttcacgagggcagccagaaatcccagccgcgacggagacacgcgagcgcacccagtcacgtccagccctcggactcggagaagaacaggaccatgctcttccaggttgggcgatttgagattaaccttatcagtccagacactaaatcagttgtgctagaaaagaattttaaagatatctcctcttgttctcagggtataaagcatgtggatcactttggctttatctgccgggagtctccagagcctggacttagccagtatatttgttatgtattccagtgtgccagcgaatctctggttgatgaggtaatgctgactctgaaacaggccttcagtacggcggctgccctgcagagtgccaagacgcagattaaactgtgtgaggcctgcccgatgcactctttgcataagctctgtgaaaggattgaaggtctctacccaccaagagccaagctggtgatacagaggcatctctcatcactgacagataatgagcaagctgacatctttgaaagagttcagaaaatgaagccagtcagtgaccaggaagaaaatgaacttgtgattttacacctgaggcagctgtgtgaagccaagcagaagacacacgtgcacatcggggaaggcccttctactatttcaaatagtacaatcccagaaaatgcaacaagcagtggaaggttcaaacttgacattctgaaaaataaagctaagagatccttaactagctccctggaaaatatcttctcaaggggagctaacagaatgagaggtcggcttggaagtgtggacagttttgaacggtccaacagtcttgcttcagagaaggactactcaccaggggattctccaccagggacaccgccagcgtccccaccgtcctcagcttggcaaacgtttcccgaagaggattccgactccccgcagtttcgaagacgggcacacacgttcagccacccaccttcaagcacaaagagaaagctgaatttgcaggatgggagggctcagggtgtgcgttcccctctgctgaggcagagctccagtgaacagtgcagtgatggagaagggagaaaaaggacctcatctacctgcagcaatgagtccctaagtgtgggaggaacctctgtcactcctcgccggatctcctggcggcagcgcattttcctcagggttgcttctcccatgaacaaatctccctcagcaatgcaacagcaagatggattggacaggaacgagctgctgccactgtcccccctctctccaaccatggaggaggaaccgctggttgtattcctgtctggggaggatgacccagaaaagattgaagaaagaaagaaatcaaaagaactgaggagcttgtggagaaaagctatacaccaacaaatcttgttacttcgaatggaaaaagaaaaccagaaacttgaagcaagcagagatgaactccagtccagaaaagttaaattagactatgaagaagttggtgcatgtcagaaagaggtcttaataacttgggataagaagttgttaaactgcagagctaaaatcagatgtgatatggaagatattcatactcttcttaaagaaggagttcccaaaagtcgacgaggagaaatttggcagtttctggctttacagtaccgactcagacacagattgcctaataaacaacagcctcctgacatatcctataaggaacttttgaagcagctcactgctcagcagcatgcgattctcgtggatttaggaaggacgtttcctactcacccttacttttcagtacagcttgggccaggacagctgtcactgtttaacctcctgaaagcctattctttgctggacaaagaagtgggatactgtcaggggatcagctttgtggctggagtcctgcttctgcacatgagtgaagagcaagcctttgaaatgctgaaattcctcatgtatgacctcggcttccgcaagcagtacagacctgacatgatgtcgctgcagattcaaatgtaccagctgtccaggctccttcatgactatcacagagatctctacaatcaccttgaagaaaatgaaatcagccccagtctttatgctgccccctggttcctcacattgtttgcctctcagttttcattaggatttgtagccagagtttttgatattatttttcttcagggaactgaagttatattcaaggttgcactcagcctactgagcagccaagagacacttataatggaatgtgagagctttgaaaatattgttgagtttcttaaaaacacgctacctgatatgaatacctctgaaatggaaaaaattattacccaggtttttgagatggatatttctaagcagttgcatgcctatgaggtggaatatcatgtgctacaggatgagcttcaggaatcttcatattcctgtgaggatagtgaaactttggagaagctggagagggccaatagccaactgaaaagacaaaacatggacctcctagaaaaattacaggtagctcatactaaaatccaggccttggaatcaaacctggaaaatcttttgacgagagagaccaaaatgaagtctttaatccggaccctggaacaagaaaaaatggcttatcaaaagacagtggagcaactccggaagctgctgcccgcggatgctctagtcaattgtgacctgttgctgagagacctaaactgcaaccctaacaacaaagccaagataggaaataagccataattgaagaggcacggcctcagcagaaagtgctccttagaatactacagagaggaagagcctgcatgtcgctggcccaaggctggaccctgaagctgatggaaccacctaatactggtgctgagcgcctagtcacagcaggtggacctcgtgctcatcagagcatgccaatcctaagccattggacatatgtagactggtttttgttgttgctatgtacatataaatatatatataaaatgaacatagttcatgctttcagataaaatgagtagatgtatatttagattaatttttttagtcagaacttcatgaaatccacaccaaaggaaaggtaaactgaaatttcccttggacatatgtgaaatctttttgtctttatagtgaaacaaagccagagcatctttgtatattgcaatatacttgaaaaaaatgaatgtatttttttctccaaagaacagcatgtttcactcaatggtgaaaaggtggaaacatttatgtaactttatgtgtatctgtcttgatatctactgacattgtctatatgaggaaaatgattactggtcatgctcctgtgagttttttgggaaggtagggtcatttctccctgcctgctttgtgccaactagcatgttgcatctacatgcattatgagtctggttaggcattactttaaacatacataaagagacagtaggacattgtggctgagtctacccagctcaaggtaaaggagaatgttgctaattttttagcaaactagaccagcattattactcaaactaaaaatatcacacctgaaaaatttaatttaggacctaaaatgtctagattagctttctgctttttttatttgaataactcattcagttgtgaatgaattcctctttatttggtgccacagtcaccaaatgacaaggatttgccactttcccaccaaattgtgagtgcttgtaatttaggtctctctaccttaaattcagtataaggaaacgtaattatgattgattttttccaaagatgacaagctgtgttgaaatacattttttcttttgaccaattgacagaatctaataagctttaataatcttccccttttatgtgaaaagttttgagaactgtgaaatgtttaggaacaaactgttgaaatccattggaagggaaaaaagaaagtggtaccagtgttaccagctcaactaaaacctgcaattctgcatttcaactcttcacttcctcagcctacaaatagctcattagatgacattcacgcatgctgggtataggcaaggaaagtaattttcaaagtacatttgcagttctctttttcagagatgattctatgatagtgcctctgaaagttgatgcagcatttttgcctttccaaaaagtatttatcctcactgctttttgcagtacttgtattttcacagatggattatctggggtaattttcttcaaagggagtttgttatacacagtgaaaatgtattatagagtagaatagtaaagctctaggggtttcagaaagctttgatgaacagatgacaaacatctgaaaccccctccgcactgttacccagtgtgtatataatgacttgttatagctcagtgtgcccttgaatccatacagtttcttaaaagacaataaaatcttattaataaagttaatgtaacttctaagttctagaaaatgctgattctgtctgccccattcaattgggggctactaattgatttgttgcttggatttcctgagaatttctctatttgtaggaggggttttttctttttacggtctgttgatgacaattactttatgggtgtgatgcaccgatggtagccaaggaatctgttggggaagttcggaaagaaaccttttctttcttttattcagtttaaagtaaactttatcctggatgtttagaatcaacattaagagttatattatggtgttcagagattaagctgacttggatacaatattttcttttgaaaatgaattttctttttcatttgtgatttttaaaaaatgttgcaccagttatgcttcatgcatcgttacatcttcatcaggttaatgtaatgtctagttcctttgcaataaatatattgctgcagcttt

SEQ ID NO: 31122 - DNA, 6364 bp, Homo sapiens
  source 1..6364: mol_type = unassigned DNA
gcggccgcggggaccctcggcgtggtcctctgaccctgcaaacccgcgacggaggaaggggaggtcctgcccgaggcgccagcccaaggaggaggatgcccatttaacccgccctcgcctgccgggcgcttgcctcggtgcccgccgccggagcctccgagccgcgcccgtggaagtgctgcatggggcagggctgctgaagcgcggagttcggggtcgcgccgctcccaggcaggcgcgggagcccggtgcggcagttggcacagtttcggcggcgccttctgcgcgggagtggggggcgcggtgcgcccggccggcctccgcggtgccctggtgaggcgagagttatggagccgcccagctgcattcaggatgagccgttcccgcaccccctggagcccgagccgggcgtctcagctcagcccggccccgggaagccaagcgataagcggttccggctgtggtacgttggggggtcgtgcctggaccacaggaccacgctgcctatgctgccctggctcatggccgagatccgcaggcgcagccagaagcccgaggcgggcggctgcggggcgccggcggcccgagaggtgatcctggtgctcagcgcgcccttcctgcgttgcgtccccgcgccgggcgctggggcctcggggggcactagtccgtcggccacgcagcccaacccggcggtattcatcttcgagcacaaggcgcagcatatctcgcgcttcatccacaacagccacgacctcacctactttgcctacctgatcaaggcgcagcccgacgaccccgagtcgcagatggcctgccacgttttccgcgccacagaccccagccaggttcctgatgttattagcagcataaggcaattatctaaagcggccatgaaagaggatgccaaacccagcaaagataatgaggacgccttttacaactctcagaagttcgaagtcctgtactgtggaaaggtgaccgtgacccacaagaaggccccctcaagcctcatcgatgactgcatggagaagttcagcctgcacgaacagcagcgcctgaagatccaaggggagcagcgcggtccggacccaggagaggacctggctgacttggaggtggtggtgcccgggtcccccggagactgcctgccggaggaggctgacggcaccgacacccaccttggcttacctgccggggccagccagcctgccctgaccagctctcgggtctgcttccctgagcggattttggaagattctggctttgatgagcagcaggagtttcggtctcggtgcagcagtgtcaccggcgtgcaacggagagttcacgagggcagccagaaatcccagccgcgacggagacacgcgagcgcacccagtcacgtccagccctcggactcggagaagaacaggaccatgctcttccaggttgggcgatttgagattaaccttatcagtccagacactaaatcagttgtgctagaaaagaattttaaagatatctcctcttgttctcagggtataaagcatgtggatcactttggctttatctgccgggagtctccagagcctggacttagccagtatatttgttatgtattccagtgtgccagcgaatctctggttgatgaggtaatgctgactctgaaacaggccttcagtacggcggctgccctgcagagtgccaagacgcagattaaactgtgtgaggcctgcccgatgcactctttgcataagctctgtgaaaggattgaaggtctctacccaccaagagccaagctggtgatacagaggcatctctcatcactgacagataatgagcaagctgacatctttgaaagagttcagaaaatgaagccagtcagtgaccaggaagaaaatgaacttgtgattttacacctgaggcagctgtgtgaagccaagcagaagacacacgtgcacatcggggaaggcccttctactatttcaaatagtacaatcccagaaaatgcaacaagcagtggaaggttcaaacttgacattctgaaaaataaagctaagagatccttaactagctccctggaaaatatcttctcaaggggagctaacagaatgagaggtcggcttggaagtgtggacagttttgaacggtccaacagtcttgcttcagagaaggactactcaccaggggattctccaccagggacaccgccagcgtccccaccgtcctcagcttggcaaacgtttcccgaagaggattccgactccccgcagtttcgaagacgggcacacacgttcagccacccaccttcaagcacaaagagaaagctgaatttgcaggatgggagggctcagggtgtgcgttcccctctgctgaggcagagctccagtgaacagtgcagcaatctttcgtcagttcgacgcatgtacaaggagagtaattcttcctccagtcttccaagtcttcacacttccttctctgccccttccttcactgccccctctttcctgaaaagcttttaccagaattcaggtagactgtccccacagtatgaaaatgaaatcagacaagacactgcttcagaatcaagtgatggagaagggagaaaaaggacctcatctacctgcagcaatgagtccctaagtgtgggaggaacctctgtcactcctcgccggatctcctggcggcagcgcattttcctcagggttgcttctcccatgaacaaatctccctcagcaatgcaacagcaagatggattggacaggaacgagctgctgccactgtcccccctctctccaaccatggaggaggaaccgctggttgtattcctgtctggggaggatgacccagaaaagattgaagaaagaaagaaatcaaaagaactgaggagcttgtggagaaaagctatacaccaacaaatcttgttacttcgaatggaaaaagaaaaccagaaacttgaagcaagcagagatgaactccagtccagaaaagttaaattagactatgaagaagttggtgcatgtcagaaagaggtcttaataacttgggataagaagttgttaaactgcagagctaaaatcagatgtgatatggaagatattcatactcttcttaaagaaggagttcccaaaagtcgacgaggagaaatttggcagtttctggctttacagtaccgactcagacacagattgcctaataaacaacagcctcctgacatatcctataaggaacttttgaagcagctcactgctcagcagcatgcgattctcgtggatttaggaaggacgtttcctactcacccttacttttcagtacagcttgggccaggacagctgtcactgtttaacctcctgaaagcctattctttgctggacaaagaagtgggatactgtcaggggatcagctttgtggctggagtcctgcttctgcacatgagtgaagagcaagcctttgaaatgctgaaattcctcatgtatgacctcggcttccgcaagcagtacagacctgacatgatgtcgctgcagattcaaatgtaccagctgtccaggctccttcatgactatcacagagatctctacaatcaccttgaagaaaatgaaatcagccccagtctttatgctgccccctggttcctcacattgtttgcctctcagttttcattaggatttgtagccagagtttttgatattatttttcttcagggaactgaagttatattcaaggttgcactcagcctactgagcagccaagagacacttataatggaatgtgagagctttgaaaatattgttgagtttcttaaaaacacgctacctgatatgaatacctctgaaatggaaaaaattattacccaggtttttgagatggatatttctaagcagttgcatgcctatgaggtggaatatcatgtgctacaggatgagcttcaggaatcttcatattcctgtgaggatagtgaaactttggagaagctggagagggccaatagccaactgaaaagacaaaacatggacctcctagaaaaattacaggtagctcatactaaaatccaggccttggaatcaaacctggaaaatcttttgacgagagagaccaaaatgaagtctttaatccggaccctggaacaagaaaaaatggcttatcaaaagacagtggagcaactccggaagctgctgcccgcggatgctctagtcaattgtgacctgttgctgagagacctaaactgcaaccctaacaacaaagccaagataggaaataagccataattgaagaggcacggcctcagcagaaagtgctccttagaatactacagagaggaagagcctgcatgtcgctggcccaaggctggaccctgaagctgatggaaccacctaatactggtgctgagcgcctagtcacagcaggtggacctcgtgctcatcagagcatgccaatcctaagccattggacatatgtagactggtttttgttgttgctatgtacatataaatatatatataaaatgaacatagttcatgctttcagataaaatgagtagatgtatatttagattaatttttttagtcagaacttcatgaaatccacaccaaaggaaaggtaaactgaaatttcccttggacatatgtgaaatctttttgtctttatagtgaaacaaagccagagcatctttgtatattgcaatatacttgaaaaaaatgaatgtatttttttctccaaagaacagcatgtttcactcaatggtgaaaaggtggaaacatttatgtaactttatgtgtatctgtcttgatatctactgacattgtctatatgaggaaaatgattactggtcatgctcctgtgagttttttgggaaggtagggtcatttctccctgcctgctttgtgccaactagcatgttgcatctacatgcattatgagtctggttaggcattactttaaacatacataaagagacagtaggacattgtggctgagtctacccagctcaaggtaaaggagaatgttgctaattttttagcaaactagaccagcattattactcaaactaaaaatatcacacctgaaaaatttaatttaggacctaaaatgtctagattagctttctgctttttttatttgaataactcattcagttgtgaatgaattcctctttatttggtgccacagtcaccaaatgacaaggatttgccactttcccaccaaattgtgagtgcttgtaatttaggtctctctaccttaaattcagtataaggaaacgtaattatgattgattttttccaaagatgacaagctgtgttgaaatacattttttcttttgaccaattgacagaatctaataagctttaataatcttccccttttatgtgaaaagttttgagaactgtgaaatgtttaggaacaaactgttgaaatccattggaagggaaaaaagaaagtggtaccagtgttaccagctcaactaaaacctgcaattctgcatttcaactcttcacttcctcagcctacaaatagctcattagatgacattcacgcatgctgggtataggcaaggaaagtaattttcaaagtacatttgcagttctctttttcagagatgattctatgatagtgcctctgaaagttgatgcagcatttttgcctttccaaaaagtatttatcctcactgctttttgcagtacttgtattttcacagatggattatctggggtaattttcttcaaagggagtttgttatacacagtgaaaatgtattatagagtagaatagtaaagctctaggggtttcagaaagctttgatgaacagatgacaaacatctgaaaccccctccgcactgttacccagtgtgtatataatgacttgttatagctcagtgtgcccttgaatccatacagtttcttaaaagacaataaaatcttattaataaagttaatgtaacttctaagttctagaaaatgctgattctgtctgccccattcaattgggggctactaattgatttgttgcttggatttcctgagaatttctctatttgtaggaggggttttttctttttacggtctgttgatgacaattactttatgggtgtgatgcaccgatggtagccaaggaatctgttggggaagttcggaaagaaaccttttctttcttttattcagtttaaagtaaactttatcctggatgtttagaatcaacattaagagttatattatggtgttcagagattaagctgacttggatacaatattttcttttgaaaatgaattttctttttcatttgtgatttttaaaaaatgttgcaccagttatgcttcatgcatcgttacatcttcatcaggttaatgtaatgtctagttcctttgcaataaatatattgctgcagctttc

SEQ ID NO: 31123 - DNA, 847 bp, Homo sapiens
  source 1..847: mol_type = unassigned DNA
gataatgagcaagctgacatctttgaaagagttcagaaaatgaagccagtcagtgaccaggaagaaaatgaacttgtgattttacacctgaggcagctgtgtgaagccaagcagaagacacacgtgcacatcggggaaggcccttctactatttcaaatagtacaatcccagaaaatgcaacaagcagtggaaggttcaaacttgacattctgaaaaataaagctaagagatccttaactagctccctggaaaatatcttctcaaggggagctaacagaatgagaggtcggcttggaagtgtggacagttttgaacggtccaacagtcttgcttcagagaaggactactcaccaggggattctccaccagggacaccgccagcgtccccaccgtcctcagcttggcaaacgtttcccgaagaggattccgactccccgcagtttcgaagacgggcacacacgttcagccacccaccttcaagcacaaagagaaagctgaatttgcaggatgggagggctcagggtgtgcgttcccctctgctgaggcagagctccagtgaacagtgcagtgatggagaagggagaaaaaggacctcatctacctgcagcaatgagtccctaagtgtgggaggaacctctgtcactcctcgccggatctcctggcggcagcgcattttcctcagggttgcttctcccatgaacaaatctccctcagcaatgcaacagcaagatggattggacaggaacgagctgctgccactgtcccccctctctccaaccatggaggaggaaccgctggttgtattcctgtctggggaggatgacccagaaaagattgaagaaagaa

SEQ ID NO: 31124 - DNA, 6204 bp, Homo sapiens
  source 1..6204: mol_type = unassigned DNA
gcggccgcggggaccctcggcgtggtcctctgaccctgcaaacccgcgacggaggaaggggaggtcctgcccgaggcgccagcccaaggaggaggatgcccatttaacccgccctcgcctgccgggcgcttgcctcggtgcccgccgccggagcctccgagccgcgcccgtggaagtgctgcatggggcagggctgctgaagcgcggagttcggggtcgcgccgctcccaggcaggcgcgggagcccggtgcggcagttggcacagtttcggcggcgccttctgcgcgggagtggggggcgcggtgcgcccggccggcctccgcggtgccctggtgaggcgagagttatggagccgcccagctgcattcaggatgagccgttcccgcaccccctggagcccgagccgggcgtctcagctcagcccggccccgggaagccaagcgataagcggttccggctgtggtacgttggggggtcgtgcctggaccacaggaccacgctgcctatgctgccctggctcatggccgagatccgcaggcgcagccagaagcccgaggcgggcggctgcggggcgccggcggcccgagaggtgatcctggtgctcagcgcgcccttcctgcgttgcgtccccgcgccgggcgctggggcctcggggggcactagtccgtcggccacgcagcccaacccggcggtattcatcttcgagcacaaggcgcagcatatctcgcgcttcatccacaacagccacgacctcacctactttgcctacctgatcaaggcgcagcccgacgaccccgagtcgcagatggcctgccacgttttccgcgccacagaccccagccaggttcctgatgttattagcagcataaggcaattatctaaagcggccatgaaagaggatgccaaacccagcaaagataatgaggacgccttttacaactctcagaagttcgaagtcctgtactgtggaaaggtgaccgtgacccacaagaaggccccctcaagcctcatcgatgactgcatggagaagttcagcctgcacgaacagcagcgcctgaagatccaaggggagcagcgcggtccggacccaggagaggacctggctgacttggaggtggtggtgcccgggtcccccggagactgcctgccggaggaggctgacggcaccgacacccaccttggcttacctgccggggccagccagcctgccctgaccagctctcgggtctgcttccctgagcggattttggaagattctggctttgatgagcagcaggagtttcggtctcggtgcagcagtgtcaccggcgtgcaacggagagttcacgagggcagccagaaatcccagccgcgacggagacacgcgagcgcacccagtcacgtccagccctcggactcggagaagaacaggaccatgctcttccaggttgggcgatttgagattaaccttatcagtccagacactaaatcagttgtgctagaaaagaattttaaagatatctcctcttgttctcagggtataaagcatgtggatcactttggctttatctgccgggagtctccagagcctggacttagccagtatatttgttatgtattccagtgtgccagcgaatctctggttgatgaggtaatgctgactctgaaacaggccttcagtacggcggctgccctgcagagtgccaagacgcagattaaactgtgtgaggcctgcccgatgcactctttgcataagctctgtgaaaggattgaaggtctctacccaccaagagccaagctggtgatacagaggcatctctcatcactgacagataatgagcaagctgacatctttgaaagagttcagaaaatgaagccagtcagtgaccaggaagaaaatgaacttgtgattttacacctgaggcagctgtgtgaagccaagcagaagacacacgtgcacatcggggaaggcccttctactatttcaaatagtacaatcccagaaaatgcaacaagcagtggaaggttcaaacttgacattctgaaaaataaagctaagagatccttaactagctccctggaaaatatcttctcaaggggagctaacagaatgagaggtcggcttggaagtgtggacagttttgaacggtccaacagtcttgcttcagagaaggactactcaccaggggattctccaccagggacaccgccagcgtccccaccgtcctcagcttggcaaacgtttcccgaagaggattccgactccccgcagtttcgaagacgggcacacacgttcagccacccaccttcaagcacaaagagaaagctgaatttgcaggatgggagggctcagggtgtgcgttcccctctgctgaggcagagctccagtgaacagtgcagcaatctttcgtcagttcgacgcatgtacaaggagagtaattcttcctccagtcttccaagtcttcacacttccttctctgccccttccttcactgccccctctttcctgaaaagcttttaccagaattcaggtagactgtccccacagtatgaaaatgaaatcagacaagacactgcttcagaatcaagtgatggagaagggagaaaaaggacctcatctacctgcagcaatgagtccctaagtgtgggaggaacctctgtcactcctcgccggatctcctggcggcagcgcattttcctcagggttgcttctcccatgaacaaatctccctcagcaatgcaacagcaagatggattggacaggaacgagctgctgccactgtcccccctctctccaaccatggaggaggaaccgctggttgtattcctgtctggggaggatgacccagaaaagattgaagaaagaaagaaatcaaaagaactgaggagcttgtggagaaaagctatacaccaacaaatcttgttacttcgaatggaaaaagaaaaccagaaacttgaaggagttcccaaaagtcgacgaggagaaatttggcagtttctggctttacagtaccgactcagacacagattgcctaataaacaacagcctcctgacatatcctataaggaacttttgaagcagctcactgctcagcagcatgcgattctcgtggatttaggaaggacgtttcctactcacccttacttttcagtacagcttgggccaggacagctgtcactgtttaacctcctgaaagcctattctttgctggacaaagaagtgggatactgtcaggggatcagctttgtggctggagtcctgcttctgcacatgagtgaagagcaagcctttgaaatgctgaaattcctcatgtatgacctcggcttccgcaagcagtacagacctgacatgatgtcgctgcagattcaaatgtaccagctgtccaggctccttcatgactatcacagagatctctacaatcaccttgaagaaaatgaaatcagccccagtctttatgctgccccctggttcctcacattgtttgcctctcagttttcattaggatttgtagccagagtttttgatattatttttcttcagggaactgaagttatattcaaggttgcactcagcctactgagcagccaagagacacttataatggaatgtgagagctttgaaaatattgttgagtttcttaaaaacacgctacctgatatgaatacctctgaaatggaaaaaattattacccaggtttttgagatggatatttctaagcagttgcatgcctatgaggtggaatatcatgtgctacaggatgagcttcaggaatcttcatattcctgtgaggatagtgaaactttggagaagctggagagggccaatagccaactgaaaagacaaaacatggacctcctagaaaaattacaggtagctcatactaaaatccaggccttggaatcaaacctggaaaatcttttgacgagagagaccaaaatgaagtctttaatccggaccctggaacaagaaaaaatggcttatcaaaagacagtggagcaactccggaagctgctgcccgcggatgctctagtcaattgtgacctgttgctgagagacctaaactgcaaccctaacaacaaagccaagataggaaataagccataattgaagaggcacggcctcagcagaaagtgctccttagaatactacagagaggaagagcctgcatgtcgctggcccaaggctggaccctgaagctgatggaaccacctaatactggtgctgagcgcctagtcacagcaggtggacctcgtgctcatcagagcatgccaatcctaagccattggacatatgtagactggtttttgttgttgctatgtacatataaatatatatataaaatgaacatagttcatgctttcagataaaatgagtagatgtatatttagattaatttttttagtcagaacttcatgaaatccacaccaaaggaaaggtaaactgaaatttcccttggacatatgtgaaatctttttgtctttatagtgaaacaaagccagagcatctttgtatattgcaatatacttgaaaaaaatgaatgtatttttttctccaaagaacagcatgtttcactcaatggtgaaaaggtggaaacatttatgtaactttatgtgtatctgtcttgatatctactgacattgtctatatgaggaaaatgattactggtcatgctcctgtgagttttttgggaaggtagggtcatttctccctgcctgctttgtgccaactagcatgttgcatctacatgcattatgagtctggttaggcattactttaaacatacataaagagacagtaggacattgtggctgagtctacccagctcaaggtaaaggagaatgttgctaattttttagcaaactagaccagcattattactcaaactaaaaatatcacacctgaaaaatttaatttaggacctaaaatgtctagattagctttctgctttttttatttgaataactcattcagttgtgaatgaattcctctttatttggtgccacagtcaccaaatgacaaggatttgccactttcccaccaaattgtgagtgcttgtaatttaggtctctctaccttaaattcagtataaggaaacgtaattatgattgattttttccaaagatgacaagctgtgttgaaatacattttttcttttgaccaattgacagaatctaataagctttaataatcttccccttttatgtgaaaagttttgagaactgtgaaatgtttaggaacaaactgttgaaatccattggaagggaaaaaagaaagtggtaccagtgttaccagctcaactaaaacctgcaattctgcatttcaactcttcacttcctcagcctacaaatagctcattagatgacattcacgcatgctgggtataggcaaggaaagtaattttcaaagtacatttgcagttctctttttcagagatgattctatgatagtgcctctgaaagttgatgcagcatttttgcctttccaaaaagtatttatcctcactgctttttgcagtacttgtattttcacagatggattatctggggtaattttcttcaaagggagtttgttatacacagtgaaaatgtattatagagtagaatagtaaagctctaggggtttcagaaagctttgatgaacagatgacaaacatctgaaaccccctccgcactgttacccagtgtgtatataatgacttgttatagctcagtgtgcccttgaatccatacagtttcttaaaagacaataaaatcttattaataaagttaatgtaacttctaagttctagaaaatgctgattctgtctgccccattcaattgggggctactaattgatttgttgcttggatttcctgagaatttctctatttgtaggaggggttttttctttttacggtctgttgatgacaattactttatgggtgtgatgcaccgatggtagccaaggaatctgttggggaagttcggaaagaaaccttttctttcttttattcagtttaaagtaaactttatcctggatgtttagaatcaacattaagagttatattatggtgttcagagattaagctgacttggatacaatattttcttttgaaaatgaattttctttttcatttgtgatttttaaaaaatgttgcaccagttatgcttcatgcatcgttacatcttcatcaggttaatgtaatgtctagttcctttgcaataaatatattgctgcagcttt

SEQ ID NO: 31125 - DNA, 6339 bp, Homo sapiens
  source 1..6339: mol_type = unassigned DNA
gcggccgcggggaccctcggcgtggtcctctgaccctgcaaacccgcgacggaggaaggggaggtcctgcccgaggcgccagcccaaggaggaggatgcccatttaacccgccctcgcctgccgggcgcttgcctcggtgcccgccgccggagcctccgagccgcgcccgtggaagtgctgcatggggcagggctgctgaagcgcggagttcggggtcgcgccgctcccaggcaggcgcgggagcccggtgcggcagttggcacagtttcggcggcgccttctgcgcgggagtggggggcgcggtgcgcccggccggcctccgcggtgccctggtgaggcgagagttatggagccgcccagctgcattcaggatgagccgttcccgcaccccctggagcccgagccgggcgtctcagctcagcccggccccgggaagccaagcgataagcggttccggctgtggtacgttggggggtcgtgcctggaccacaggaccacgctgcctatgctgccctggctcatggccgagatccgcaggcgcagccagaagcccgaggcgggcggctgcggggcgccggcggcccgagaggtgatcctggtgctcagcgcgcccttcctgcgttgcgtccccgcgccgggcgctggggcctcggggggcactagtccgtcggccacgcagcccaacccggcggtattcatcttcgagcacaaggcgcagcatatctcgcgcttcatccacaacagccacgacctcacctactttgcctacctgatcaaggcgcagcccgacgaccccgagtcgcagatggcctgccacgttttccgcgccacagaccccagccaggttcctgatgttattagcagcataaggcaattatctaaagcggccatgaaagaggatgccaaacccagcaaagataatgaggacgccttttacaactctcagaagttcgaagtcctgtactgtggaaaggtgaccgtgacccacaagaaggccccctcaagcctcatcgatgactgcatggagaagttcagcctgcacgaacagcagcgcctgaagatccaaggggagcagcgcggtccggacccaggagaggacctggctgacttggaggtggtggtgcccgggtcccccggagactgcctgccggaggaggctgacggcaccgacacccaccttggcttacctgccggggccagccagcctgccctgaccagctctcgggtctgcttccctgagcggattttggaagattctggctttgatgagcagcaggagtttcggtctcggtgcagcagtgtcaccggcgtgcaacggagagttcacgagggcagccagaaatcccagccgcgacggagacacgcgagcgcacccagtcacgtccagccctcggactcggagaagaacaggaccatgctcttccaggttgggcgatttgagattaaccttatcagtccagacactaaatcagttgtgctagaaaagaattttaaagatatctcctcttgttctcagggtataaagcatgtggatcactttggctttatctgccgggagtctccagagcctggacttagccagtatatttgttatgtattccagtgtgccagcgaatctctggttgatgaggtaatgctgactctgaaacaggccttcagtacggcggctgccctgcagagtgccaagacgcagattaaactgtgtgaggcctgcccgatgcactctttgcataagctctgtgaaaggattgaaggtctctacccaccaagagccaagctggtgatacagaggcatctctcatcactgacagataatgagcaagctgacatctttgaaagagttcagaaaatgaagccagtcagtgaccaggaagaaaatgaacttgtgattttacacctgaggcagctgtgtgaagccaagcagaagacacacgtgcacatcggggaaggcccttctactatttcaaatagtacaatcccagaaaatgcaacaagcagtggaaggttcaaacttgacattctgaaaaataaagctaagagatccttaactagctccctggaaaatatcttctcaaggggagctaacagaatgagaggtcggcttggaagtgtggacagttttgaacggtccaacagtcttgcttcagagaaggactactcaccaggggattctccaccagggacaccgccagcgtccccaccgtcctcagcttggcaaacgtttcccgaagaggattccgactccccgcagtttcgaagacgggcacacacgttcagccacccaccttcaagcacaaagagaaagctgaatttgcaggatgggagggctcagggtgtgcgttcccctctgctgaggcagagctccagtgaacagtgcagcaatctttcgtcagttcgacgcatgtacaaggagagtaattcttcctccagtcttccaagtcttcacacttccttctctgccccttccttcactgccccctctttcctgaaaagcttttaccagaattcaggtagactgtccccacagtatgaaaatgaaatcagtgatggagaagggagaaaaaggacctcatctacctgcagcaatgagtccctaagtgtgggaggaacctctgtcactcctcgccggatctcctggcggcagcgcattttcctcagggttgcttctcccatgaacaaatctccctcagcaatgcaacagcaagatggattggacaggaacgagctgctgccactgtcccccctctctccaaccatggaggaggaaccgctggttgtattcctgtctggggaggatgacccagaaaagattgaagaaagaaagaaatcaaaagaactgaggagcttgtggagaaaagctatacaccaacaaatcttgttacttcgaatggaaaaagaaaaccagaaacttgaagcaagcagagatgaactccagtccagaaaagttaaattagactatgaagaagttggtgcatgtcagaaagaggtcttaataacttgggataagaagttgttaaactgcagagctaaaatcagatgtgatatggaagatattcatactcttcttaaagaaggagttcccaaaagtcgacgaggagaaatttggcagtttctggctttacagtaccgactcagacacagattgcctaataaacaacagcctcctgacatatcctataaggaacttttgaagcagctcactgctcagcagcatgcgattctcgtggatttaggaaggacgtttcctactcacccttacttttcagtacagcttgggccaggacagctgtcactgtttaacctcctgaaagcctattctttgctggacaaagaagtgggatactgtcaggggatcagctttgtggctggagtcctgcttctgcacatgagtgaagagcaagcctttgaaatgctgaaattcctcatgtatgacctcggcttccgcaagcagtacagacctgacatgatgtcgctgcagattcaaatgtaccagctgtccaggctccttcatgactatcacagagatctctacaatcaccttgaagaaaatgaaatcagccccagtctttatgctgccccctggttcctcacattgtttgcctctcagttttcattaggatttgtagccagagtttttgatattatttttcttcagggaactgaagttatattcaaggttgcactcagcctactgagcagccaagagacacttataatggaatgtgagagctttgaaaatattgttgagtttcttaaaaacacgctacctgatatgaatacctctgaaatggaaaaaattattacccaggtttttgagatggatatttctaagcagttgcatgcctatgaggtggaatatcatgtgctacaggatgagcttcaggaatcttcatattcctgtgaggatagtgaaactttggagaagctggagagggccaatagccaactgaaaagacaaaacatggacctcctagaaaaattacaggtagctcatactaaaatccaggccttggaatcaaacctggaaaatcttttgacgagagagaccaaaatgaagtctttaatccggaccctggaacaagaaaaaatggcttatcaaaagacagtggagcaactccggaagctgctgcccgcggatgctctagtcaattgtgacctgttgctgagagacctaaactgcaaccctaacaacaaagccaagataggaaataagccataattgaagaggcacggcctcagcagaaagtgctccttagaatactacagagaggaagagcctgcatgtcgctggcccaaggctggaccctgaagctgatggaaccacctaatactggtgctgagcgcctagtcacagcaggtggacctcgtgctcatcagagcatgccaatcctaagccattggacatatgtagactggtttttgttgttgctatgtacatataaatatatatataaaatgaacatagttcatgctttcagataaaatgagtagatgtatatttagattaatttttttagtcagaacttcatgaaatccacaccaaaggaaaggtaaactgaaatttcccttggacatatgtgaaatctttttgtctttatagtgaaacaaagccagagcatctttgtatattgcaatatacttgaaaaaaatgaatgtatttttttctccaaagaacagcatgtttcactcaatggtgaaaaggtggaaacatttatgtaactttatgtgtatctgtcttgatatctactgacattgtctatatgaggaaaatgattactggtcatgctcctgtgagttttttgggaaggtagggtcatttctccctgcctgctttgtgccaactagcatgttgcatctacatgcattatgagtctggttaggcattactttaaacatacataaagagacagtaggacattgtggctgagtctacccagctcaaggtaaaggagaatgttgctaattttttagcaaactagaccagcattattactcaaactaaaaatatcacacctgaaaaatttaatttaggacctaaaatgtctagattagctttctgctttttttatttgaataactcattcagttgtgaatgaattcctctttatttggtgccacagtcaccaaatgacaaggatttgccactttcccaccaaattgtgagtgcttgtaatttaggtctctctaccttaaattcagtataaggaaacgtaattatgattgattttttccaaagatgacaagctgtgttgaaatacattttttcttttgaccaattgacagaatctaataagctttaataatcttccccttttatgtgaaaagttttgagaactgtgaaatgtttaggaacaaactgttgaaatccattggaagggaaaaaagaaagtggtaccagtgttaccagctcaactaaaacctgcaattctgcatttcaactcttcacttcctcagcctacaaatagctcattagatgacattcacgcatgctgggtataggcaaggaaagtaattttcaaagtacatttgcagttctctttttcagagatgattctatgatagtgcctctgaaagttgatgcagcatttttgcctttccaaaaagtatttatcctcactgctttttgcagtacttgtattttcacagatggattatctggggtaattttcttcaaagggagtttgttatacacagtgaaaatgtattatagagtagaatagtaaagctctaggggtttcagaaagctttgatgaacagatgacaaacatctgaaaccccctccgcactgttacccagtgtgtatataatgacttgttatagctcagtgtgcccttgaatccatacagtttcttaaaagacaataaaatcttattaataaagttaatgtaacttctaagttctagaaaatgctgattctgtctgccccattcaattgggggctactaattgatttgttgcttggatttcctgagaatttctctatttgtaggaggggttttttctttttacggtctgttgatgacaattactttatgggtgtgatgcaccgatggtagccaaggaatctgttggggaagttcggaaagaaaccttttctttcttttattcagtttaaagtaaactttatcctggatgtttagaatcaacattaagagttatattatggtgttcagagattaagctgacttggatacaatattttcttttgaaaatgaattttctttttcatttgtgatttttaaaaaatgttgcaccagttatgcttcatgcatcgttacatcttcatcaggttaatgtaatgtctagttcctttgcaataaatatattgctgcagcttt

SEQ ID NO: 31126 - DNA, 1465 bp, Homo sapiens
  source 1..1465: mol_type = unassigned DNA
ccggcagggggagcgaggaggaagggaaccgcggccgggccagcggaggcggcggagcgcaccgcccaccagggctcagggtcctccgaccgggtgaagcttcgctggctgccaggatccccggcagggatgcacttcagcaccgtcaccagggacatggaagccttcacggccagcagcctgagcagcctgggggccgcggggggcttcccgggcgccgcgtcgcccggcgccgacccgtacggcccgcgcgagcccccgccgccgccgccgcgctacgacccgtgcgccgccgccgcccccggcgccccgggcccgccgccgccgccgcacgcctacccgtttgcgccggccgccggggccgccaccagcgccgccgccgagcccgagggccccggggccagctgcgcggccgcagccaaggcgccggtgaagaagaacgcgaaggtggccggtgtgagcgtgcagctagagatgaaggcgctgtgggacgagttcaaccagctgggcaccgagatgatcgtcaccaaggccggcaggcggatgtttcccaccttccaagtgaagctcttcggcatggatcccatggccgactatatgctgctcatggacttcgtgccggtggacgataagcgctaccggtacgccttccacagctcctcctggctggtggcggggaaggccgaccctgccacgccaggccgcgtgcactaccacccggactcgcctgccaagggcgcgcagtggatgaagcaaatcgtgtccttcgacaagctcaagctgaccaacaacctactggacgacaacggccacattattctgaattccatgcacagataccagccccgcttccacgtggtctatgtggacccacgcaaagatagcgagaaatatgccgaggagaacttcaaaacctttgtgttcgaggagacacgattcaccgcggtcactgcctaccagaaccatcggatcacgcagctcaagattgccagcaatcccttcgcgaaaggcttccgggactgtgaccctgaggactggccccggaaccaccggcccggcgcactgccgctcatgagcgccttcgcgcgctcgcggaaccccgtggcttccccgacgcagcccagcggcacggagaaaggtggacatgtcctgaaggacaaggaagtgaaagctgagacgtctaggaacacaccagagagagaagtggagcttctgagggatgcaggtggctgtgtgaacctggggctcccctgccccgcagagtgccaacccttcaatacccagggcctggtggctgggaggaccgcaggtgaccgtctttgttgaatgctgaggccgggccatgggcacatggagttgtcgtgtttcccttcactttggttcatgtttgaaatttccaaaattaaaaaaacagtgacttgttcagtaaattccaatatgaataaagtgcatgttttgtaataaa

SEQ ID NO: 31127 - DNA, 2082 bp, Homo sapiens
  source 1..2082: mol_type = unassigned DNA
ccggcagggggagcgaggaggaagggaaccgcggccgggccagcggaggcggcggagcgcaccgcccaccagggctcagggtcctccgaccgggtgaagcttcgctggctgccaggatccccggcagggatgcacttcagcaccgtcaccagggacatggaagccttcacggccagcagcctgagcagcctgggggccgcggggggcttcccgggcgccgcgtcgcccggcgccgacccgtacggcccgcgcgagcccccgccgccgccgccgcgctacgacccgtgcgccgccgccgcccccggcgccccgggcccgccgccgccgccgcacgcctacccgtttgcgccggccgccggggccgccaccagcgccgccgccgagcccgagggccccggggccagctgcgcggccgcagccaaggcgccggtgaagaagaacgcgaaggtggccggtgtgagcgtgcagctagagatgaaggcgctgtgggacgagttcaaccagctgggcaccgagatgatcgtcaccaaggccggcaggcggatgtttcccaccttccaagtgaagctcttcggcatggatcccatggccgactatatgctgctcatggacttcgtgccggtggacgataagcgctaccggtacgccttccacagctcctcctggctggtggcggggaaggccgaccctgccacgccaggccgcgtgcactaccacccggactcgcctgccaagggcgcgcagtggatgaagcaaatcgtgtccttcgacaagctcaagctgaccaacaacctactggacgacaacggccacattattctgaattccatgcacagataccagccccgcttccacgtggtctatgtggacccacgcaaagatagcgagaaatatgccgaggagaacttcaaaacctttgtgttcgaggagacacgattcaccgcggtcactgcctaccagaaccatcggatcacgcagctcaagattgccagcaatcccttcgcgaaaggcttccgggactgtgaccctgaggactggccccggaaccaccggcccggcgcactgccgctcatgagcgccttcgcgcgctcgcggaaccccgtggcttccccgacgcagcccagcggcacggagaaagacgcggctgaggcccggcgagaattccagcgcgacgcgggcgggccagcagtgctcggggacccggcgcatcctccgcagctgctggcccgggtgctaagcccctcgctgcccggggccggcggcgccggcggcttagtcccgctgcccggcgcgcccggaggccggcccagtcccccgaaccccgagctgcgcctggaggcgcccggcgcatcggagccgctgcaccaccacccctacaaatatccggccgccgcctacgaccactatctcggggccaagagccggccggcgccctacccgctgcccggcctgcgtggccacggctaccacccgcacgcgcatccgcaccaccaccaccaccccgtgagtccagccgccgcggccgccgccgccgctgccgcagctgccgcggccgccaacatgtactcgtcggccggagccgcgccgcccggctcctacgactattgccccagataacacgggccctgtcgcgctcccgccccggtcctgcacagccccgaagttcgccgggcccggccaccctgccccaagggcaagcaaggaatacgttcccccagccccaggggccaccgcggctctccccttccccagcctcgaagccatgggggccccctcgccacccccagccccttgggctatcgaagtatccggttccccagtccctggagccaccgcgggtccttccccggccccgagggccaagggggtccccgcccgccagtgccaaagcgcccggtcggaggcggaaggaagtgatatttattgttctccccgagaccgcgtcgcccgcggcccggccggcagttgcagtgtagacagcccgagagccccgcctgcaggcggtgtagatacatgtagatactgtagatactgtagataccgccccggcgccgacttgataaacggtttcgcctcttttgg

SEQ ID NO: 31128 - DNA, 1538 bp, Homo sapiens
  source 1..1538: mol_type = unassigned DNA
ccggcagggggagcgaggaggaagggaaccgcggccgggccagcggaggcggcggagcgcaccgcccaccagggctcagggtcctccgaccgggtgaagcttcgctggctgccaggatccccggcagggatgcacttcagcaccgtcaccagggacatggaagccttcacggccagcagcctgagcagcctgggggccgcggggggcttcccgggcgccgcgtcgcccggcgccgacccgtacggcccgcgcgagcccccgccgccgccgccgcgctacgacccgtgcgccgccgccgcccccggcgccccgggcccgccgccgccgccgcacgcctacccgtttgcgccggccgccggggccgccaccagcgccgccgccgagcccgagggccccggggccagctgcgcggccgcagccaaggcgccggtgaagaagaacgcgaaggtggccggtgtgagcgtgcagctagagatgaaggcgctgtgggacgagttcaaccagctgggcaccgagatgatcgtcaccaaggccggcaggcggatgtttcccaccttccaagtgaagctcttcggcatggatcccatggccgactatatgctgctcatggacttcgtgccggtggacgataagcgctaccggtacgccttccacagctcctcctggctggtggcggggaaggccgaccctgccacgccaggccgcgtgcactaccacccggactcgcctgccaagggcgcgcagtggatgaagcaaatcgtgtccttcgacaagctcaagctgaccaacaacctactggacgacaacggccacattattctgaattccatgcacagataccagccccgcttccacgtggtctatgtggacccacgcaaagatagcgagaaatatgccgaggagaacttcaaaacctttgtgttcgaggagacacgattcaccgcggtcactgcctaccagaaccatcggatcacgcagctcaagattgccagcaatcccttcgcgaaaggcttccgggactgtgaccctgaggactggccccggaaccaccggcccggcgcactgccgctcatgagcgccttcgcgcgctcgcggaaccccgtggcttccccgacgcagcccagcggcacggagaaagggctggtcacagaaggctctgggctccaacctggcttgctggacgtgctcttgaagcccccaagtaagaagtctgagtccctgagaccaccacactgcaaggacacttgaaggtactcaggtttcagagcccaagtcaggaggtcaagtgtgcatgcaagaggtggcaggggacagatgtgctgctgttcccaggccacctgcacagctggatggtggaagcagttcacttaaaggccatgagttactcgggaggctgaggcaggaggatcacttgagcctattagttggaggctgcagtaagctatgatcatgccactgcactccagcctgggtgacagagtgagacccccactgtccctggtctcttaaaagaaaaaacaaacaaacaaaccaaaaaa

SEQ ID NO: 31129 - DNA, 1548 bp, Homo sapiens
  source 1..1548: mol_type = unassigned DNA
acgagtggtgaccaccccttccagcaggcaggttcccagccccagccaagcagtgtttctccaggagccggacagcctctctgtctccatggcagccttcctatctgctggcctcggcatacttgcaccctcagagacctaccccctacctacaaccagctctggctgggagccccggctggggtcaccattcccatcaggcccttgcaccagctctactggggcccaagctgtggccgagcccactgggcagggccccaagaacccacgtgtgtccagagtgacagttcagctggagatgaagcctctgtgggaggaattcaaccagctgggcactgagatgatcgtcaccaaggcaggcaggaggatgttcccccccttccaggtgaagatcctgggcatggactccctggccgactacgccctgctcatggacttcatccccctggacgacaagagatacaggtatgccttccacagctcggcctggctggtggcgggcaaggcagacccagccacacctggccgcgtgcacttccaccccgactcgccagccaagggtgcccagtggatgcgccagattgtgtcctttgacaagctcaagctgaccaacaacctgctggatgacaatggccacatcattctcaactctatgcaccgctaccagccccgtttccacgtggtcttcgtggacccacgcaaggacagtgagcgctatgcccaggagaacttcaagtccttcatcttcacagagacccagttcacagcagtgacagcctatcagaaccacaggatcacccagctgaaaatcgccagcaacccttttgccaaaggctttagagagagtgacctggactcctggcctgtggccccacggcccctgctcagtgtcccagcccggagtcacagcagcctcagtccctgtgtgctgaagggtgccacagacagggagaaagaccccaacaaagcttcagcttccacctccaagacccctgcttggctccatcatcagctgctgcccccacctgaggtcctgctggccccggccacctacaggcctgtcacgtatcagagcctgtactctggagccccgagccacctagggatcccaaggacccgaccagcaccataccccctccccaacatccgggctgatagggatcaaggaggcctgcctctcccagctgggctggggctcctgtcccccactgtggtgtgcctggggcctggccaggactcccagtgatgccagaagccctggggggaagccctgctaccctggaccttacaccgggtgtgggaatcagcctctgccccgccccctccagccccatctctgtctcaaggagagcagggtaggtgaaagtctagagaaagaggctacctgcccagggtcacagcaaggctgggaccatggcaagcttggaaccaggacttctatctcccaaccccagcagcctgaatactgtgccctcttgctttgggggtaactcccgaaaaccctgccttacctctcccttccccctaacattaaactatttggcatga

SEQ ID NO: 31130 - DNA, 3492 bp, Homo sapiens
  source 1..3492: mol_type = unassigned DNA
tctttccggcttctttgcaaaaggatagaaccgtctcgaccagggcactaggactggaagatcgggctgtgtctaggccgctgtccgcgaaatccgagacgttttttcagcttggctaggaccgacttcgctgccggtttgagctttctctgcactcgggggtctcctgccgtcctcgaccggtggcgtaacttgggaagagattctgagcagagcactggttcagattctgaggtcctcactgagcggacttcctgctccttcagtactcacactgacctggcctctggtgctgcaggccctgtgcctgctgccatgtcttccatggaggagattcaggtggagctgcaatgtgctgacctctggaagcggttccatgatattggaactgaaatgatcatcaccaaagcaggcaggaggatgtttcctgccatgagagtgaaaatcactggcctagatccacatcagcagtactacatagcaatggacattgtgcctgtggacaataaaagatacagatatgtgtatcatagctccaagtggatggtggctggcaatgctgattcccctgtgcccccaagagtttatatacaccctgattctctagcttctggagacacctggatgagacaggtggtcagttttgacaaactcaagcttaccaacaatgagttggatgatcaaggacatatcattctgcactctatgcacaaataccagcctcgagttcatgtgattcgcaaagacttcagcagtgacctttcacccactaagcctgttcctgttggggatggggtgaaaacgttcaactttcctgagactgtgttcaccacagttacggcctatcagaatcagcagattaccagattaaaaattgaccgaaacccttttgctaaaggattcagagattctgggagaaacagaactggacttgaagccatcatggagacatatgcattctggagacctcctgtgcgcacactcaccttcgaagacttcaccaccatgcagaagcagcaaggaggcagcacaggcacttccccaaccacctccagcactgggacaccatccccttcggcttcttctcatcttttatctccatcctgttctcctccaacttttcatctggcccccaacactttcaatgtgggctgccgagaaagccagctgtgtaatctaaacctctctgattatccaccatgtgcccgaagcaacatggctgccttgcagagctacccagggctgagtgacagtggctacaacaggcttcagagtggcaccacttcagccactcagccctctgaaaccttcatgcctcagaggactccatccctgatctcaggaataccaactcctccctcgttgcctggcaacagcaagatggaagcctacggtggccagctggggtcctttcccacttcccagtttcagtatgtcatgcaggcaggcaatgctgcctccagctcctcatcaccacacatgttcgggggcagccacatgcagcagagctcctacaatgccttctcccttcacaacccttacaacctgtatggatacaatttccccacttcccctaggctagctgcaagcccggaaaaactgagcgcctctcaaagcactttactctgttcttctccttccaacggggcctttggagagaggcagtacctgccgtcagggatggagcacagcatgcacatgattagcccttcacccaataaccaacaggcaaccaacacttgtgatggccggcagtatggggcagttccaggctcctcctcccagatgtccgtgcacatggtttaaaggccagtccaaacaccacggagcatttggcaatcaaggccccagagtctccgtggtcagatcctcctctttgggagtccagtgtctttgaaaaacaggaaccgtgttttttttttttttttttttctggccgaagacatatacccaagaacaagagatacctttaagccagtgaaggatacttgcgatagaatcatccgcaactcagtggccattcttctgccttcccagaccttagttttataaagcattgtctgttccagagtggcctttgaagagactgaataatcacttcgtcataatgttaagggagatgctagtgtgtggcagccatgaaaagttacacatacacacccacatacagacagacctacctatacatacgtgcacacacacatacatattcatacacaattcatacacatgcaatcatacatgcacactgactctgaactgggtgaactctgtggagggaggcccagaatgggtgctttcaccaagaatttgtctgtgtacaactctagatggagtgggccagcagtagctgccagtctttctcccctgcagcttcctctgcttctggaatgaaccatgtatcctggagaccctcccaatggatgagagtggaaagacatcagtacaactggacttggcttccggaaaaagattgcttttgaactttggctctcttcacttgtatgctatcattgatattcccagtggtgcccgtggaaagagggagaaagagaagctgaacaggagaaagacaaacagaaagaatagagaacaggaacgaggtggagagcaagactgacagagaaagtgtgagcaatgatgagaattttaattcaccaaggagacgtgtttttggtttgtccccccaaaccccgcccgccccactacaggttatggaaagaatcatggcattactgaggagtaaacctctctggcacactgagcatggtcagggcattggtcagagggacagagcaaggaatgcatcctgagcccacagctttgaccactgtgatccagaagagaggtgcactacgtgggaagtgctgattccacagcatgcagcctggtaggggaaggaaaataaaagggtgtgaagaaggaatagttttataatctcggaagatgataccaagagcagaggcaacaaatagaggcctggcctccaggtgccggatccagacacctgacctagaatgcctgcccgctatccctgtggcaggaaatatcccctcatgtcccagggaattgcagatgggtcttctatacccttctacctgcccttagatctccatttttatcaaatagtacattgcattttgaagttttgggttttgtccttcatctttccctttcccttcaaatcttttaatggtaagaaagcaagtgaagcttggtgcaagctaaaatttttaaatggtgtggaaatgcaaataataccaagtaaaataatacagatattattaaagtttctggttttgaggtgttgtagataaatgtatttatgtgcctagtggggaatccaatattatgaatatgaaaaagggggcaataaaagggtatgtaaaatatgtatgaagaaaaggtgtacaaaaatttgcccttatgcacggaactctgtttctaagtgccaagcacagaaagccgctaaataaaatctttgcaattgtt

SEQ ID NO: 31131 - DNA, 3594 bp, Homo sapiens
  source 1..3594: mol_type = unassigned DNA
tctttccggcttctttgcaaaaggatagaaccgtctcgaccagggcactaggactggaagatcgggctgtgtctaggccgctgtccgcgaaatccgagacgttttttcagcttggctaggaccgacttcgctgccggtttgagctttctctgcactcgggggtctcctgccgtcctcgaccggtggcgtaacttgggaagagattctgagcagagcactggttcagattctgaggtcctcactgagcggacttcctgctccttcagtactcacactgacctggcctctggtgctgcaggccctgtgcctgctgccatgtcttccatggaggagattcaggtggagctgcaatgtgctgacctctggaagcggttccatgatattggaactgaaatgatcatcaccaaagcaggcaggaggatgtttcctgccatgagagtgaaaatcactggcctagatccacatcagcagtactacatagcaatggacattgtgcctgtggacaataaaagatacagatatgtgtatcatagctccaagtggatggtggctggcaatgctgattcccctgtgcccccaagagtttatatacaccctgattctctagcttctggagacacctggatgagacaggtggtcagttttgacaaactcaagcttaccaacaatgagttggatgatcaaggacatatcattctgcactctatgcacaaataccagcctcgagttcatgtgattcgcaaagacttcagcagtgacctttcacccactaagcctgttcctgttggggatggggtgaaaacgttcaactttcctgagactgtgttcaccacagttacggcctatcagaatcagcagattaccagattaaaaattgaccgaaacccttttgctaaaggattcagagattctgggagaaacagaactggacttgaagccatcatggagacatatgcattctggagacctcctgtgcgcacactcaccttcgaagacttcaccaccatgcagaagcagcaagcctcaaagaagacttctcaaggatacacagtgaatcagcactcctcagagacagatgccattgaattatacgagagaagagtctggctcatggaacgaagaggcagcacaggcacttccccaaccacctccagcactgggacaccatccccttcggcttcttctcatcttttatctccatcctgttctcctccaacttttcatctggcccccaacactttcaatgtgggctgccgagaaagccagctgtgtaatctaaacctctctgattatccaccatgtgcccgaagcaacatggctgccttgcagagctacccagggctgagtgacagtggctacaacaggcttcagagtggcaccacttcagccactcagccctctgaaaccttcatgcctcagaggactccatccctgatctcaggaataccaactcctccctcgttgcctggcaacagcaagatggaagcctacggtggccagctggggtcctttcccacttcccagtttcagtatgtcatgcaggcaggcaatgctgcctccagctcctcatcaccacacatgttcgggggcagccacatgcagcagagctcctacaatgccttctcccttcacaacccttacaacctgtatggatacaatttccccacttcccctaggctagctgcaagcccggaaaaactgagcgcctctcaaagcactttactctgttcttctccttccaacggggcctttggagagaggcagtacctgccgtcagggatggagcacagcatgcacatgattagcccttcacccaataaccaacaggcaaccaacacttgtgatggccggcagtatggggcagttccaggctcctcctcccagatgtccgtgcacatggtttaaaggccagtccaaacaccacggagcatttggcaatcaaggccccagagtctccgtggtcagatcctcctctttgggagtccagtgtctttgaaaaacaggaaccgtgttttttttttttttttttttctggccgaagacatatacccaagaacaagagatacctttaagccagtgaaggatacttgcgatagaatcatccgcaactcagtggccattcttctgccttcccagaccttagttttataaagcattgtctgttccagagtggcctttgaagagactgaataatcacttcgtcataatgttaagggagatgctagtgtgtggcagccatgaaaagttacacatacacacccacatacagacagacctacctatacatacgtgcacacacacatacatattcatacacaattcatacacatgcaatcatacatgcacactgactctgaactgggtgaactctgtggagggaggcccagaatgggtgctttcaccaagaatttgtctgtgtacaactctagatggagtgggccagcagtagctgccagtctttctcccctgcagcttcctctgcttctggaatgaaccatgtatcctggagaccctcccaatggatgagagtggaaagacatcagtacaactggacttggcttccggaaaaagattgcttttgaactttggctctcttcacttgtatgctatcattgatattcccagtggtgcccgtggaaagagggagaaagagaagctgaacaggagaaagacaaacagaaagaatagagaacaggaacgaggtggagagcaagactgacagagaaagtgtgagcaatgatgagaattttaattcaccaaggagacgtgtttttggtttgtccccccaaaccccgcccgccccactacaggttatggaaagaatcatggcattactgaggagtaaacctctctggcacactgagcatggtcagggcattggtcagagggacagagcaaggaatgcatcctgagcccacagctttgaccactgtgatccagaagagaggtgcactacgtgggaagtgctgattccacagcatgcagcctggtaggggaaggaaaataaaagggtgtgaagaaggaatagttttataatctcggaagatgataccaagagcagaggcaacaaatagaggcctggcctccaggtgccggatccagacacctgacctagaatgcctgcccgctatccctgtggcaggaaatatcccctcatgtcccagggaattgcagatgggtcttctatacccttctacctgcccttagatctccatttttatcaaatagtacattgcattttgaagttttgggttttgtccttcatctttccctttcccttcaaatcttttaatggtaagaaagcaagtgaagcttggtgcaagctaaaatttttaaatggtgtggaaatgcaaataataccaagtaaaataatacagatattattaaagtttctggttttgaggtgttgtagataaatgtatttatgtgcctagtggggaatccaatattatgaatatgaaaaagggggcaataaaagggtatgtaaaatatgtatgaagaaaaggtgtacaaaaatttgcccttatgcacggaactctgtttctaagtgccaagcacagaaagccgctaaataaaatctttgcaattgttttc

SEQ ID NO: 31132 - DNA, 3504 bp, Homo sapiens
  source 1..3504: mol_type = unassigned DNA
ggcggctaaaatgagtgaaaggagaagatctgcagtcgccctgagctcgcgagcacatgccttctccgttgaagccttgatcggctcaaataaaaaacggaaactgcgagactgggaggagaaggggctggacctgtctatggaggcgctgagccccgcgggcccactcggagacacggaggacgcggcggcacacggcctggagcctcacccggattctgagcagagcactggttcagattctgaggtcctcactgagcggacttcctgctccttcagtactcacactgacctggcctctggtgctgcaggccctgtgcctgctgccatgtcttccatggaggagattcaggtggagctgcaatgtgctgacctctggaagcggttccatgatattggaactgaaatgatcatcaccaaagcaggcaggaggatgtttcctgccatgagagtgaaaatcactggcctagatccacatcagcagtactacatagcaatggacattgtgcctgtggacaataaaagatacagatatgtgtatcatagctccaagtggatggtggctggcaatgctgattcccctgtgcccccaagagtttatatacaccctgattctctagcttctggagacacctggatgagacaggtggtcagttttgacaaactcaagcttaccaacaatgagttggatgatcaaggacatatcattctgcactctatgcacaaataccagcctcgagttcatgtgattcgcaaagacttcagcagtgacctttcacccactaagcctgttcctgttggggatggggtgaaaacgttcaactttcctgagactgtgttcaccacagttacggcctatcagaatcagcagattaccagattaaaaattgaccgaaacccttttgctaaaggattcagagattctgggagaaacagaactggacttgaagccatcatggagacatatgcattctggagacctcctgtgcgcacactcaccttcgaagacttcaccaccatgcagaagcagcaaggaggcagcacaggcacttccccaaccacctccagcactgggacaccatccccttcggcttcttctcatcttttatctccatcctgttctcctccaacttttcatctggcccccaacactttcaatgtgggctgccgagaaagccagctgtgtaatctaaacctctctgattatccaccatgtgcccgaagcaacatggctgccttgcagagctacccagggctgagtgacagtggctacaacaggcttcagagtggcaccacttcagccactcagccctctgaaaccttcatgcctcagaggactccatccctgatctcaggaataccaactcctccctcgttgcctggcaacagcaagatggaagcctacggtggccagctggggtcctttcccacttcccagtttcagtatgtcatgcaggcaggcaatgctgcctccagctcctcatcaccacacatgttcgggggcagccacatgcagcagagctcctacaatgccttctcccttcacaacccttacaacctgtatggatacaatttccccacttcccctaggctagctgcaagcccggaaaaactgagcgcctctcaaagcactttactctgttcttctccttccaacggggcctttggagagaggcagtacctgccgtcagggatggagcacagcatgcacatgattagcccttcacccaataaccaacaggcaaccaacacttgtgatggccggcagtatggggcagttccaggctcctcctcccagatgtccgtgcacatggtttaaaggccagtccaaacaccacggagcatttggcaatcaaggccccagagtctccgtggtcagatcctcctctttgggagtccagtgtctttgaaaaacaggaaccgtgttttttttttttttttttttctggccgaagacatatacccaagaacaagagatacctttaagccagtgaaggatacttgcgatagaatcatccgcaactcagtggccattcttctgccttcccagaccttagttttataaagcattgtctgttccagagtggcctttgaagagactgaataatcacttcgtcataatgttaagggagatgctagtgtgtggcagccatgaaaagttacacatacacacccacatacagacagacctacctatacatacgtgcacacacacatacatattcatacacaattcatacacatgcaatcatacatgcacactgactctgaactgggtgaactctgtggagggaggcccagaatgggtgctttcaccaagaatttgtctgtgtacaactctagatggagtgggccagcagtagctgccagtctttctcccctgcagcttcctctgcttctggaatgaaccatgtatcctggagaccctcccaatggatgagagtggaaagacatcagtacaactggacttggcttccggaaaaagattgcttttgaactttggctctcttcacttgtatgctatcattgatattcccagtggtgcccgtggaaagagggagaaagagaagctgaacaggagaaagacaaacagaaagaatagagaacaggaacgaggtggagagcaagactgacagagaaagtgtgagcaatgatgagaattttaattcaccaaggagacgtgtttttggtttgtccccccaaaccccgcccgccccactacaggttatggaaagaatcatggcattactgaggagtaaacctctctggcacactgagcatggtcagggcattggtcagagggacagagcaaggaatgcatcctgagcccacagctttgaccactgtgatccagaagagaggtgcactacgtgggaagtgctgattccacagcatgcagcctggtaggggaaggaaaataaaagggtgtgaagaaggaatagttttataatctcggaagatgataccaagagcagaggcaacaaatagaggcctggcctccaggtgccggatccagacacctgacctagaatgcctgcccgctatccctgtggcaggaaatatcccctcatgtcccagggaattgcagatgggtcttctatacccttctacctgcccttagatctccatttttatcaaatagtacattgcattttgaagttttgggttttgtccttcatctttccctttcccttcaaatcttttaatggtaagaaagcaagtgaagcttggtgcaagctaaaatttttaaatggtgtggaaatgcaaataataccaagtaaaataatacagatattattaaagtttctggttttgaggtgttgtagataaatgtatttatgtgcctagtggggaatccaatattatgaatatgaaaaagggggcaataaaagggtatgtaaaatatgtatgaagaaaaggtgtacaaaaatttgcccttatgcacggaactctgtttctaagtgccaagcacagaaagccgctaaataaaatctttgcaattgt

SEQ ID NO: 31133 - DNA, 762 bp, Homo sapiens
  source 1..762: mol_type = unassigned DNA
agagtcagaactggacttgaagccatcatggagacatatgcattctggagacctcctgtgcgcacactcaccttcgaagacttcaccaccatgcagaagcagcaagcctcaaagaagacttctcaaggatacacagtgaatcagcactcctcagagacagatgccattgaattatacgagagaagagtctggctcatggaacgaagaggcagcacaggcacttccccaaccacctccagcactgggacaccatccccttcggcttcttctcatcttttatctccatcctgttctcctccaacttttcatctggcccccaacactttcaatgtgggctgccgagaaagccagctgtgtaatctaaacctctctgattatccaccatgtgcccgaagcaacatggctgccttgcagagctacccagggctgagtgacagtggctacaacaggcttcagagtggcaccacttcagccactcagccctctgaaaccttcatgcctcagaggactccatccctgatctcaggaataccaactcctccctcgttgcctacagcaagatggaagcctacggtggccagctggggtcctttcccacttcccagtttcagtatgtcatgcaggcaggcaatgctgcctccagctcctcatcaccacacatgttcgggggcagccacatgcagcagagctcctacaatgccttctcccttcacaacccttacaacctgtatggatacaatttccccacttcccctaggctag

SEQ ID NO: 31134 - DNA, 2678 bp, Homo sapiens
  source 1..2678: mol_type = unassigned DNA
gggagaaacagaactggacttgaagccatcatggagacatatgcattctggagacctcctgtgcgcacactcaccttcgaagacttcaccaccatgcagaagcagcaagcctcaaagaagacttctcaaggatacacagtgaatcagcactcctcagagacagatgccattgaattatacgagagaagagtctggctcatggaacgaagaggcagcacaggcacttccccaaccacctccagcactgggacaccatccccttcggcttcttctcatcttttatctccatcctgttctcctccaacttttcatctggcccccaacactttcaatgtgggctgccgagaaagccagctgtgtaatctaaacctctctgattatccaccatgtgcccgaagcaacatggctgccttgcagagctacccagggctgagtgacagtggctacaacaggcttcagagtggcaccacttcagccactcagccctctgaaaccttcatgcctcagaggactccatccctgatctcaggaataccaactcctccctcgttgcctggcaacagcaagatggaagcctacggtggccagctggggtcctttcccacttcccagtttcagtatgtcatgcaggcaggcaatgctgcctccagctcctcatcaccacacatgttcgggggcagccacatgcagcagagctcctacaatgccttctcccttcacaacccttacaacctgtatggatacaatttccccacttcccctaggctagctgcaagcccggaaaaactgagcgcctctcaaagcactttactctgttcttctccttccaacggggcctttggagagaggcagtacctgccgtcagggatggagcacagcatgcacatgattagcccttcacccaataaccaacaggcaaccaacacttgtgatggccggcagtatggggcagttccaggctcctcctcccagatgtccgtgcacatggtttaaaggccagtccaaacaccacggagcatttggcaatcaaggccccagagtctccgtggtcagatcctcctctttgggagtccagtgtctttgaaaaacaggaaccgtgttttttttttttttttttttctggccgaagacatatacccaagaacaagagatacctttaagccagtgaaggatacttgcgatagaatcatccgcaactcagtggccattcttctgccttcccagaccttagttttataaagcattgtctgttccagagtggcctttgaagagactgaataatcacttcgtcataatgttaagggagatgctagtgtgtggcagccatgaaaagttacacatacacacccacatacagacagacctacctatacatacgtgcacacacacatacatattcatacacaattcatacacatgcaatcatacatgcacactgactctgaactgggtgaactctgtggagggaggcccagaatgggtgctttcaccaagaatttgtctgtgtacaactctagatggagtgggccagcagtagctgccagtctttctcccctgcagcttcctctgcttctggaatgaaccatgtatcctggagaccctcccaatggatgagagtggaaagacatcagtacaactggacttggcttccggaaaaagattgcttttgaactttggctctcttcacttgtatgctatcattgatattcccagtggtgcccgtggaaagagggagaaagagaagctgaacaggagaaagacaaacagaaagaatagagaacaggaacgaggtggagagcaagactgacagagaaagtgtgagcaatgatgagaattttaattcaccaaggagacgtgtttttggtttgtccccccaaaccccgcccgccccactacaggttatggaaagaatcatggcattactgaggagtaaacctctctggcacactgagcatggtcagggcattggtcagagggacagagcaaggaatgcatcctgagcccacagctttgaccactgtgatccagaagagaggtgcactacgtgggaagtgctgattccacagcatgcagcctggtaggggaaggaaaataaaagggtgtgaagaaggaatagttttataatctcggaagatgataccaagagcagaggcaacaaatagaggcctggcctccaggtgccggatccagacacctgacctagaatgcctgcccgctatccctgtggcaggaaatatcccctcatgtcccagggaattgcagatgggtcttctatacccttctacctgcccttagatctccatttttatcaaatagtacattgcattttgaagttttgggttttgtccttcatctttccctttcccttcaaatcttttaatggtaagaaagcaagtgaagcttggtgcaagctaaaatttttaaatggtgtggaaatgcaaataataccaagtaaaataatacagatattattaaagtttctggttttgaggtgttgtagataaatgtatttatgtgcctagtggggaatccaatattatgaatatgaaaaagggggcaataaaagggtatgtaaaatatgtatgaagaaaaggtgtacaaaaatttgcccttatgcacggaactctgtttctaagtgccaagcacagaaagccgctaaataaaatctttgcaattgt

SEQ ID NO: 31135 - DNA, 2822 bp, Homo sapiens
  source 1..2822: mol_type = unassigned DNA
tagaagcaggcaagttgggtaacggctctcggcaaagttcgagaagtgcctatggccatgagtgagctgggcactcggaagcccagcgatggcactgtttctcatctgctcaatgtggtggagagtgagcttcaggcagggagggaaaaaggcgaccctacggagaagcaacttcagatcatcctggaggatgcacctctctggcagagattcaaggaagtcactaatgagatgattgtgaccaagaatggcagacggatgtttccagtcctaaagattagtgtcacagggttggaccccaatgccatgtactccctcctgctggactttgtccctacggacagtcaccgctggaagtacgtcaacggggaatgggtgcccgctggcaagccagaggtctccagccacagctgcgtctacattcacccggactcccccaactttggggcccactggatgaaagctcccatctccttcagcaaagtgaagctgaccaacaagctcaatggaggcgggcagataatgttgaattctctgcataaatatgaaccccaggttcacatagtgcgtgttggaagtgcccatcgaatggtaacaaactgctccttccctgaaacccagttcatagccgtgactgcctatcagaatgaggagataacggctctcaaaatcaagtacaatccttttgccaaagccttcttggatgccaaggaaagaaatcacctaagagacgtaccggaggctatctctgagagccagcatgtgacctattctcacttgggaggctggatcttttccaatccagatggagtgtgcacagcaggaaactccaattaccagtatgccgctcctctgcctctgcctgctccccacacccaccatggctgtgagcactattcgggtctccgaggacaccggcaggctccctacccttctgcgtacatgcacagaaaccattctccctcagtgaatttgatagaaagctcaagcaataatctgcaagttttctcgggacctgacagctggacttccttatcctccacaccccatgccagcatcctgtctgtaccccacaccaacggaccaatcaatccagggcccagcccctacccgtgcctgtggaccatcagcaatggtgccggaggccccagtgggccaggcccggaggtgcacgccagcaccccaggagcatttctcctcggaaacccagctgtgacttcacccccttctgtgctctccacccaagcacccacttcggctggtgtggaggttctgggggagccctcgctaaccagcattgctgtgtccacctggacagcagtggcctcgcatcccttcgcgggctggggtggcccaggagcgggtgggcaccattctccttcctcactggatggttaagcaggatcctaggagcctctttgcacagcgatccttccatgtgtagagtgcttagaaaccccatcaactgatctagtgagtcagactgtggaatctcccttcccactagctggaggtggaggtgggttattacagaagtcatactgggagagggttcagtttggatgatgctagttagatcatttgcatctctccaccattttcttctgcactcccattttctctgcagcttattcttgccatgcttaggtgacagaagtttgttaagtaccatccttgtgccctgcctcttattctcaaatcgttctggaaagcctcacttccttttctgtggagaaggtgcaaagctgttaaatgagctcagagtttacctagctaaggccactgcttcctgctttgtgaagcctggaaagtatgtgtggccacagggctcaggttcacacttctgctttgagaccaggatggggtgtaagccatagagtaaggttaacaaaaagaataaagctaatcatgtattacaaacagcagtgtgcccagacttgtggaaatgaagtcatgtcactcctctgctcagaaaccttcaatggttcaccattaccagtggaatgaagtcaattctcctcactataactgggtgtggtagtttaagcctataatctcagcccttttggaggccaaggtaagaggatcgcttgaggtcaggagttcgagaccagcttgtgcaacaaagtgagagcctgtctctacaaaaaatagtcatgcacacaaaattagctgggcatggtggcctgtgcctatagtcccaactacttagaggaggatcgcttgatctcaggaggttgaggctgcagtgaattatgattgtggcattgcactccagcctgggtggtagatcaaggctttgtttcatttgaaaaaaaagaaagaaagaaagaaagaaagaaatcctactacgagcgatcacaccatctggcctgaaaccacttccccagcttaggtccctctgttatcctgttggcctcctatgtattggtcaaggcaggcatctctgttctctgaacattcattgcactttcccacctctataccttgcctgtgccttagtgtcctcttttttccagttcacctgtgcgaatccgacccacctcccagagcctggctgaaacgtcactccctgcatccaacatctgatctgctgagatatgtctgatctatctctgctcgctgttctcccgttgtttttgcctctgccatagagctcacctcattttgccttgtatttttgttacctgtgagtgtgtctctccctattagactgtaagcctctcgagggtgaggcctagccttcttgtctttgtaacccacagcagctggtactgtgccttgcctattgtaggtgcccaataaacatttgctgaactgaa

SEQ ID NO: 31136 - DNA, 2631 bp, Homo sapiens
  source 1..2631: mol_type = unassigned DNA
tagaagcaggcaagttgggtaacggctctcggcaaagttcgagaagtgcctatggccatgagtgagctgggcactcggaagcccagcgatggcactgtttctcatctgctcaatgtggtggagagtgagcttcaggcagggagggaaaaaggcgaccctacggagaagcaacttcagatcatcctggaggatgcacctctctggcagagattcaaggaagtcactaatgagatgattgtgaccaagaatggcagacggatgtttccagtcctaaagattagtgtcacagggttggaccccaatgccatgtactccctcctgctggactttgtccctacggacagtcaccgctggaagtacgtcaacggggaatgggtgcccgctggcaagccagaggtctccagccacagctgcgtctacattcacccggactcccccaactttggggcccactggatgaaagctcccatctccttcagcaaagtgaagctgaccaacaagctcaatggaggcgggcagataatgttgaattctctgcataaatatgaaccccaggttcacatagtgcgtgttggaagtgcccatcgaatggtaacaaactgctccttccctgaaacccagttcatagccgtgactgcctatcagaatgaggagataacggctctcaaaatcaagtacaatccttttgccaaagccttcttggatgccaaggaaagaaatcacctaagagacgtaccggaggctatctctgagagccagcatgtgacctattctcacttgaatttgatagaaagctcaagcaataatctgcaagttttctcgggacctgacagctggacttccttatcctccacaccccatgccagcatcctgtctgtaccccacaccaacggaccaatcaatccagggcccagcccctacccgtgcctgtggaccatcagcaatggtgccggaggccccagtgggccaggcccggaggtgcacgccagcaccccaggagcatttctcctcggaaacccagctgtgacttcacccccttctgtgctctccacccaagcacccacttcggctggtgtggaggttctgggggagccctcgctaaccagcattgctgtgtccacctggacagcagtggcctcgcatcccttcgcgggctggggtggcccaggagcgggtgggcaccattctccttcctcactggatggttaagcaggatcctaggagcctctttgcacagcgatccttccatgtgtagagtgcttagaaaccccatcaactgatctagtgagtcagactgtggaatctcccttcccactagctggaggtggaggtgggttattacagaagtcatactgggagagggttcagtttggatgatgctagttagatcatttgcatctctccaccattttcttctgcactcccattttctctgcagcttattcttgccatgcttaggtgacagaagtttgttaagtaccatccttgtgccctgcctcttattctcaaatcgttctggaaagcctcacttccttttctgtggagaaggtgcaaagctgttaaatgagctcagagtttacctagctaaggccactgcttcctgctttgtgaagcctggaaagtatgtgtggccacagggctcaggttcacacttctgctttgagaccaggatggggtgtaagccatagagtaaggttaacaaaaagaataaagctaatcatgtattacaaacagcagtgtgcccagacttgtggaaatgaagtcatgtcactcctctgctcagaaaccttcaatggttcaccattaccagtggaatgaagtcaattctcctcactataactgggtgtggtagtttaagcctataatctcagcccttttggaggccaaggtaagaggatcgcttgaggtcaggagttcgagaccagcttgtgcaacaaagtgagagcctgtctctacaaaaaatagtcatgcacacaaaattagctgggcatggtggcctgtgcctatagtcccaactacttagaggaggatcgcttgatctcaggaggttgaggctgcagtgaattatgattgtggcattgcactccagcctgggtggtagatcaaggctttgtttcatttgaaaaaaaagaaagaaagaaagaaagaaagaaatcctactacgagcgatcacaccatctggcctgaaaccacttccccagcttaggtccctctgttatcctgttggcctcctatgtattggtcaaggcaggcatctctgttctctgaacattcattgcactttcccacctctataccttgcctgtgccttagtgtcctcttttttccagttcacctgtgcgaatccgacccacctcccagagcctggctgaaacgtcactccctgcatccaacatctgatctgctgagatatgtctgatctatctctgctcgctgttctcccgttgtttttgcctctgccatagagctcacctcattttgccttgtatttttgttacctgtgagtgtgtctctccctattagactgtaagcctctcgagggtgaggcctagccttcttgtctttgtaacccacagcagctggtactgtgccttgcctattgtaggtgcccaataaacatttgctgaactg

SEQ ID NO: 31137 - DNA, 2377 bp, Homo sapiens
  source 1..2377: mol_type = unassigned DNA
acggatgtttccagtcctaaagattagtgtcacagggttggaccccaatgccatgtactccctcctgctggactttgtccctacggacagtcaccgctggaagtacgtcaacggggaatgggtgcccgctggcaagccagaggtctccagccacagctgcgtctacattcacccggactcccccaactttggggcccactggatgaaagctcccatctccttcagcaaagtgaagctgaccaacaagctcaatggaggcgggcagataatgttgaattctctgcataaatatgaaccccaggttcacatagtgcgtgttggaagtgcccatcgaatggtaacaaactgctccttccctgaaacccagttcatagccgtgactgcctatcagaatgaggagataacggctctcaaaatcaagtacaatccttttgccaaagccttcttggatgccaaggaaagaaatcacctaagagacgtaccggaggctatctctgagagccagcatgtgacctattctcacttgaatttgatagaaagctcaagcaataatctgcaagttttctcgggacctgacagctggacttccttatcctccacaccccatgccagcatcctgtctgtaccccacaccaacggaccaatcaatccagggcccagcccctacccgtgcctgtggaccatcagcaatggtgccggaggccccagtgggccaggcccggaggtgcacgccagcaccccaggagcatttctcctcggaaacccagctgtgacttcacccccttctgtgctctccacccaagcacccacttcggctggtgtggaggttctgggggagccctcgctaaccagcattgctgtgtccacctggacagcagtggcctcgcatcccttcgcgggctggggtggcccaggagcgggtgggcaccattctccttcctcactggatggttaagcaggatcctaggagcctctttgcacagcgatccttccatgtgtagagtgcttagaaaccccatcaactgatctagtgagtcagactgtggaatctcccttcccactagctggaggtggaggtgggttattacagaagtcatactgggagagggttcagtttggatgatgctagttagatcatttgcatctctccaccattttcttctgcactcccattttctctgcagcttattcttgccatgcttaggtgacagaagtttgttaagtaccatccttgtgccctgcctcttattctcaaatcgttctggaaagcctcacttccttttctgtggagaaggtgcaaagctgttaaatgagctcagagtttacctagctaaggccactgcttcctgctttgtgaagcctggaaagtatgtgtggccacagggctcaggttcacacttctgctttgagaccaggatggggtgtaagccatagagtaaggttaacaaaaagaataaagctaatcatgtattacaaacagcagtgtgcccagacttgtggaaatgaagtcatgtcactcctctgctcagaaaccttcaatggttcaccattaccagtggaatgaagtcaattctcctcactataactgggtgtggtagtttaagcctataatctcagcccttttggaggccaaggtaagaggatcgcttgaggtcaggagttcgagaccagcttgtgcaacaaagtgagagcctgtctctacaaaaaatagtcatgcacacaaaattagctgggcatggtggcctgtgcctatagtcccaactacttagaggaggatcgcttgatctcaggaggttgaggctgcagtgaattatgattgtggcattgcactccagcctgggtggtagatcaaggctttgtttcatttgaaaaaaaagaaagaaagaaagaaagaaagaaatcctactacgagcgatcacaccatctggcctgaaaccacttccccagcttaggtccctctgttatcctgttggcctcctatgtattggtcaaggcaggcatctctgttctctgaacattcattgcactttcccacctctataccttgcctgtgccttagtgtcctcttttttccagttcacctgtgcgaatccgacccacctcccagagcctggctgaaacgtcactccctgcatccaacatctgatctgctgagatatgtctgatctatctctgctcgctgttctcccgttgtttttgcctctgccatagagctcacctcattttgccttgtatttttgttacctgtgagtgtgtctctccctattagactgtaagcctctcgagggtgaggcctagccttcttgtctttgtaacccacagcagctggtactgtgccttgcctattgtaggtgcccaataaacatttgctgaactg

SEQ ID NO: 31138 - DNA, 1757 bp, Homo sapiens
  source 1..1757: mol_type = unassigned DNA
aaaagagagggaattaaactggttttacagaagacaaagggttctgtttgcccatgtgtatcctacttttactaacacttcttgtctttgtaaatgcaagataacggctctcaaaatcaagtacaatccttttgccaaagccttcttggatgccaaggaaagaaatcacctaagagacgtaccggaggctatctctgagagccagcatgtgacctattctcacttgggaggctggatcttttccaatccagatggagtgtgcacagcaggaaactccaattaccagtatgccgctcctctgcctctgcctgctccccacacccaccatggctgtgagcactattcgggtctccgaggacaccggcaggctccctacccttctgcgtacatgcacagaaaccattctccctcagtgaatttgatagaaagctcaagcaataatctgcaagttttctcgggacctgacagctggacttccttatcctccacaccccatgccagcatcctgtctgtaccccacaccaacggaccaatcaatccagggcccagcccctacccgtgcctgtggaccatcagcaatggtgccggaggccccagtgggccaggcccggaggtgcacgccagcaccccaggagcatttctcctcggaaacccagctgtgacttcacccccttctgtgctctccacccaagcacccacttcggctggtgtggaggttctgggggagccctcgctaaccagcattgctgtgtccacctggacagcagtggcctcgcatcccttcgcgggctggggtggcccaggagcgggtgggcaccattctccttcctcactggatggttaagcaggatcctaggagcctctttgcacagcgatccttccatgtgtagagtgcttagaaaccccatcaactgatctagtgagtcagactgtggaatctcccttcccactagctggaggtggaggtgggttattacagaagtcatactgggagagggttcagtttggatgatgctagttagatcatttgcatctctccaccattttcttctgcactcccattttctctgcagcttattcttgccatgcttaggtgacagaagtttgttaagtaccatccttgtgccctgcctcttattctcaaatcgttctggaaagcctcacttccttttctgtggagaaggtgcaaagctgttaaatgagctcagagtttacctagctaaggccactgcttcctgctttgtgaagcctggaaagtatgtgtggccacagggctcaggttcacacttctgctttgagaccaggatggggtgtaagccatagagtaaggttaacaaaaagaataaagctaatcatgtattacaaacagcagtgtgcccagacttgtggaaatgaagtcatgtcactcctctgctcagaaaccttcaatggttcaccattaccagtggaatgaagtcaattctcctcactataactgggtgtggtagtttaagcctataatctcagcccttttggaggccaaggtaagaggatcgcttgaggtcaggagttcgagaccagcttgtgcaacaaagtgagagcctgtctctacaaaaaatagtcatgcacacaaaattagctgggcatggtggcctgtgcctatagtcccaactacttagaggaggatcgcttgatctcaggaggttgaggctgcagtgaattatgattgtggcattgcactccagcctgggtggtagatcaaggctttgtttcatttg

SEQ ID NO: 31139 - DNA, 1871 bp, Homo sapiens
  source 1..1871: mol_type = unassigned DNA
ggatcgccgccgccagcaaattaaggcgcagggcagcgagcgccagggctcactgtccgtagttccgcgccgcgctccccacgccagcgtcctagcagccgcgctcggctggtggccacctcagcctgggacatcccggctgtccccagccccagagggaggaaggacgcggaggggatgctccaggaccccaggactttgtgcagttgatgctcgtttccgccttcgggctgtgcagactgtcgtcctgccgagcgccccggggcgtgcgcacccgccgtagtgctcggtgggccctctcctctccggctgccttcgaagtctctgcggctctggggctttgcggtggggaatagaggccagtgtgcagctctggagtcgttggagctgacacttctggagtccctggccccgctgtgactgctctcggaaactttgagctgtgtttcgggtctttgtctcccttggggaatctggacggcagttcggacgaccccgtccctggccaggaccgcgtgctggggaccatggagttcacggcgtcccccaagccccaactctcctctcgggccaacgccttctccattgccgcgctcatgtcgagcggcggctctaaggagaaggaggcgacggagaacacaatcaaacccctggagcaatttgtggagaagtcgtcctgtgcccagcccctgggtgagctgaccagcctggatgctcatggggagtttggtggaggcagtggcagcagcccgtcctcctcctctctgtgcactgagccactgatccccaccacccccatcatccccagtgaggaaatggccaaaattgcctgcagcctggagaccaaggagctttgggacaaattccatgagctgggcaccgagatgatcatcaccaagtcgggcaggaggatgtttccaaccatccgggtgtccttttcgggggtggatcctgaggccaagtacatagtcctgatggacatcgtccctgtggacaacaagaggtaccgctacgcctaccaccggtcctcctggctggtggctggcaaggccgacccgccgttgccagccaggctctatgtgcatccagattctccttttaccggtgagcaactactcaaacagatggtgtcttttgaaaaggtgaaactcaccaacaatgaactggatcaacatggccatataattttgaactcaatgcataagtaccagccaagggtgcacatcattaagaagaaagaccacacagcctcattgctcaacctgaagtctgaagaatttagaactttcatctttccagaaacagtttttacggcagtcactgcctaccagaatcaactgataacgaagctgaaaatagatagcaatccttttgccaaaggattccgggattcctccaggctcactgacattgagagggaaagtgtggagagcctgattcaaaagcattcctatgcacgctcacccatccgtacctacggaggagaagaagatgtcttgggggatgagagtcagacaaccccaaatcgagggtcagcctttacaacatctgataatttgtctctcagctcctgggtatcatcttcttccagttttcctgggtttcagcacccacagtccctgactgctcttggcaccagcacagcatccatagcaacacccattcctcaccccatccagggttctctgccaccatatagccgactgggaatgcctctgacaccatcggccattgccagctccatgcaagggagtggccccacattcccttcattccacatgccgcgataccatcactattttcagcaggggccctatgctgccattcaaggactacgccattcctctgctgtgatgacgccatttgtatga

SEQ ID NO: 31140 - DNA, 2572 bp, Homo sapiens
  source 1..2572: mol_type = unassigned DNA
cggcccgctggagaggaagcccgagagctgccgcgcgcctgccggacgagggcgtagaagccaggcgtcagagcccgggctccggtggggtcccccacccggccctcgggtcccccgccccctgctccctgcccatcccagcccacgcgaccctctcgcgcgcggaggggcgggtcctcgacggctacgggaaggtgccagcccgccccggatgggcatcgtggagccgggttgcggagacatgctgacgggcaccgagccgatgccggggagcgacgagggccgggcgcctggcgccgacccgcagcaccgctacttctacccggagccgggcgcgcaggacgcggacgagcgtcgcgggggcggcagcctggggtctccctacccggggggcgccttggtgcccgccccgccgagccgcttccttggagcctacgcctacccgccgcgaccccaggcggccggcttccccggcgcgggcgagtccttcccgccgcccgcggacgccgagggctaccagccgggcgagggctacgccgccccggacccgcgcgccgggctctacccggggccgcgtgaggactacgcgctacccgcgggactggaggtgtcggggaaactgagggtcgcgctcaacaaccacctgttgtggtccaagtttaatcagcaccagacagagatgatcatcaccaagcagggacggcggatgttcccattcctgtcatttactgtggccgggctggagcccaccagccactacaggatgtttgtggacgtggtcttggtggaccagcaccactggcggtaccagagcggcaagtgggtgcagtgtggaaaggccgagggcagcatgccaggaaaccgcctgtacgtccacccggactcccccaacacaggagcgcactggatgcgccaggaagtttcatttgggaaactaaagctcacaaacaacaagggggcgtccaacaatgtgacccagatgattgtgctccagtccctccataagtaccagccccggctgcatatcgttgaggtgaacgacggagagccagaggcagcctgcaacgcttccaacacgcatatctttactttccaagaaacccagttcattgccgtgactgcctaccagaatgccgagattactcagctgaaaattgataataacccctttgccaaaggattccgggagaactttgagtccatgtacacatctgttgacaccagcatcccctccccgcctggacccaactgtcaattccttgggggagatcactactctcctctcctacccaaccagtatcctgttcccagccgcttctaccccgaccttcctggccaggcgaaggatgtggttccccaggcttactggctgggggccccccgggaccacagctatgaggctgagtttcgagcagtcagcatgaagcctgcattcttgccctctgcccctgggcccaccatgtcctactaccgaggccaggaggtcctggcacctggagctggctggcctgtggcaccccagtaccctcccaagatgggcccggccagctggttccgccctatgcggactctgcccatggaacccggccctggaggctcagagggacggggaccagaggaccagggtccccccttggtgtggactgagattgcccccatccggccggaatccagtgattcaggactgggcgaaggagactctaagaggaggcgcgtgtccccctatccttccagtggtgacagctcctcccctgctggggccccttctccttttgataaggaagctgaaggacagttttataactattttcccaactgagcagatgacatgatgaaaggaacagaaacagtgttattaggttggaggacaccgactaatttgggaaacggatgaaggactgagaaggcccccgctccctctggcccttctctgtttagtagttggttggggaagtggggctcaagaaggattttggggttcaccagatgcttcctggcccacgatgaaacctgagaggggtgtccccttgccccatcctctgccctaactacagtcgtttacctggtgctgcgtcttgcttttggtttccagctggagaaaagaagacaagaaagtcttgggcatgaaggagctttttgcatctagtgggtgggaggggtcaggtgtgggacatgggagcaggagactccactttcttcctttgtacagtaactttcaaccttttcgttggcatgtgtgttaatccctgatccaaaaagaacaaatacacgtatgttataaccatcagcccgccagggtcagggaaaggactcacctgactttggacagctggcctgggctccccctgctcaaacacagtggggatcagagaaaaggggctggaaaggggggaatggcccacatctcaagaagcaagatattgtttgtggtggttgtgtgtgggtgtgtgttttttctttttctttctttttattttttttgaatgggggaggctatttattgtactgagagtggtgtctggatatattccttttgtcttcatcactttctgaaaataaacataaaactgtt

SEQ ID NO: 31141 - DNA, 2100 bp, Homo sapiens
  source 1..2100: mol_type = unassigned DNA
ctaagacagagccctcaacatctgcttcctctggctgcggcagcgacagcggctacggcaacagctctgaaagtctggaagagaaagatattcaaatggagcttcaaggatctgaactgtggaaaagattccatgacatcgggactgagatgatcattactaaagcgggcaggttcggttctgcccaagctgttcacaagggtcacacacattaggcacttaatttaccgctctggcggatgttcccctctgttcgggtcaaggtgaaagggttggatccagggaagcagtaccatgtggccatcgatgtggtgccggtggattccaaacgctataggtacgtctatcacagctcacagtggatggtagctgggaatacagaccatttgtgcatcattcctagattctatgttcacccggactcaccctgctcgggagagacctggatgcggcagatcatcagctttgatcgcatgaaactcaccaacaatgagatggatgacaaaggccacatcattctgcaatccatgcataagtacaaaccccgagtgcacgtgatagagcaaggcagcagtgttgacctgtcccagattcagtccttgcccactgaaggtgttaaaacattctcctttaaagaaactgagttcaccacagtaacggcttaccaaaaccaacagattacgaaactaaaaatagaaagaaatccttttgctaaaggatttagagatactggaagaaacaggggtgtattggatgggcttttagagacctacccatggaggccttctttcactctcgattttaaaacctttggcgcagacacacaaagtggaagcagtggctcatctccagtgacctctagtggaggggccccctctcctttgaactccttactttctccactttgcttttcacctatgtttcatttacctacaagctcccttggaatgccctgtccagaggcatacctgcccaatgtcaacctgcctctatgctacaagatttgtccaactaatttttggcaacagcaacctcttgttttaccggctcctgaaagactagcaagcagcaacagttctcagtctttagccccactcatgatggaagtgcctatgttatcttccctgggggtcaccaattcaaaaagcggttcatctgaagactccagtgatcagtatctacaagcacctaattctaccaatcaaatgttatatggattacagtcacctggaaatatttttctgccaaactccatcaccccagaagcacttagttgctcctttcatccttcctatgacttttatagatacaatttctctatgccatctagactgataagtggttccaaccatcttaaagtgaatgacgacagtcaagtttcttttggagaaggcaaatgtaatcatgttcattggtatccagcaattaaccattacctttagtaagacaatagcatttctagaacaattacatgtaaacaaatattttctttatttgtagccaaagaaatttcaacagttattgggcttaaaaagcatcattacaatacagtatttctttgttatacatttaaagatttaaagtgccttatcaaataatattcatgaagagttgtttataatgtcaaatgaaacctacaggaatctctgattacagtggccttgagcttcaaaatgagatatgcaataaatattatttgatgatactccaccagtgaaaattgatgctaagtgatgggattttcaattatactgaagctagttcaccacgttaactgcattttacacattgacaatgacaaaaagaagatggatgtaattctcatgaaagcagtgaagcaatttcagttttaaaaatgaagatcggctttcatgtaattatctagtagttgtagaagaaaatttaattatttgtttgcctcatgcctttatactttgctgttgaagaaactactaatctcaatttaagatacaaataaggacacaaactttcaagtattatattttatttatctttgtagcctaaagaccatttaatcttgaaggaacacaaagatcaaatgaaaagtaaaacactctaaataaatttgcttttattttc

SEQ ID NO: 31142 - DNA, 2249 bp, Homo sapiens
  source 1..2249: mol_type = unassigned DNA
gcaaagaatcccttcaccccctccagggatggctctgagctctcgggcgcgtgccttctccgtggaagccttggtggggagacccagcaaaagaaaactccaagacccaatacaggcggagcagcctgagctgcgggagaaaaagggcggagaggaagaggaggagagaaggagcagcgctgcagggaagagcgagccgcttgaaaaacaacctaagacagagccctcaacatctgcttcctctggctgcggcagcgacagcggctacggcaacagctctgaaagtctggaagagaaagatattcaaatggagcttcaaggatctgaactgtggaaaagattccatgacatcgggactgagatgatcattactaaagcgggcaggcggatgttcccctctgttcgggtcaaggtgaaagggttggatccagggaagcagtaccatgtggccatcgatgtggtgccggtggattccaaacgctataggtacgtctatcacagctcacagtggatggtagctgggaatacagaccatttgtgcatcattcctagattctatgttcacccggactcaccctgctcgggagagacctggatgcggcagatcatcagctttgatcgcatgaaactcaccaacaatgagatggatgacaaaggccacatcattctgcaatccatgcataagtacaaaccccgagtgcacgtgatagagcaaggcagcagtgttgacctgtcccagattcagtccttgcccactgaaggtgttaaaacattctcctttaaagaaactgagttcaccacagtaacggcttaccaaaaccaacagattacgaaactaaaaatagaaagaaatccttttgctaaaggatttagagatactggaagaaacaggggtgtattggatgggcttttagagacctacccatggaggccttctttcactctcgattttaaaacctttggcgcagacacacaaagtggaagcagtggctcatctccagtgacctctagtggaggggccccctctcctttgaactccttactttctccactttgcttttcacctatgtttcatttacctacaagctcccttggaatgccctgtccagaggcatacctgcccaatgtcaacctgcctctatgctacaagatttgtccaactaatttttggcaacagcaacctcttgttttaccggctcctgaaagactagcaagcagcaacagttctcagtctttagccccactcatgatggaagtgcctatgttatcttccctgggggtcaccaattcaaaaagcggttcatctgaagactccagtgatcagtatctacaagcacctaattctaccaatcaaatgttatatggattacagtcacctggaaatatttttctgccaaactccatcaccccagaagcacttagttgctcctttcatccttcctatgacttttatagatacaatttctctatgccatctagactgataagtggttccaaccatcttaaagtgaatgacgacagtcaagtttcttttggagaaggcaaatgtaatcatgttcattggtatccagcaattaaccattacctttagtaagacaatagcatttctagaacaattacatgtaaacaaatattttctttatttgtagccaaagaaatttcaacagttattgggcttaaaaagcatcattacaatacagtatttctttgttatacatttaaagatttaaagtgccttatcaaataatattcatgaagagttgtttataatgtcaaatgaaacctacaggaatctctgattacagtggccttgagcttcaaaatgagatatgcaataaatattatttgatgatactccaccagtgaaaattgatgctaagtgatgggattttcaattatactgaagctagttcaccacgttaactgcattttacacattgacaatgacaaaaagaagatggatgtaattctcatgaaagcagtgaagcaatttcagttttaaaaatgaagatcggctttcatgtaattatctagtagttgtagaagaaaatttaattatttgtttgcctcatgcctttatactttgctgttgaagaaactactaatctcaatttaagatacaaataaggacacaaactttcaagtattatattttatttatctttgtagcctaaagaccatttaatcttgaaggaacacaaagatcaaatgaaaagtaaaacactctaaataaatttgcttttattttc

SEQ ID NO: 31143 - DNA, 1959 bp, Homo sapiens
  source 1..1959: mol_type = unassigned DNA
cttctctgggctcttgagaagagctgctgcaggcatttgcagagtgaatgagctctgactgagacttgacttcagaaccactgggctggcctggcctcttgacacagcaacacactgcttcttgccttccagggatggctctgagctctcgggcgcgtgccttctccgtggaagccttggtggggagacccagcaaaagaaaactccaagacccaatacaggcggagcagcctgagctgcgggagaaaaagggcggagaggaagaggaggagagaaggagcagcgctgcagggaagagcgagccgcttgaaaaacaacctaagacagagccctcaacatctgcttcctctggctgcggcagcgacagcggctacggcaacagctctgaaagtctggaagagaaagatattcaaatggagcttcaaggatctgaactgtggaaaagattccatgacatcgggactgagatgatcattactaaagcgggcaggcggatgttcccctctgttcgggtcaaggtgaaagggttggatccagggaagcagtaccatgtggccatcgatgtggtgccggtggattccaaacgctataggtacgtctatcacagctcacagtggatggtagctgggaatacagaccatttgtgcatcattcctagattctatgttcacccggactcaccctgctcgggagagacctggatgcggcagatcatcagctttgatcgcatgaaactcaccaacaatgagatggatgacaaaggccacatcattctgcaatccatgcataagtacaaaccccgagtgcacgtgatagagcaaggcagcagtgttgacctgtcccagattcagtccttgcccactgaaggtgttaaaacattctcctttaaagaaactgagttcaccacagtaacggcttaccaaaaccaacagattacgaaactaaaaatagaaagaaatccttttgctaaaggatttagagatactggaagaaacaggggtgtattggatgggcttttagagacctacccatggaggccttctttcactctcgattttaaaacctttggcgcagacacacaaagtggaagcagtggctcatctccagtgacctctagtggaggggccccctctcctttgaactccttactttctccactttgcttttcacctatgtttcatttacctacaagctcccttggaatgccctgtccagaggcatacctgcccaatgtcaacctgcctctatgctacaagatttgtccaactaatttttggcaacagcaacctcttgttttaccggctcctgaaagactagcaagcagcaacagttctcagtctttagccccactcatgatggaagtgcctatgttatcttccctgggggtcaccaattcaaaaagcggttcatctgaagactccagtgatcagtatctacaagcacctaattctaccaatcaaatgttatatggattacagtcacctggaaatatttttctgccaaactccatcaccccagaagcacttagttgctcctttcatccttcctatgacttttatagatacaatttctctatgccatctagactgataagtggttccaaccatcttaaagtgaatgacgacagtcaagtttcttttggagaaggcaaatgtaatcatgttcattggtatccagcaattaaccattacctttagtaagacaatagcatttctagaacaattacatgtaaacaaatattttctttatttgtagccaaagaaatttcaacagttattgggcttaaaaagcatcattacaatacagtatttctttgttatacatttaaagatttaaagtgccttatcaaataatattcatgaagagttgtttataatgtcaaatgaaacctacaggaatctctgattacagtggccttgagcttcaaaatgagatatgcaataaatattatttgatgat

SEQ ID NO: 31144 - DNA, 2351 bp, Homo sapiens
  source 1..2351: mol_type = unassigned DNA
cttctctgggctcttgagaagagctgctgcaggcatttgcagagtgaatgagctctgactgagacttgacttcagaaccactgggctggcctggcctcttgacacagcaacacactgcttcttgccttccagggatggctctgagctctcgggcgcgtgccttctccgtggaagccttggtggggagacccagcaaaagaaaactccaagacccaatacaggcggagcagcctgagctgcgggagaaaaagggcggagaggaagaggaggagagaaggagcagcgctgcagggaagagcgagccgcttgaaaaacaacctaagacagagccctcaacatctgcttcctctggctgcggcagcgacagcggctacggcaacagctctgaaagtctggaagagaaagatattcaaatggagcttcaaggatctgaactgtggaaaagattccatgacatcgggactgagatgatcattactaaagcgggcggatgttcccctctgttcgggtcaaggtgaaagggttggatccagggaagcagtaccatgtggccatcgatgtggtgccggtggattccaaacgctataggtacgtctatcacagctcacagtggatggtagctgggaatacagaccatttgtgcatcattcctagattctatgttcacccggactcaccctgctcgggagagacctggatgcggcagatcatcagctttgatcgcatgaaactcaccaacaatgagatggatgacaaaggccacatcattctgcaatccatgcataagtacaaaccccgagtgcacgtgatagagcaaggcagcagtgttgacctgtcccagattcagtccttgcccactgaaggtgttaaaacattctcctttaaagaaactgagttcaccacagtaacggcttaccaaaaccaacagattacgaaactaaaaatagaaagaaatccttttgctaaaggatttagagatactggaagaaacaggggtgtattggatgggcttttagagacctacccatggaggccttctttcactctcgattttaaaacctttggcgcagacacacaaagtggaagcagtggctcatctccagtgacctctagtggaggggccccctctcctttgaactccttactttctccactttgcttttcacctatgtttcatttacctacaagctcccttggaatgccctgtccagaggcatacctgcccaatgtcaacctgcctctatgctacaagatttgtccaactaatttttggcaacagcaacctcttgttttaccggctcctgaaagactagcaagcagcaacagttctcagtctttagccccactcatgatggaagtgcctatgttatcttccctgggggtcaccaattcaaaaagcggttcatctgaagactccagtgatcagtatctacaagcacctaattctaccaatcaaatgttatatggattacagtcacctggaaatatttttctgccaaactccatcaccccagaagcacttagttgctcctttcatccttcctatgacttttatagatacaatttctctatgccatctagactgataagtggttccaaccatcttaaagtgaatgacgacagtcaagtttcttttggagaaggcaaatgtaatcatgttcattggtatccagcaattaaccattacctttagtaagacaatagcatttctagaacaattacatgtaaacaaatattttctttatttgtagccaaagaaatttcaacagttattgggcttaaaaagcatcattacaatacagtatttctttgttatacatttaaagatttaaagtgccttatcaaataatattcatgaagagttgtttataatgtcaaatgaaacctacaggaatctctgattacagtggccttgagcttcaaaatgagatatgcaataaatattatttgatgatactccaccagtgaaaattgatgctaagtgatgggattttcaattatactgaagctagttcaccacgttaactgcattttacacattgacaatgacaaaaagaagatggatgtaattctcatgaaagcagtgaagcaatttcagttttaaaaatgaagatcggctttcatgtaattatctagtagttgtagaagaaaatttaattatttgtttgcctcatgcctttatactttgctgttgaagaaactactaatctcaatttaagatacaaataaggacacaaactttcaagtattatattttatttatctttgtagcctaaagaccatttaatcttgaaggaacacaaagatcaaatgaaaagtaaaacactctaaataaatttgcttttattttc

SEQ ID NO: 31145 - DNA, 4208 bp, Homo sapiens
  source 1..4208: mol_type = unassigned DNA
gcagggctggagtgtctatttcgagctcagcggcagggctcgggcgcgagtcgagaccctgctcgctcctctcgcttctgaaaccgacgttcaggagcggctttttaaaaacgcaaggcacaaggacggtcacccgcgcgactatgtttgctgatttttcgccttgccctctttaaaagcggcctcccattctccaaaagacacttcccctcctccctttgaagtgcattagttgtgatttctgcctccttttcttttttctttcttttttgttttgctttttccccccttttgaattatgtgctgctgttaaacaacaacaaaaaaacaacaaaacacagcagctgcggacttgtccccggctggagcccagcgccccgcctggagtggatgagcctctccatgagagatccggtcattcctgggacaagcatggcctaccatccgttcctacctcaccgggcgccggacttcgccatgagcgcggtgctgggtcaccagccgccgttcttccccgcgctgacgctgcctcccaacggcgcggcggcgctctcgctgccgggcgccctggccaagccgatcatggatcaattggtgggggcggccgagaccggcatcccgttctcctccctggggccccaggcgcatctgaggcctttgaagaccatggagcccgaagaagaggtggaggacgaccccaaggtgcacctggaggctaaagaactttgggatcagtttcacaagcggggcaccgagatggtcattaccaagtcgggaaggcgaatgtttcctccatttaaagtgagatgttctgggctggataaaaaagccaaatacattttattgatggacattatagctgctgatgactgtcgttataaatttcacaattctcggtggatggtggctggtaaggccgaccccgaaatgccaaagaggatgtacattcacccggacagccccgctactggggaacagtggatgtccaaagtcgtcactttccacaaactgaaactcaccaacaacatttcagacaaacatggatttactttggccttcccaagtgatcacgctacgtggcaggggaattatagttttggtactcagactatattgaactccatgcacaaataccagccccggttccacattgtaagagccaatgacatcttgaaactcccttatagtacatttcggacatacttgttccccgaaactgaattcatcgctgtgactgcataccagaatgataagataacccagttaaaaatagacaacaacccttttgcaaaaggtttccgggacactggaaatggccgaagagaaaaaagaaaacagctcaccctgcagtccatgagggtgtttgatgaaagacacaaaaaggagaatgggacctctgatgagtcctccagtgaacaagcagctttcaactgcttcgcccaggcttcttctccagccgcctccactgtagggacatcgaacctcaaagatttatgtcccagcgagggtgagagcgacgccgaggccgagagcaaagaggagcatggccccgaggcctgcgacgcggccaagatctccaccaccacgtcggaggagccctgccgtgacaagggcagccccgcggtcaaggctcaccttttcgctgctgagcggccccgggacagcgggcggctggacaaagcgtcgcccgactcacgccatagccccgccaccatctcgtccagcactcgcggcctgggcgcggaggagcgcaggagcccggttcgcgagggcacagcgccggccaaggtggaagaggcgcgcgcgctcccgggcaaggaggccttcgcgccgctcacggtgcagacggacgcggccgccgcgcacctggcccagggccccctgcctggcctcggcttcgccccgggcctggcgggccaacagttcttcaacgggcacccgctcttcctgcaccccagccagtttgccatggggggcgccttctccagcatggcggccgctggcatgggtcccctcctggccacggtttctggggcctccaccggtgtctcgggcctggattccacggccatggcctctgccgctgcggcgcagggactgtccggggcgtccgcggccaccctgcccttccacctccagcagcacgtcctggcctctcagggcctggccatgtcccctttcggaagcctgttcccttacccctacacgtacatggccgcagcggcggccgcctcctctgcggcagcctccagctcggtgcaccgccaccccttcctcaatctgaacaccatgcgcccgcggctgcgctacagcccctactccatcccggtgccggtcccggacggcagcagtctgctcaccaccgccctgccctccatggcggcggccgcggggcccctggacggcaaagtcgccgccctggccgccagcccggcctcggtggcagtggactcgggctctgaactcaacagccgctcctccacgctctcctccagctccatgtccttgtcgcccaaactctgcgcggagaaagaggcggccaccagcgaactgcagagcatccagcggttggttagcggcttggaagccaagccggacaggtcccgcagcgcgtccccgtagacccgtcccagacacgtcttttcattccagtccagttcaggctgccgtgcactttgtcggatataaaataaaccacgggcccgccatggcgttagcccttccttttgcagttgcgtctgggaaggggccccggactccctcgagagaatgtgctagagacagcccctgtcttcttggcgtggtttatatgtccgggatctggatcagattctgggggctcagaaacgtcggttgcattgagctactgggggtaggagttccaacatttatgtccagagcaacttccagcaaggctggtctgggtctctgcccaccaggcggggaggtgttcaaagacatctccctcagtgcggatttatatatatatttttccttcactgtgtcaagtggaaacaaaaacaaaatctttcaaaaaaaaaatcgggacaagtgaacacattaacatgattctgtttgtgcagattaaaaactttatagggacttgcattatcggttctcaataaattactgagcagctttgtttggggagggaagtccctaccatccttgtttagtctatattaagaaaatctgtgtctttttaatattcttgtgatgttttcagagccgctgtaggtctcttcttgcatgtccacagtaatgtatttgtggtttttattttgaacgcttgcttttagagagaaaacaatatagccccctacccttttcccaatcctttgccctcaaatcagtgacccaagggagggggggatttaaagggaaggagtgggcaaaacacataaaatgaatttattatatctaagctctgtagcaggattcatgtcgttctttgacagttctttctctttcctgtatatgcaataacaaggttttaaaaaaataataaagaagtgagactattagacaaagtatttatgtaattatttgataactcttgtaaataggtggaatatgaatgcttggaaaattaaactttaatttattgacattgtacatagctctgtgtaaatagaattgcaactgtcaggttttgtgttcttgttttcctttagttgggtttatttccaggtcacagaattgctgttaacactagaaaacacacttcctgcaccaacaccaataccctttcaaaagagttgtctgcaacatttttgttttcttttttaatgtccaaaagtgggggaaagtgctatttcctattttcaccaaaattggggaaggagtgccactttccagctccacttcaaattccttaaaatataactgagattgctgtggggagggaggagggcagaggctgcggtttgactttttaatttttcttttgttatttgtatttgctagtctctgatttcctcaaaacgaagtggaatttactactgttgtcagtatcggtgttttgaattggtgcctgcctatagagatatattcacagttcaaaagtcaggtgctgagagatggtttaaagacaaattcatgaaggtatattttgtgttatagttgttgatgagttctttggttttctgtatttttccccctctctttaaaacatcactgaaatttcaataaatttttattgaaatgtc

SEQ ID NO: 31146 - DNA, 4723 bp, Homo sapiens
  source 1..4723: mol_type = unassigned DNA
gaattctagaggcggcggagggtggcgaggagctctcgctttctctcgctccctccctctccgactccgtctctctctctctctctctctctcccctccctctctttccctctgttccattttttccccctctaaatcctccctgccctgcgcgcctggacacagatttaggaagcgaattcgctcacgttttaggacaaggaagagagagaggcacgggagaagagcccagcaagatttggattgaaaccgagacaccctccggaggctcggagcagaggaaggaggaggagggcggcgaacggaagccagtttgcaattcaagttttgatagcgctggtagaagggggtttaaatcagatttttttttttttaaaggagagagactttttccgctctctcgctccctgttaaagccgggtctagcacagctgcagacgccaccagcgagaaagagggagaggaagacagatagggggcgggggaagaagaaaaagaaaggtaaaaagtcttctaggagaacctttcacatttgcaacaaaagacctaggggctggagagagattcctgggacgcagggctggagtgtctatttcgagctcagcggcagggctcgggcgcgagtcgagaccctgctcgctcctctcgcttctgaaaccgacgttcaggagcggctttttaaaaacgcaaggcacaaggacggtcacccgcgcgactatgtttgctgatttttcgccttgccctctttaaaagcggcctcccattctccaaaagacacttcccctcctccctttgaagtgcattagttgtgatttctgcctccttttcttttttctttcttttttgttttgctttttccccccttttgaattatgtgctgctgttaaacaacaacaaaaaaacaacaaaacacagcagctgcggacttgtccccggctggagcccagcgccccgcctggagtggatgagcctctccatgagagatccggtcattcctgggacaagcatggcctaccatccgttcctacctcaccgggcgccggacttcgccatgagcgcggtgctgggtcaccagccgccgttcttccccgcgctgacgctgcctcccaacggcgcggcggcgctctcgctgccgggcgccctggccaagccgatcatggatcaattggtgggggcggccgagaccggcatcccgttctcctccctggggccccaggcgcatctgaggcctttgaagaccatggagcccgaagaagaggtggaggacgaccccaaggtgcacctggaggctaaagaactttgggatcagtttcacaagcggggcaccgagatggtcattaccaagtcgggaaggcgaatgtttcctccatttaaagtgagatgttctgggctggataaaaaagccaaatacattttattgatggacattatagctgctgatgactgtcgttataaatttcacaattctcggtggatggtggctggtaaggccgaccccgaaatgccaaagaggatgtacattcacccggacagccccgctactggggaacagtggatgtccaaagtcgtcactttccacaaactgaaactcaccaacaacatttcagacaaacatggatttactatattgaactccatgcacaaataccagccccggttccacattgtaagagccaatgacatcttgaaactcccttatagtacatttcggacatacttgttccccgaaactgaattcatcgctgtgactgcataccagaatgataagataacccagttaaaaatagacaacaacccttttgcaaaaggtttccgggacactggaaatggccgaagagaaaaaagaaaacagctcaccctgcagtccatgagggtgtttgatgaaagacacaaaaaggagaatgggacctctgatgagtcctccagtgaacaagcagctttcaactgcttcgcccaggcttcttctccagccgcctccactgtagggacatcgaacctcaaagatttatgtcccagcgagggtgagagcgacgccgaggccgagagcaaagaggagcatggccccgaggcctgcgacgcggccaagatctccaccaccacgtcggaggagccctgccgtgacaagggcagccccgcggtcaaggctcaccttttcgctgctgagcggccccgggacagcgggcggctggacaaagcgtcgcccgactcacgccatagccccgccaccatctcgtccagcactcgcggcctgggcgcggaggagcgcaggagcccggttcgcgagggcacagcgccggccaaggtggaagaggcgcgcgcgctcccgggcaaggaggccttcgcgccgctcacggtgcagacggacgcggccgccgcgcacctggcccagggccccctgcctggcctcggcttcgccccgggcctggcgggccaacagttcttcaacgggcacccgctcttcctgcaccccagccagtttgccatggggggcgccttctccagcatggcggccgctggcatgggtcccctcctggccacggtttctggggcctccaccggtgtctcgggcctggattccacggccatggcctctgccgctgcggcgcagggactgtccggggcgtccgcggccaccctgcccttccacctccagcagcacgtcctggcctctcagggcctggccatgtcccctttcggaagcctgttcccttacccctacacgtacatggccgcagcggcggccgcctcctctgcggcagcctccagctcggtgcaccgccaccccttcctcaatctgaacaccatgcgcccgcggctgcgctacagcccctactccatcccggtgccggtcccggacggcagcagtctgctcaccaccgccctgccctccatggcggcggccgcggggcccctggacggcaaagtcgccgccctggccgccagcccggcctcggtggcagtggactcgggctctgaactcaacagccgctcctccacgctctcctccagctccatgtccttgtcgcccaaactctgcgcggagaaagaggcggccaccagcgaactgcagagcatccagcggttggttagcggcttggaagccaagccggacaggtcccgcagcgcgtccccgtagacccgtcccagacacgtcttttcattccagtccagttcaggctgccgtgcactttgtcggatataaaataaaccacgggcccgccatggcgttagcccttccttttgcagttgcgtctgggaaggggccccggactccctcgagagaatgtgctagagacagcccctgtcttcttggcgtggtttatatgtccgggatctggatcagattctgggggctcagaaacgtcggttgcattgagctactgggggtaggagttccaacatttatgtccagagcaacttccagcaaggctggtctgggtctctgcccaccaggcggggaggtgttcaaagacatctccctcagtgcggatttatatatatatttttccttcactgtgtcaagtggaaacaaaaacaaaatctttcaaaaaaaaaatcgggacaagtgaacacattaacatgattctgtttgtgcagattaaaaactttatagggacttgcattatcggttctcaataaattactgagcagctttgtttggggagggaagtccctaccatccttgtttagtctatattaagaaaatctgtgtctttttaatattcttgtgatgttttcagagccgctgtaggtctcttcttgcatgtccacagtaatgtatttgtggtttttattttgaacgcttgcttttagagagaaaacaatatagccccctacccttttcccaatcctttgccctcaaatcagtgacccaagggagggggggatttaaagggaaggagtgggcaaaacacataaaatgaatttattatatctaagctctgtagcaggattcatgtcgttctttgacagttctttctctttcctgtatatgcaataacaaggttttaaaaaaataataaagaagtgagactattagacaaagtatttatgtaattatttgataactcttgtaaataggtggaatatgaatgcttggaaaattaaactttaatttattgacattgtacatagctctgtgtaaatagaattgcaactgtcaggttttgtgttcttgttttcctttagttgggtttatttccaggtcacagaattgctgttaacactagaaaacacacttcctgcaccaacaccaataccctttcaaaagagttgtctgcaacatttttgttttcttttttaatgtccaaaagtgggggaaagtgctatttcctattttcaccaaaattggggaaggagtgccactttccagctccacttcaaattccttaaaatataactgagattgctgtggggagggaggagggcagaggctgcggtttgactttttaatttttcttttgttatttgtatttgctagtctctgatttcctcaaaacgaagtggaatttactactgttgtcagtatcggtgttttgaattggtgcctgcctatagagatatattcacagttcaaaagtcaggtgctgagagatggtttaaagacaaattcatgaaggtatattttgtgttatagttgttgatgagttctttggttttctgtatttttccccctctctttaaaacatcactgaaatttcaataaatttttattgaaatgtct

SEQ ID NO: 31147 - DNA, 2767 bp, Homo sapiens
  source 1..2767: mol_type = unassigned DNA
gaattctagaggcggcggagggtggcgaggagctctcgctttctctcgctccctccctctccgactccgtctctctctctctctctctctctcccctccctctctttccctctgttccattttttccccctctaaatcctccctgccctgcgcgcctggacacagatttaggaagcgaattcgctcacgttttaggacaaggaagagagagaggcacgggagaagagcccagcaagatttggattgaaaccgagacaccctccggaggctcggagcagaggaaggaggaggagggcggcgaacggaagccagtttgcaattcaagttttgatagcgctggtagaagggggtttaaatcagatttttttttttttaaaggagagagactttttccgctctctcgctccctgttaaagccgggtctagcacagctgcagacgccaccagcgagaaagagggagaggaagacagatagggggcgggggaagaagaaaaagaaaggtaaaaagtcttctaggagaacctttcacatttgcaacaaaagacctaggggctggagagagattcctgggacgcagggctggagtgtctatttcgagctcagcggcagggctcgggcgcgagtcgagaccctgctcgctcctctcgcttctgaaaccgacgttcaggagcggctttttaaaaacgcaaggcacaaggacggtcacccgcgcgactatgtttgctgatttttcgccttgccctctttaaaagcggcctcccattctccaaaagacacttcccctcctccctttgaagtgcattagttgtgatttctgcctccttttcttttttctttcttttttgttttgctttttccccccttttgaattatgtgctgctgttaaacaacaacaaaaaaacaacaaaacacagcagctgcggacttgtccccggctggagcccagcgccccgcctggagtggatgagcctctccatgagagatccggtcattcctgggacaagcatggcctaccatccgttcctacctcaccgggcgccggacttcgccatgagcgcggtgctgggtcaccagccgccgttcttccccgcgctgacgctgcctcccaacggcgcggcggcgctctcgctgccgggcgccctggccaagccgatcatggatcaattggtgggggcggccgagaccggcatcccgttctcctccctggggccccaggcgcatctgaggcctttgaagaccatggagcccgaagaagaggtggaggacgaccccaaggtgcacctggaggctaaagaactttgggatcagtttcacaagcggggcaccgagatggtcattaccaagtcgggaaggcgaatgtttcctccatttaaagtgagatgttctgggctggataaaaaagccaaatacattttattgatggacattatagctgctgatgactgtcgttataaatttcacaattctcggtggatggtggctggtaaggccgaccccgaaatgccaaagaggatgtacattcacccggacagccccgctactggggaacagtggatgtccaaagtcgtcactttccacaaactgaaactcaccaacaacatttcagacaaacatggatttactttggccttcccaagtgatcacgctacgtggcaggggaattatagttttggtactcagactatattgaactccatgcacaaataccagccccggttccacattgtaagagccaatgacatcttgaaactcccttatagtacatttcggacatacttgttccccgaaactgaattcatcgctgtgactgcataccagaatgataagataacccagttaaaaatagacaacaacccttttgcaaaaggtttccgggacactggaaatggccgaagagaaaaaagaaaacagctcaccctgcagtccatgagggtgtttgatgaaagacacaaaaaggagaatgggacctctgatgagtcctccagtgaacaagcagctttcaactgcttcgcccaggcttcttctccagccgcctccactgtagggacatcgaacctcaaagatttatgtcccagcgagggtgagagcgacgccgaggccgagagcaaagaggagcatggccccgaggcctgcgacgcggccaagatctccaccaccacgtcggaggagccctgccgtgacaagggcagccccgcggtcaaggctcaccttttcgctgctgagcggccccgggacagcgggcggctggacaaagcgtcgcccgactcacgccatagccccgccaccatctcgtccagcactcgcggcctgggcgcggaggagcgcaggagcccggttcgcgagggcacagcgccggccaaggtggaagaggcgcgcgcgctcccgggcaaggaggccttcgcgccgctcacggtgcagacggacgcggccgccgcggcagcctccagctcggtgcaccgccaccccttcctcaatctgaacaccatgcgcccgcggctgcgctacagcccctactccatcccggtgccggtcccggacggcagcagtctgctcaccaccgccctggccgccagcccggcctcggtggcagtggactcgggctctgaactcaacagccgctcctccacgctctcctccagctccatgtccttgtcgcccaaactctgcgcggagaaagaggcggccaccagcgaactgcagagcatccagcggttggttagcggcttggaagccaagccggacaggtcccgcagcgcgtccccgtag

SEQ ID NO: 31148 - DNA, 2470 bp, Homo sapiens
  source 1..2470: mol_type = unassigned DNA
tgtggacctgggcgagtgactcgttgtgtgctgtgcccgcaggagatgctgcaggataagggcctgtccgagagcgaggaggccttccgggccccgggcccagcgctcggagaggccagcgcagccaacgcccccgagcccgcgctggcagcgccgggcctcagcggagccgcgctaggcagccccccgggacccggggccgacgtcgtcgccgccgccgccgcggagcagaccatcgagaacatcaaggtggggctgcatgagaaggagctctggaagaagttccacgaggcgggcaccgagatgatcatcactaaggctggcaggaggatgttccccagctacaaggtaaaagtcacaggcatgaaccccaagaccaagtatatcctgctgattgacattgtccctgccgatgaccatcgctacaagttctgtgacaacaaatggatggtggcagggaaggctgagccagccatgccaggaaggctgtatgtccacccggattctcctgccacaggagcccactggatgcggcagctggtctccttccagaagctgaagctgacaaacaaccacctggacccctttggccatatcatcctcaactctatgcacaagtaccagccgcggctccacatcgttaaggctgatgagaacaatgctttcggctccaaaaacactgctttctgcacccacgtgttcccagagacctccttcatctctgtgacctcctaccagaatcacaagatcacccagctgaaaattgagaacaacccttttgccaagggattccggggcagtgatgacagtgacctgcgtgtggcccgactgcagagcaaagaataccccgtgatttccaaaagcatcatgaggcagaggctcatctccccccagctctcagccacaccggacgtgggccccctgctcggcacccaccaggcactccagcactaccagcacgagaacggggcacactcacagctcgcggagccgcaggacctgcccctcagcacctttcccacccagagggactcaagcctcttctatcactgcctgaaaagacgagacggtacccgccacctggacttaccttgcaagcgatcctatctggaagccccctcttcggtgggggaggatcactatttccgttccccccctccctacgaccagcaaatgctgagcccctcctactgcagtgaggtgacccccagagaagcatgtatgtactcaggttcagggcccgagattgccggggtgtctggggtggacgacctgcccccacctccgctgagctgtaacatgtggacttcagtgtcgccgtacaccagctatagcgtgcagacgatggagactgtgccgtaccagcccttccccacgcacttcaccgccaccaccatgatgccgcggctgcccaccctctccgctcagagctcccagccaccaggaaatgcccactttagtgtctacaatcagctctcccagtctcaggtccgagagcgggggcccagcgcctcattcccaagagagcgcggcctcccccaagggtgtgagaggaagccaccctcgccacatctaaatgctgccaatgagtttctctactctcaaaccttctccttgtcccgagaatcttccttacagtaccattcaggaatggggactgtggagaactggactgacggatgactctcacgtctcctccatagccccgggaccgtgttgctccagtattaacctctgtgggtggcctgcactctaccaagaaacacaggaaggtattccagtgtgtgtgtgtgtgtgtgtgtgtgtgtgtgtgtgtgtgtatacacgagcatgtatgtatttggagagcatccatcttctgacatacaactgaggtcatgacaaggaaaaaaaacaccacatttatctaagaagtgattttggctgcaggacctgggtctattgttatctgacatctcttgacatgcccgtgggtgggatgggagtggagggttcatatgagttattgagagggttttataatggttgatttactcaggggccaggtggggagttctctcccatggggaaagattctcactgctggggtgggaagattctcgctgctggggtgtgaggactctgtgcacaccttagagttcctggccttctctttgcaaggggagctgagaatctggttttggtagcaggaggcccactcctttgacttctggagagtctgtgagactgcctgagaggtgggctcagctaagccacaatgtgtactttgatagtacagctggctgctcagtgagtggcctagacattgatgactggagctctgaggtctgagggatgacgttcggaaagggtcatgggctaaatgtcacctgaggggtatttttaaagggtttttttttcccttcaagaggagggaaaatgcaaccagtagcatctctgtcatcattcagattttgtaataaagtacaga

SEQ ID NO: 31149 - DNA, 3396 bp, Homo sapiens
  source 1..3396: mol_type = unassigned DNA
ctccagagccgggatgtgtccagccccgagggcacggcaggcagctggaccctgacccagcggcgcggagtcggagccccggccgtcccgcgctcctcggacccgaacctgcaggggacctcgggccgctggcgcctccgcatgcggcaccgcaattagggagatgctgcaggataagggcctgtccgagagcgaggaggccttccgggccccgggcccagcgctcggagaggccagcgcagccaacgcccccgagcccgcgctggcagcgccgggcctcagcggagccgcgctaggcagccccccgggacccggggccgacgtcgtcgccgccgccgccgcggagcagaccatcgagaacatcaaggtggggctgcatgagaaggagctctggaagaagttccacgaggcgggcaccgagatgatcatcactaaggctggcaggaggatgttccccagctacaaggtaaaagtcacaggcatgaaccccaagaccaagtatatcctgctgattgacattgtccctgccgatgaccatcgctacaagttctgtgacaacaaatggatggtggcagggaaggctgagccagccatgccaggaaggctgtatgtccacccggattctcctgccacaggagcccactggatgcggcagctggtctccttccagaagctgaagctgacaaacaaccacctggacccctttggccatatcatcctcaactctatgcacaagtaccagccgcggctccacatcgttaaggctgatgagaacaatgctttcggctccaaaaacactgctttctgcacccacgtgttcccagagacctccttcatctctgtgacctcctaccagaatcacaagatcacccagctgaaaattgagaacaacccttttgccaagggattccggggcagtgatgacagtgacctgcgtgtggcccgactgcagagcaaagaataccccgtgatttccaaaagcatcatgaggcagaggctcatctccccccagctctcagccacaccggacgtgggccccctgctcggcacccaccaggcactccagcactaccagcacgagaacggggcacactcacagctcgcggagccgcaggacctgcccctcagcacctttcccacccagagggactcaagcctcttctatcactgcctgaaaagacgagcagacggtacccgccacctggacttaccttgcaagcgatcctatctggaagccccctcttcggtgggggaggatcactatttccgttccccccctccctacgaccagcaaatgctgagcccctcctactgcagtgaggtgacccccagagaagcatgtatgtactcaggttcagggcccgagattgccggggtgtctggggtggacgacctgcccccacctccgctgagctgtaacatgtggacttcagtgtcgccgtacaccagctatagcgtgcagacgatggagactgtgccgtaccagcccttccccacgcacttcaccgccaccaccatgatgccgcggctgcccaccctctccgctcagagctcccagccaccaggaaatgcccactttagtgtctacaatcagctctcccagtctcaggtccgagagcgggggcccagcgcctcattcccaagagagcgcggcctcccccaagggtgtgagaggaagccaccctcgccacatctaaatgctgccaatgagtttctctactctcaaaccttctccttgtcccgagaatcttccttacagtaccattcaggaatggggactgtggagaactggactgacggatgactctcacgtctcctccatagccccgggaccgtgttgctccagtattaacctctgtgggtggcctgcactctaccaagaaacacaggaaggtattccagtgtgtgtgtgtgtgtgtgtgtgtgtgtgtgtgtgtgtgtatacacgagcatgtatgtatttggagagcatccatcttctgacatacaactgaggtcatgacaaggaaaaaaaacaccacatttatctaagaagtgattttggctgcaggacctgggtctattgttatctgacatctcttgacatgcccgtgggtgggatgggagtggagggttcatatgagttattgagagggttttataatggttgatttactcaggggccaggtggggagttctctcccatggggaaagattctcactgctggggtgggaagattctcgctgctggggtgtgaggactctgtgcacaccttagagttcctggccttctctttgcaaggggagctgagaatctggttttggtagcaggaggcccactcctttgacttctggagagtctgtgagactgcctgagaggtgggctcagctaagccacaatgtgtactttgatagtacagctggctgctcagtgagtggcctagacattgatgactggagctctgaggtctgagggatgacgttcggaaagggtcatgggctaaatgtcacctgaggggtatttttaaagggtttttttttcccttcaagaggagggaaaatgcaaccagtagcatctctgtcatcattcagattttgtaataaagtacagagcccttccccctaggtccccaacatacagtctctcactctggtgtgtggagagtcagcctcccaggcaccataccatctgcatcctatgatgatgggcaattatgaaacacgcctcagctggcatcatccccaggaggccacactggagctgatgtctggcatctccagggcctgttctgctctcagaaaatctacgcttctggagcgagaaaggccaacagaaataaagatagttgaaaaaaatttgtttcttccagtaaattcagccggtgagctcagaggagcaaagagaattctccagtgtggcgctcacaaagtcctcagccctgcgttttagcattgaataccaccaggccatcagtgtggctggggtgaactctccatcaaacttgggaaatcactaaactctttgcatgctgaatagctatttatatattatataaataaataaatatatatattatatatcgctctctctcacaaatgcaggccacatgtcaaattcagctttgctttctacaaatgaatgaacttaataaaaataaacgttggagggggtatttggaaagacatctatttaaatttttattacatgtttgatattaaaaactaagaatggtttagataaaacatataaataaatatatatatatatatatatatatataaacacacacacactacagataaggcttttttagaaaacacattagctaacaggtgatatggaacttcaagtgttttgttatatagcatggatgttttattttgcatatcggaacataaagccattttacaactgtg

SEQ ID NO: 31150 - DNA, 3825 bp, Homo sapiens
  source 1..3825: mol_type = unassigned DNA
catgccttatgcaagagacctcagtcccccggaacaactcgatttccttccaatagaggtctgaggtggactcccacctcccttcgtgaagagttccctcctctcccccttcctaagaaagtcgatcttggctctatttgtgtcttatgttcatcaccctcattcctccggagaaagccgggttggtttatgtctttatttattcccggggccaagacgtccggaacctgtggctgcgcagacccggcactgataggcgaagacggagagaaatttacctcccgccgctgccccccagccaaacgtgacagcgcgcgggccggttgcgtgactcgtgacgtctccaagtcctataggtgcagcggctggtgagatagtcgctatcgcctggttgcctctttattttactggggtatgcctggtaataaacagtaatatttaatttgtcggagaccacaaaccaaccttgagctgggaggtacgtgctcttcttgacagacgttggaagaagacctggcctaaagaggtctcttttggtggtccttttcaaagtcttcacctgagccctgctctccagcgaggcgcactcctggcttttgcgctccaaagaagaggtgggatagttggagagcagaaccttgcgcgggcacagggccctgggcgcaccatggccgacgcagacgagggctttggcctggcgcacacgcctctggagcctgacgcaaaagacctgccctgcgattcgaaacccgagagcgcgctcggggcccccagcaagtccccgtcgtccccgcaggccgccttcacccagcagggcatggagggaatcaaagtgtttctccatgaaagagaactgtggctaaaattccacgaagtgggcacggaaatgatcataaccaaggctggaaggcggatgtttcccagttacaaagtgaaggtgacgggccttaatcccaaaacgaagtacattcttctcatggacattgtacctgccgacgatcacagatacaaattcgcagataataaatggtctgtgacgggcaaagctgagcccgccatgcctggccgcctgtacgtgcacccagactcccccgccaccggggcgcattggatgaggcagctcgtctccttccagaaactcaagctcaccaacaaccacctggacccatttgggcatattattctaaattccatgcacaaataccagcctagattacacatcgtgaaagcggatgaaaataatggatttggctcaaaaaatacagcgttctgcactcacgtctttcctgagactgcgtttatagcagtgacttcctaccagaaccacaagatcacgcaattaaagattgagaataatccctttgccaaaggatttcggggcagtgatgacatggagctgcacagaatgtcaagaatgcaaagtaaagaatatcccgtggtccccaggagcaccgtgaggcaaaaagtggcctccaaccacagtcctttcagcagcgagtctcgagctctctccacctcatccaatttggggtcccaataccagtgtgagaatggtgtttccggcccctcccaggacctcctgcctccacccaacccatacccactgccccaggagcatagccaaatttaccattgtaccaagaggaaagaggaagaatgttccaccacagaccatccctataagaagccctacatggagacatcacccagtgaagaagattccttctaccgctctagctatccacagcagcagggcctgggtgcctcctacaggacagagtcggcacagcggcaagcttgcatgtatgccagctctgcgccccccagcgagcctgtgcccagcctagaggacatcagctgcaacacgtggccaagcatgccttcctacagcagctgcaccgtcaccaccgtgcagcccatggacaggctaccctaccagcacttctccgctcacttcacctcggggcccctggtccctcggctggctggcatggccaaccatggctccccacagctgggagagggaatgttccagcaccagacctccgtggcccaccagcctgtggtcaggcagtgtgggcctcagactggcctgcagtcccctggcacccttcagccccctgagttcctctactctcatggcgtgccaaggactctatcccctcatcagtaccactctgtgcacggagttggcatggtgccagagtggagcgacaatagctaaagtgaggcctgcttcacaacagacatttcctagagaaagagagagagagaggagaaagagagagaaggagagagacagtagccaagagaaccccacggacaagatttttcatttcacccaatgttcacatctgcactcaaggtcgctggatgctgatctaatcagtagcttgaaaccacaattttaaaaatgtgactttcttgttttgtctcaaaacttaaaaaaacaaacacaaaaagatgagtcccaccccccactaccaccacacccatcaaccagccacattcacgctactccccagatctcttcccccattccttcttttgggctctagaaagtcttgcctcattgagtgtttttccctagtgcgtagttggagtctgtccctgtcttggtgttaatgttgacattgttatataataaatgataatatatttttttctttcaattttcttaatgggacccagtcccttatttggggggaggtctgaggcaagtatatttcaaaatatgtacttgcgggattcccttcaagtaaaccatccctgaaacctaaattcacgtttccccttgactaagaaaagcacctacctctgccatgtgatgtttctgaaaagcctctgtatgtccccatttgctttggttttgtcctgccttctccaatatcacgtgctcagttttgcctctacttacccatggagtcaggataacactgacgctccctggcatcctatcttattcagccctaccatcttgccagctctgtctttccagctgtctgtcgctaaaacgtggcctatagcttcccttccggaaagcttgctttgaaaaacttaaaaagcccccgtttacatgtaggcaggactgtgataacagtgcaagctctgtgttgacaagagttgtggacaaaaagccaaaataaatattcttcctgattaaaaaaattttttttgaaaaaaacaaggccagccccaaccttccaaacctccatcaccaacaacccaaactggatgtcaagcaaaatgcacaattcctacagaagaggcaagacacagtcaccaatgatatctcgccaaagaaaccacgcccacaccaatgccaacacaaaactgtgtttactgaaagccgaaaacagtattaaaaaaagtgtgtaagtaaagtgttatggtagggttcttcagatgtaatattttactggtactatttatttataaataggaattctaattaagtaataacatgaaatgaaacccagcataggagctggccaagagcttttaattttattgatactcaaaaccaagtttgtgtttttttgtttttttttgtttttttcctctttcgaatgtgctttgctttttttgattaaaaagaattttttttttccttttttataaacagaccctaataaagagaacagggtaagatgtgaggctgagtgtgtttaagtacgtgagagagtgtgagtgtgtttgtaagtgagtgtccctatgcgattatgtctctttacgttgctaaggggggagggtgaggattaagtactcgtgccttatatttgtgtgccaattaatgcctaataaataccatgtgcttaaacaagt

SEQ ID NO: 31151 - DNA, 3585 bp, Homo sapiens
  source 1..3585: mol_type = unassigned DNA
gaggtctgaggtggactcccacctcccttcgtgaagagttccctcctctcccccttcctaagaaagtcgatcttggctctatttgtgtcttatgttcatcaccctcattcctccggagaaagccgggttggtttatgtctttatttattcccggggccaagacgtccggaacctgtggctgcgcagacccggcactgataggcgaagacggagagaaatttacctcccgccgctgccccccagccaaacgtgacagcgcgcgggccggttgcgtgactcgtgacgtctccaagtcctataggtgcagcggctggtgagatagtcgctatcgcctggttgcctctttattttactggggtatgcctggtaataaacagtaatatttaatttgtcggagaccacaaaccaaccttgagctgggaggtacgtgctcttcttgacagacgttggaagaagacctggcctaaagaggtctcttttggtggtccttttcaaagtcttcacctgagccctgctctccagcgaggcgcactcctggcttttgcgctccaaagaagaggtgggatagttggagggcatggagggaatcaaagtgtttctccatgaaagagaactgtggctaaaattccacgaagtgggcacggaaatgatcataaccaaggctggaaggcggatgtttcccagttacaaagtgaaggtgacgggccttaatcccaaaacgaagtacattcttctcatggacattgtacctgccgacgatcacagatacaaattcgcagataataaatggtctgtgacgggcaaagctgagcccgccatgcctggccgcctgtacgtgcacccagactcccccgccaccggggcgcattggatgaggcagctcgtctccttccagaaactcaagctcaccaacaaccacctggacccatttgggcatattattctaaattccatgcacaaataccagcctagattacacatcgtgaaagcggatgaaaataatggatttggctcaaaaaatacagcgttctgcactcacgtctttcctgagactgcgtttatagcagtgacttcctaccagaaccacaagatcacgcaattaaagattgagaataatccctttgccaaaggatttcggggcagtgatgacatggagctgcacagaatgtcaagaatgcaaagtaaagaatatcccgtggtccccaggagcaccgtgaggcaaaaagtggcctccaaccacagtcctttcagcagcgagtctcgagctctctccacctcatccaatttggggtcccaataccagtgtgagaatggtgtttccggcccctcccaggacctcctgcctccacccaacccatacccactgccccaggagcatagccaaatttaccattgtaccaagaggaaagaggaagaatgttccaccacagaccatccctataagaagccctacatggagacatcacccagtgaagaagattccttctaccgctctagctatccacagcagcagggcctgggtgcctcctacaggacagagtcggcacagcggcaagcttgcatgtatgccagctctgcgccccccagcgagcctgtgcccagcctagaggacatcagctgcaacacgtggccaagcatgccttcctacagcagctgcaccgtcaccaccgtgcagcccatggacaggctaccctaccagcacttctccgctcacttcacctcggggcccctggtccctcggctggctggcatggccaaccatggctccccacagctgggagagggaatgttccagcaccagacctccgtggcccaccagcctgtggtcaggcagtgtgggcctcagactggcctgcagtcccctggcacccttcagccccctgagttcctctactctcatggcgtgccaaggactctatcccctcatcagtaccactctgtgcacggagttggcatggtgccagagtggagcgacaatagctaaagtgaggcctgcttcacaacagacatttcctagagaaagagagagagagaggagaaagagagagaaggagagagacagtagccaagagaaccccacggacaagatttttcatttcacccaatgttcacatctgcactcaaggtcgctggatgctgatctaatcagtagcttgaaaccacaattttaaaaatgtgactttcttgttttgtctcaaaacttaaaaaaacaaacacaaaaagatgagtcccaccccccactaccaccacacccatcaaccagccacattcacgctactccccagatctcttcccccattccttcttttgggctctagaaagtcttgcctcattgagtgtttttccctagtgcgtagttggagtctgtccctgtcttggtgttaatgttgacattgttatataataaatgataatatatttttttctttcaattttcttaatgggacccagtcccttatttggggggaggtctgaggcaagtatatttcaaaatatgtacttgcgggattcccttcaagtaaaccatccctgaaacctaaattcacgtttccccttgactaagaaaagcacctacctctgccatgtgatgtttctgaaaagcctctgtatgtccccatttgctttggttttgtcctgccttctccaatatcacgtgctcagttttgcctctacttacccatggagtcaggataacactgacgctccctggcatcctatcttattcagccctaccatcttgccagctctgtctttccagctgtctgtcgctaaaacgtggcctatagcttcccttccggaaagcttgctttgaaaaacttaaaaagcccccgtttacatgtaggcaggactgtgataacagtgcaagctctgtgttgacaagagttgtggacaaaaagccaaaataaatattcttcctgattaaaaaaattttttttgaaaaaaacaaggccagccccaaccttccaaacctccatcaccaacaacccaaactggatgtcaagcaaaatgcacaattcctacagaagaggcaagacacagtcaccaatgatatctcgccaaagaaaccacgcccacaccaatgccaacacaaaactgtgtttactgaaagccgaaaacagtattaaaaaaagtgtgtaagtaaagtgttatggtagggttcttcagatgtaatattttactggtactatttatttataaataggaattctaattaagtaataacatgaaatgaaacccagcataggagctggccaagagcttttaattttattgatactcaaaaccaagtttgtgtttttttgtttttttttgtttttttcctctttcgaatgtgctttgctttttttgattaaaaagaattttttttttccttttttataaacagaccctaataaagagaacagggtaagatgtgaggctgagtgtgtttaagtacgtgagagagtgtgagtgtgtttgtaagtgagtgtccctatgcgattatgtctctttacgttgctaaggggggagggtgaggattaagtactcgtgccttatatttgtgtgccaattaatgcctaataaataccatgtgcttaaacaagt

SEQ ID NO: 31152 - DNA, 2203 bp, Homo sapiens
  source 1..2203: mol_type = unassigned DNA
ttcagagagagagagagagggagagagagtgagagagactgactcttacctcgaatccgggaactttaatcctgaaagctgcgctcagaaaggacttcgaccattcactgggcttccaactttccctccctgggggtgtaaaggaggagcggggcactgagattatatggttgccggtgctcttggaggctattttgtgttctttggcgcttgccaactgggaagtatttagggagagcaagcgcacagcagaggaggtgtgtgttggaggtgggcagtcgccgcggaggctccagcggtaggtgcgccctagtaggcagcagtagccgctattctgggtaagcagtaaaccccgcataaaccccggagccaccatgcctgctcccccgcctcaccgccggcttccctgctaggagcagcagaggatgtggtgaatgcaccggcttcaccgaacgagagcagaaccttgcgcgggcacagggccctgggcgcaccatggccgacgcagacgagggctttggcctggcgcacacgcctctggagcctgacgcaaaagacctgccctgcgattcgaaacccgagagcgcgctcggggcccccagcaagtccccgtcgtccccgcaggccgccttcacccagcagggcatggagggaatcaaagtgtttctccatgaaagagaactgtggctaaaattccacgaagtgggcacggaaatgatcataaccaaggctggaaggcggatgtttcccagttacaaagtgaaggtgacgggccttaatcccaaaacgaagtacattcttctcatggacattgtacctgccgacgatcacagatacaaattcgcagataataaatggtctgtgacgggcaaagctgagcccgccatgcctggccgcctgtacgtgcacccagactcccccgccaccggggcgcattggatgaggcagctcgtctccttccagaaactcaagctcaccaacaaccacctggacccatttgggcatattattctaaattccatgcacaaataccagcctagattacacatcgtgaaagcggatgaaaataatggatttggctcaaaaaatacagcgttctgcactcacgtctttcctgagactgcgtttatagcagtgacttcctaccagaaccacaagatcacgcaattaaagattgagaataatccctttgccaaaggatttcggggcagtgatgacatggagctgcacagaatgtcaagaatgcaaagtaaagaatatcccgtggtccccaggagcaccgtgaggcaaaaagtggcctccaaccacagtcctttcagcagcgagtctcgagctctctccacctcatccaatttggggtcccaataccagtgtgagaatggtgtttccggcccctcccaggacctcctgcctccacccaacccatacccactgccccaggagcatagccaaatttaccattgtaccaagaggaaagaggaagaatgttccaccacagaccatccctataagaagccctacatggagacatcacccagtgaagaagattccttctaccgctctagctatccacagcagcagggcctgggtgcctcctacaggacagagtcggcacagcggcaagcttgcatgtatgccagctctgcgccccccagcgagcctgtgcccagcctagaggacatcagctgcaacacgtggccaagcatgccttcctacagcagctgcaccgtcaccaccgtgcagcccatggacaggctaccctaccagcacttctccgctcacttcacctcggggcccctggtccctcggctggctggcatggccaaccatggctccccacagctgggagagggaatgttccagcaccagacctccgtggcccaccagcctgtggtcaggcagtgtgggcctcagactggcctgcagtcccctggcacccttcagccccctgagttcctctactctcatggcgtgccaaggactctatcccctcatcagtaccactctgtgcacggagttggcatggtgccagagtggagcgacaatagctaaagtgaggcctgcttcacaacagacatttcctagagaaagagagagagagaggagaaagagagagaaggagagagacagtagccaagagaaccccacggacaagatttttcatttcacccaatgttcacatctgcactcaaggtcgctggat

SEQ ID NO: 31153 - DNA, 1911 bp, Homo sapiens
  source 1..1911: mol_type = unassigned DNA
attttactggggtatgcctggtaataaacagtaatatttaatttgtcggagaccacaaaccaaccttgagctgggaggtacgtgctcttcttgacagacgttggaagaagacctggcctaaagaggtctcttttggtggtccttttcaaagtcttcacctgagccctgctctccagcgaggcgcactcctggcttttgcgctccaaagaagaggtgggatagttggagagcagaaccttgcgcgggccttaatcccaaaacgaagtacattcttctcatggacattgtacctgccgacgatcacagatacaaattcgcagataataaatggtctgtgacgggcaaagctgagcccgccatgcctggccgcctgtacgtgcacccagactcccccgccaccggggcgcattggatgaggcagctcgtctccttccagaaactcaagctcaccaacaaccacctggacccatttgggcatattattctaaattccatgcacaaataccagcctagattacacatcgtgaaagcggatgaaaataatggatttggctcaaaaaatacagcgttctgcactcacgtctttcctgagactgcgtttatagcagtgacttcctaccagaaccacaagatcacgcaattaaagattgagaataatccctttgccaaaggatttcggggcagtgatgacatggagctgcacagaatgtcaagaatgcaaagtaaagaatatcccgtggtccccaggagcaccgtgaggcaaaaagtggcctccaaccacagtcctttcagcagcgagtctcgagctctctccacctcatccaatttggggtcccaataccagtgtgagaatggtgtttccggcccctcccaggacctcctgcctccacccaacccatacccactgccccaggagcatagccaaatttaccattgtaccaagaggaaagaggaagaatgttccaccacagaccatccctataagaagccctacatggagacatcacccagtgaagaagattccttctaccgctctagctatccacagcagcagggcctgggtgcctcctacaggacagagtcggcacagcggcaagcttgcatgtatgccagctctgcgccccccagcgagcctgtgcccagcctagaggacatcagctgcaacacgtggccaagcatgccttcctacagcagctgcaccgtcaccaccgtgcagcccatggacaggctaccctaccagcacttctccgctcacttcacctcggggcccctggtccctcggctggctggcatggccaaccatggctccccacagctgggagagggaatgttccagcaccagacctccgtggcccaccagcctgtggtcaggcagtgtgggcctcagactggcctgcttcacaacagacatttcctagagaaagagagagagagaggagaaagagagagaaggagagagacagtagccaagagaaccccacggacaagatttttcatttcacccaatgttcacatctgcactcaaggtcgctggatgctgatctaatcagtagcttgaaaccacaattttaaaaatgtgactttcttgttttgtctcaaaacttaaaaaaacaaacacaaaaagatgagtcccaccccccactaccaccacacccatcaaccagccacattcacgctactccccagatctcttcccccattccttcttttgggctctagaaagtcttgcctcattgagtgtttttccctagtgcgtagttggagtctgtccctgtcttggtgttaatgttgacattgttatataataaatgataatatatttttttctttcaattttcttaatgggacccagtcccttatttggggggaggtctgaggcaagtatatttcaaaatatgtacttgcgggatt

SEQ ID NO: 31154 - DNA, 1050 bp, Homo sapiens
  source 1..1050: mol_type = unassigned DNA
atggccgacgcagacgagggctttggcctggcgcacacgcctctggagcctgacgcaaaagacctgccctgcgattcgaaacccgagagcgcgctcggggcccccagcaagtccccgtcgtccccgcaggccgccttcacccagcagggcatggagggaatcaaagtgtttctccatgaaagagaactgtggctaaaattccacgaagtgggcacggaaatgatcataaccaaggctggaaggcggatgtttcccagttacaaagtgaaggtgacgggccttaatcccaaaacgaagtacattcttctcatggacattgtacctgccgacgatcacagatacaaattcgcagataataaatggtctgtgacgggcaaagctgagcccgccatgcctggccgcctgtacgtgcacccagactcccccgccaccggggcgcattggatgaggcagctcgtctccttccagaaactcaagctcaccaacaaccacctggacccatttgggcatattattctaaattccatgcacaaataccagcctagattacacatcgtgaaagcggatgaaaataatggatttggctcaaaaaatacagcgttctgcactcacgtctttcctgagactgcgtttatagcagtgacttcctaccagaaccacaagatcacgcaattaaagattgagaataatccctttgccaaaggatttcggggcagtgatgacatggagctgcacagaatgtcaagaatgcaaagtaaagaatatcccgtggtccccaggagcaccgtgaggcaaaaagtggcctccaaccacagtcctttcagcagcgagtctcgagctctctccacctcatccaatttggggtcccaataccagtgtgagaatggtgtttccggcccctcccaggacctcctgcctccacccaacccatacccactgccccaggagcatagccaaatttaccattgtaccaagaggaaaggtgagtgtgatcacccctggtcaatttgctttctttcttaccttttcctttccttgggttgggggtga

SEQ ID NO: 31155 - DNA, 1796 bp, Homo sapiens
  source 1..1796: mol_type = unassigned DNA
tctcgcagcaccgggggccctaagcagcgagacctgaggccagacggaactacaacatgtaccatccacgagaattgtacccgtccctgggggccggctaccgcctggggcccgcccaacctggggccgactccagcttcccacccgccctagcggagggctaccgctaccccgaactggacacccctaaactggattgcttcctctccgggatggaggctgctccccgcaccctggccgcgcacccacctctgccccttctgccccctgccatgggcactgagccggccccatcagctccagaggccctccattccctcccgggggtcagcctgagcctggagaaccgggagctatggaaggagttcagctctgtgggaacagaaatgatcatcaccaaagctgggaggcgcatgttccctgcctgccgagtgtcagtcactggcctggaccccgaggcccgctacttgtttcttctggatgtgattccggtggatggggctcgctaccgctggcagggccggcgctgggagcccagcggcaaggcagagccccgcctgcctgaccgtgtctacattcaccccgactctcctgccactggtgcacattggatgcggcagcctgtgtctttccatcgtgtcaagctcaccaacagcacgctggacccccacggccacctgatcctgcactccatgcacaagtaccaaccccgcatacacctagttcgggcagcccagctctgcagccagcactgggggggcatggcctccttccgcttccccgagaccacattcatctccgtgacagcctaccagaacccacagatcacacaactgaagattgcagccaatccctttgccaaaggcttccgggagaacggcagaaactgtaagagggagcgagacgcccgtgtgaagaggaaactgcggggcccagagccagcagccacagaggcctatgggagcggagacacaccaggtggtccctgcgactccaccctgggtggagacattcgtgaatcagatccagaacaggccccagcccccggggaagccaccgctgccccggcacctctgtgtggtggccccagtgctgaggcctacctcctgcaccctgcggctttccatggggcccccagtcaccttcccaccaggagccccagcttcccggaggctccagactccgggcgctcagccccctactcggctgcatttctggagctgccgcacgggtcagggggctccgggtacccagcggctccaccggcggtaccctttgccccgcactttctccaagggggccccttccctctaccatacaccgcgcctgggggctatctggatgtgggctccaaacccatgtactgaaccactgctgggcccctctgcctccatcacaaacctcccgctcccttcccccagccctggagccccctcacctccaccggccccatcccccacaccaaatggccgccttgggcctgcccacccaccccctcaacttcacaccttgatttcactcccacccccctctggcttcaaagcctaaccaaggctgctgggagtccagctggggccggcttccccttcccggctctcacctccgtgtgaatggaaggggctctgcctggccaaatggggccacagaccagcatccccacttaccaggcctccccatgggctctggaggggctcaatccccacccccccacacacactggtgcaggccacaccagtctgttgttctgggaccagagtatttttgttaataaaactcaaaagccatccatgctcagg

SEQ ID NO: 31156 - DNA, 1835 bp, Homo sapiens
  source 1..1835: mol_type = unassigned DNA
agctgtcggactcaccgggggccctaagcagcgagacctgaggccagacggaactacaacatgtaccatccacgagaattgtacccgtccctgggggccggctaccgcctggggcccgcccaacctggggccgactccagcttcccacccgccctagcggagggctaccgctaccccgaactggacacccctaaactggattgcttcctctccgggatggaggctgctccccgcaccctggccgcgcacccacctctgccccttctgccccctgccatgggcactgagccggccccatcagctccagaggccctccattccctcccgggggtcagcctgagcctggagaaccgggagctatggaaggagttcagctctgtgggaacagaaatgatcatcaccaaagctgggaggcgcatgttccctgcctgccgagtgtcagtcactggcctggaccccgaggcccgctacttgtttcttctggatgtgattccggtggatggggctcgctaccgctggcagggccggcgctgggagcccagcggcaaggcagagccccgcctgcctgaccgtgtctacattcaccccgactctcctgccactggtgcacattggatgcggcagcctgtgtctttccatcgtgtcaagctcaccaacagcacgctggacccccacggccacctgatcctgcactccatgcacaagtaccaaccccgcatacacctagttcgggcagcccagctctgcagccagcactgggggggcatggcctccttccgcttccccgagaccacattcatctccgtgacagcctaccagaacccacagatcacacaactgaagattgcagccaatccctttgccaaaggcttccgggagaacggcagaaactgtaagagggagcgagacgcccgtgtgaagaggaaactgcggggcccagagccagcagccacagaggcctatgggagcggagacacaccaggtggtccctgcgactccaccctgggtggagacattcgtgaatcagatccagaacaggccccagcccccggggaagccaccgctgccccggcacctctgtgtggtggccccagtgctgaggcctacctcctgcaccctgcggctttccatggggcccccagtcaccttcccaccaggagccccagcttcccggaggctccagactccgggcgctcagccccctactcggctgcatttctggagctgccgcacgggtcagggggctccgggtacccagcggctccaccggcggtaccctttgccccgcactttctccaagggggccccttccctctaccatacaccgcgcctgggggctatctggatgtgggctccaaacccatgtactgaaccactgctgggcccctctgcctccatcacaaacctcccgctcccttcccccagccctggagccccctcacctccaccggccccatcccccacaccaaatggccgccttgggcctgcccacccaccccctcaacttcacaccttgatttcactcccacccccctctggcttcaaagcctaaccaaggctgctgggagtccagctggggccggcttccccttcccggctctcacctccgtgtgaatggaaggggctctgcctggccaaatggggccacagaccagcatccccacttaccaggcctccccatgggctctggaggggctcaatccccacccccccacacacactggtgcaggccacaccagtctgttgttctgggaccagagtatttttgttaataaaactcaaaagccatccatgctcaggaaacattgggctcctgtgtttggccctgggcgggg

SEQ ID NO: 31157 - DNA, 2162 bp, Homo sapiens
  source 1..2162: mol_type = unassigned DNA
agaagctgtcggactgtgagcgccttcgaactttggaggcttggctcgggatggaggtttttttagcatggggaccagggaggactacggtgctcgggactgggctgcggcctcctcgcggccccgagtgccctgtgaaatcagctcaggccgcgtccctctagcctgcactttccctctgttcacgctgcttccctccagggcccggcctccaagtgaaggggggcggagggcggtcacctgccagaaggtctggggcgccaaggtgtgtcccgggactcttggctccgtccaggttccaggccccgccccccagcttatccctagccggggctccccaccgtgggaacggggaccagctggccggaagcgccaaactgcgtccctgtccgagccctggggatcaatcaagccgaggagttaattatgtaatgagggggcagggggtcgaggctaatgaagcctcccggggtggggagggaggggaggaggggaccgtacccaggtatccgaccccctctcggaccccttcgaggccccaggggtctccaccccagcccaactccagggccccaaagaggggaggggctgtgatcctggatctggaaggggctgagctgtgagctataaagggggcatctcgcagcaccgggggccctaagcagcgagacctgaggccagacggaactacaacatgtaccatccacgagaattgtacccgtccctgggggccggctaccgcctggggcccgcccaacctggggccgactccagcttcccacccgccctagcggagggctaccgctaccccgaactggacacccctaaactggattgcttcctctccgggatggaggctgctccccgcaccctggccgcgcacccacctctgccccttctgccccctgccatgggcactgagccggccccatcagctccagaggccctccattccctcccgggggtcagcctgagcctggagaaccgggagctatggaaggagttcagctctgtgggaacagaaatgatcatcaccaaagctgggaggcgcatgttccctgcctgccgagtgtcagtcactggcctggaccccgaggcccgctacttgtttcttctggatgtgattccggtggatggggctcgctaccgctggcagggccggcgctgggagcccagcggcaaggcagagccccgcctgcctgaccgtgtctacattcaccccgactctcctgccactggtgcacattggatgcggcagcctgtgtctttccatcgtgtcaagctcaccaacagcacgctggacccccacggccacctgatcctgcactccatgcacaagtaccaaccccgcatacacctagttcgggcagcccagctctgcagccagcactgggggggcatggcctccttccgcttccccgagaccacattcatctccgtgacagcctaccagaacccacagatcacacaactgaagattgcagccaatccctttgccaaaggcttccgggagaacggcagaaactgtaagaggtgggagttgttcattcatttgttcatgcattcaacaaatgtttattaatcactcactgtgtgccaggcaccgtgctggacatcagaaatgcagtggtaagtgaaaacattcattcactgactcagcaaatacttatatagtacctgctatgtgccagggacagttccaggcactggagataaaacaaacaaagcaaaccaaagccccggccctcatgcagctgatttctagtggggagagtagacaagcagacaagagaaataaataaaatgtcatctgttaggaagccattctaaagagaagagagaccaggtgtggtggctcacgcatgtaatcccagcactctgggaggctgaggcgggcagatcacctgaggccaggagttcgagaccagcctgccaacatggtgaaaccctgtctctgctaaaaatacaaaaattagccaggcatggtggcaaacgcctgtaatcccaactacttgggaggctgaggcaggagaatctcttgaacccaggaggtggaggttgcagtgagtcgagatcatgccattgcattccagcctaggcaacacgagcaaaacttcctctcaaaaaaaaaaaaaaaaagaaagaaaagaaaactctgtctc

SEQ ID NO: 31158 - DNA, 4109 bp, Homo sapiens
  source 1..4109: mol_type = unassigned DNA
agacgcggaccctcagggacactgcggacgcgagaaaggacacgccccctcgcgggagcataagtccaccgcacagaactcgcgcgcctcccctcgaacgaacgcgcacgcgcgcgcagggggcgggtcttcttcccgacacccactgagcgcccggcctcctcaccccaccccaccgaactccggccgcccaggctccgcctccgcgacgggccgtcgggaggaggcgaccggaagccacttaaagcagagatcgaggtgacaggcgagctggctggactcggagcgcggtcgaggctttctgcgttcgcggcggcggaatggcccgtgcgcggctcgccgcgtcgcggctctgtggtccctagacgtcggctcccgccctcggcgctgatctccggcgcgggcactgctttccactcggctcctgtcgtccgttctctcaggctcccgttcaggatttttagactctgaggagcagttggagctaatccacattatggaaatggaaaccaccgaacctgagccagactgtgtagtgcagcctccctctcctcctgatgacttttcatgccaaatgagactctctgagaagatcactccattgaagacttgttttaagaaaaaggatcagaaaagattgggaactggaaccctgaggtctttgaggccaatattaaacactcttctagaatctggctcacttgatggggtttttagatctaggaaccagagtacagatgagaacagcttacatgaacctatgatgaagaaagccatggaaatcaattcatcatgcccaccagcagaaaataatatgtctgttctgattcctgataggacaaatgttggggaccagataccggaagcccatccttccactgaagctccagaacgagtggttccaatccaagatcacagctttccatcagaaaccctcagtgggacggtggcagattccacaccagctcacttccagactgatcttttgcacccagtttcaagtgatgttcctactagtcctgactgcttagacaaagtcatagattatgttccaggcattttccaagaaaacagttttacaatccaatacattctggacaccagtgataagctgagtactgagctctttcaggacaaaagtgaagaggcttcccttgacctcgtgtttgagctggtgaaccagttgcagtaccacactcaccaagagaacggaattgaaatttgcatggactttctgcaaggcacttgtatttatggcagggattgtttgaagcaccacactgtcttgccatatcattggcagatcaaaaggacaactactcaaaagtggcagagtgtattcaatgattctcaggagcacttggaaagattttactgtaacccagaaaatgatagaatgagaatgaagtatggaggacaagaattttgggcagatttgaatgccatgaacgtgtatgaaacaactgaatttgaccaactacgaaggctgtccacaccaccctctagcaatgtcaactctatttaccacacagtctggaaattcttctgtagggaccactttggatggagagagtatcccgagtctgtcattcgattgattgaagaagccaactctcggggtctgaaagaggttcgatttatgatgtggaataaccactacatcctccacaattcattcttcaggagagagataaaaaggagacccctcttccgctcctgttttatactgcttccatatttacagacacttggtggggttcccacacaagctcctccacctcttgaagcaacttcatcatcacaaattatctgcccagatggggtcacttcagcaaacttttaccctgaaacttgggtttatatgcatccatctcaggacttcatccaagtccctgtttctgcagaggataaaagttatcggatcatttacaatctttttcataagactgtgcctgagtttaaatacagaattttgcagatattgagagtccaaaaccagtttctttgggagaaatataaaaggaaaaaggaatatatgaacaggaaaatgtttggccgtgacaggataataaatgagagacatttatttcatggaacatcccaggatgtggtagatggaatctgcaaacacaactttgaccctcgagtctgtggaaagcatgctacaatgtttggacaaggcagttattttgcaaagaaggcaagctactctcataacttttctaagaagtcctccaaaggagtccacttcatgtttctggccaaagtgctgacgggcagatacacaatgggcagtcatggcatgagaaggcccccgccagtcaatcctggcagtgtcaccagtgacctttatgactcttgtgtggataatttctttgagcctcagatttttgtcatttttaatgatgaccagagttacccttattttgttatccaatatgaagaagtcagtaacactgtttccatttgaaaaatcttggtactgctaaattatttgatatgaactcaatccagcatttgtagcaggttttgaatgggtgggactgggtggggaacagcattggacattaatagggcacttttcagacccattttttaaagtgctagaaaatgctttttttaaaaaaaaaatacaagttttaaaatgaccacttactctttaattatttactaattgctagtgtactcagtgtggaaaagactacagattacacactcttttcattcacacttgtacatatagacagcaatgttattaggagcattaaattaaaaaactgaacagcctaatttaaatgtggcttgggcctggtagaagtttgaccaaatggaatggaggctgtgagcaatgtgaggattctatttatttatttacgtttgataaaacttactggaactagtactaccatgcgtattccctgtccaaagcatcactgctttggtatagtataagttcatgaaattctggtgggtagaaagaaatttttatttctatcagcagtactaaaatgtatcagccaaccagagaacatcagtgactttaacttctgcagagtttgccccagaattcagagttctatttagaggaagttaaaacaacaacaaaaaacaaccatttgaaaaatttttgtcaccagcaaaacttttcactaattagtgatatgaaatgtgatttttgtgttgttaaacttcagctttggaaaactcagtctctttcattatcatccattccaatttgaaggagttgggcagctaatttggttaaaggcagtcttgagggttagaagtattacttccttttcgggttccagacctagcttgtgactgaaagttttagaaaaaggaagtacatctatagccaaattgataaggttattactgtgttttgcacaaagtatattagcaaaagtatttgctggaattattggtagatggcagtcccactcctacacctgctttgtcagatacagctgggttccctggctgactctgtaccttacttacactacttacttaatagaaacacaaacttggaaattgtgccagtggtccagctggagcacaacgtttggtgaatatgctgtttcctcagttcagagaggtagcaactaggtaaactccttataaaaagcaaatacctggatttacaaaagtgaaagtagttgttcacaaaagaattcgccatggaattctttcagttaccaagctctcctggtaatgtttgtggttatatcatttacacaaaacttttcaggaacttctgtgttgtttaagcaagatgtatctgtactgatgtctcagtgaatcagtctgtttattaagcacttatcagggcttccacacacttatttattttgccctagttaatcctgttgtttgctgccattggcatgaaatggccaactgtggctgttacagttctttcattcaattataacttgtaaaccagtgactcctaatctttttcaagttaagacaccttaccattgcttatttggttttatgagacttgttcctttttttctccctaaggaaaaagaaagctttatgacatatttatttttttaataaaactaagcaaaaataaaacttatggtaattctttaaaa

SEQ ID NO: 31159 - DNA, 4181 bp, Homo sapiens
  source 1..4181: mol_type = unassigned DNA
agtgcgagcgccggcctcgcggctccggccccggccccggccccgcgccggcagtgtgcggggctctcgcggatcggggtgattgattttgagactgccctttgtaccgaattcactcgggtcccgtcagcatgaagatggaattggtttacacttcttaggcacttagagcctgtggcaggtgtatacatcagaccgaggcgccgaaggatttagttggggtcgcaggcgcctgccccttccccgttcgtcagggtgggggcgcgtctatgcggcctcccccgcgggccgaccccgggtgctctgaggcgcctaggagcccttcccagaccccgggggggagggcacggcagctacgggagccttccggctaccccgcgtttcgggctgcagcccagaagtttggaagatgttttcacattaactttgagagcgcacaagtcttcgtcttcctccccgccgccgcgggaagcgctcgccgcctttcccccgcgcttcgcggctcagttctgcgagcccccaagacccgttggacgctcctcgggaggatttttagactctgaggagcagttggagctaatccacattatggaaatggaaaccaccgaacctgagccagactgtgtagtgcagcctccctctcctcctgatgacttttcatgccaaatgagactctctgagaagatcactccattgaagacttgttttaagaaaaaggatcagaaaagattgggaactggaaccctgaggtctttgaggccaatattaaacactcttctagaatctggctcacttgatggggtttttagatctaggaaccagagtacagatgagaacagcttacatgaacctatgatgaagaaagccatggaaatcaattcatcatgcccaccagcagaaaataatatgtctgttctgattcctgataggacaaatgttggggaccagataccggaagcccatccttccactgaagctccagaacgagtggttccaatccaagatcacagctttccatcagaaaccctcagtgggacggtggcagattccacaccagctcacttccagactgatcttttgcacccagtttcaagtgatgttcctactagtcctgactgcttagacaaagtcatagattatgttccaggcattttccaagaaaacagttttacaatccaatacattctggacaccagtgataagctgagtactgagctctttcaggacaaaagtgaagaggcttcccttgacctcgtgtttgagctggtgaaccagttgcagtaccacactcaccaagagaacggaattgaaatttgcatggactttctgcaaggcacttgtatttatggcagggattgtttgaagcaccacactgtcttgccatatcattggcagatcaaaaggacaactactcaaaagtggcagagtgtattcaatgattctcaggagcacttggaaagattttactgtaacccagaaaatgatagaatgagaatgaagtatggaggacaagaattttgggcagatttgaatgccatgaacgtgtatgaaacaactgaatttgaccaactacgaaggctgtccacaccaccctctagcaatgtcaactctatttaccacacagtctggaaattcttctgtagggaccactttggatggagagagtatcccgagtctgtcattcgattgattgaagaagccaactctcggggtctgaaagaggttcgatttatgatgtggaataaccactacatcctccacaattcattcttcaggagagagataaaaaggagacccctcttccgctcctgttttatactgcttccatatttacagacacttggtggggttcccacacaagctcctccacctcttgaagcaacttcatcatcacaaattatctgcccagatggggtcacttcagcaaacttttaccctgaaacttgggtttatatgcatccatctcaggacttcatccaagtccctgtttctgcagaggataaaagttatcggatcatttacaatctttttcataagactgtgcctgagtttaaatacagaattttgcagatattgagagtccaaaaccagtttctttgggagaaatataaaaggaaaaaggaatatatgaacaggaaaatgtttggccgtgacaggataataaatgagagacatttatttcatggaacatcccaggatgtggtagatggaatctgcaaacacaactttgaccctcgagtctgtggaaagcatgctacaatgtttggacaaggcagttattttgcaaagaaggcaagctactctcataacttttctaagaagtcctccaaaggagtccacttcatgtttctggccaaagtgctgacgggcagatacacaatgggcagtcatggcatgagaaggcccccgccagtcaatcctggcagtgtcaccagtgacctttatgactcttgtgtggataatttctttgagcctcagatttttgtcatttttaatgatgaccagagttacccttattttgttatccaatatgaagaagtcagtaacactgtttccatttgaaaaatcttggtactgctaaattatttgatatgaactcaatccagcatttgtagcaggttttgaatgggtgggactgggtggggaacagcattggacattaatagggcacttttcagacccattttttaaagtgctagaaaatgctttttttaaaaaaaaaatacaagttttaaaatgaccacttactctttaattatttactaattgctagtgtactcagtgtggaaaagactacagattacacactcttttcattcacacttgtacatatagacagcaatgttattaggagcattaaattaaaaaactgaacagcctaatttaaatgtggcttgggcctggtagaagtttgaccaaatggaatggaggctgtgagcaatgtgaggattctatttatttatttacgtttgataaaacttactggaactagtactaccatgcgtattccctgtccaaagcatcactgctttggtatagtataagttcatgaaattctggtgggtagaaagaaatttttatttctatcagcagtactaaaatgtatcagccaaccagagaacatcagtgactttaacttctgcagagtttgccccagaattcagagttctatttagaggaagttaaaacaacaacaaaaaacaaccatttgaaaaatttttgtcaccagcaaaacttttcactaattagtgatatgaaatgtgatttttgtgttgttaaacttcagctttggaaaactcagtctctttcattatcatccattccaatttgaaggagttgggcagctaatttggttaaaggcagtcttgagggttagaagtattacttccttttcgggttccagacctagcttgtgactgaaagttttagaaaaaggaagtacatctatagccaaattgataaggttattactgtgttttgcacaaagtatattagcaaaagtatttgctggaattattggtagatggcagtcccactcctacacctgctttgtcagatacagctgggttccctggctgactctgtaccttacttacactacttacttaatagaaacacaaacttggaaattgtgccagtggtccagctggagcacaacgtttggtgaatatgctgtttcctcagttcagagaggtagcaactaggtaaactccttataaaaagcaaatacctggatttacaaaagtgaaagtagttgttcacaaaagaattcgccatggaattctttcagttaccaagctctcctggtaatgtttgtggttatatcatttacacaaaacttttcaggaacttctgtgttgtttaagcaagatgtatctgtactgatgtctcagtgaatcagtctgtttattaagcacttatcagggcttccacacacttatttattttgccctagttaatcctgttgtttgctgccattggcatgaaatggccaactgtggctgttacagttctttcattcaattataacttgtaaaccagtgactcctaatctttttcaagttaagacaccttaccattgcttatttggttttatgagacttgttcctttttttctccctaaggaaaaagaaagctttatgacatatttatttttttaataaaactaagcaaaaataaaa

SEQ ID NO: 31160 - DNA, 1770 bp, Homo sapiens
  source 1..1770: mol_type = unassigned DNA
agagccgggcggcgcctcagctgcactgcgcggagttggcgcggcccgggaccaggagctgagcaaaccgccgcggccaacaggaggcgtcactcggacccgggctcggcgccggggtgtcgcgcggcggcgggcgggcaggctttggagcggcagttttttcggaaagtgcttttggccgggagtgccgcagaaccccagcgtcacgaggatttttagactctgaggagcagttggagctaatccacattatggaaatggaaaccaccgaacctgagccagactgtgtagtgcagcctccctctcctcctgatgacttttcatgccaaatgagactctctgagaagatcactccattgaagacttgttttaagaaaaaggatcagaaaagattgggaactggaaccctgaggtctttgaggccaatattaaacactcttctagaatctggctcacttgatggggtttttagatctaggaaccagagtacagatgagaacagcttacatgaacctatgatgaagaaagccatggaaatcaattcatcatgcccaccagcagaaaataatatgtctgttctgattcctgataggacaaatgttggggaccagataccggaagcccatccttccactgaagctccagaacgagtggttccaatccaagatcacagctttccatcagaaaccctcagtgggacggtggcagattccacaccagctcacttccagactgatcttttgcacccagtttcaagtgatgttcctactagtcctgactgcttagacaaagtcatagattatgttccaggcattttccaagaaaacagttttacaatccaatacattctggacaccagtgataagctgagtactgagctctttcaggacaaaagtgaagaggcttcccttgacctcgtgtttgagctggtgaaccagttgcagtaccacactcaccaagagaacggaattgaaatttgcatggactttctgcaaggcacttgtatttatggcagggattgtttgaagcaccacactgtcttgccatatcattggcagatcaaaaggacaactactcaaaagtggcagagtgtattcaatgattctcaggagcacttggaaagattttactgtaacccagaaaatgatagaatgagaatgaagtatggaggacaagaattttgggcagatttgaatgccatgaacgtgtatgaaacaactgaatttgaccaactacgaaggctgtccacaccaccctctagcaatgtcaactctatttaccacacagtctggaaattcttctgtagggaccactttggatggagagagtatcccgagtctgtcattcgattgattgaagaagccaactctcggggtctgaaagaggttcgatttatgatgtggaataaccactacatcctccacaattcattcttcaggagagagataaaaaggagacccctcttccgctcctgttttatactgcttccatatttacagacacttggtggggttcccacacaagctcctccacctcttgaagcaacttcatcatcacaaattatctgcccagatggggtcacttcagcaaacttttaccctgaaacttgggtttatatgcatccatctcaggacttcatccaagtccctgtttctgcagaggataaaagttatcggatcatttacaatctttttcataagactgtgcctgagtttaaatacagaattttgcagatattgagagtccaaaaccagtttctttgggagaaat

SEQ ID NO: 31161 - DNA, 2035 bp, Homo sapiens
  source 1..2035: mol_type = unassigned DNA
caccattcctttctcacctggcacaatctcagatttttagactctgaggagcagttggagctaatccacattatggaaatggaaaccaccgaacctgagccagactgtgtagtgcagcctccctctcctcctgatgacttttcatgccaaatgagactctctgagaagatcactccattgaagacttgttttaagaaaaaggatcagaaaagattgggaactggaaccctgaggtctttgaggccaatattaaacactcttctagaatctggctcacttgatggggtttttagatctaggaaccagagtacagatgagaacagcttacatgaacctatgatgaagaaagccatggaaatcaattcatcatgcccaccagcagaaaataatatgtctgttctgattcctgataggacaaatgttggggaccagataccggaagcccatccttccactgaagctccagaacgagtggttccaatccaagatcacagctttccatcagaaaccctcagtgggacggtggcagattccacaccagctcacttccagactgatcttttgcacccagtttcaagtgatgttcctactagtcctgactgcttagacaaagtcatagattatgttccaggcattttccaagaaaacagttttacaatccaatacattctggacaccagtgataagctgagtactgagctctttcaggacaaaagtgaagaggcttcccttgacctcgtgtttgagctggtgaaccagttgcagtaccacactcaccaagagaacggaattgaaatttgcatggactttctgcaaggcacttgtatttatggcagggattgtttgaagcaccacactgtcttgccatatcattggcagatcaaaaggacaactactcaaaagtggcagagtgtattcaatgattctcaggagcacttggaaagattttactgtaacccagaaaatgatagaatgagaatgaagtatggaggacaagaattttgggcagatttgaatgccatgaacgtgtatgaaacaactgaatttgaccaactacgaaggctgtccacaccaccctctagcaatgtcaactctatttaccacacagtctggaaattcttctgtagggaccactttggatggagagagtatcccgagtctgtcattcgattgattgaagaagccaactctcggggtctgaaagaggttcgatttatgatgtggaataaccactacatcctccacaattcattcttcaggagagagataaaaaggagacccctcttccgctcctgttttatactgcttccatatttacagacacttggtggggttcccacacaagctcctccacctcttgaagcaacttcatcatcacaaattatctgcccagatggggtcacttcagcaaacttttaccctgaaacttgggtttatatgcatccatctcaggacttcatccaagtccctgtttctgcagaggataaaagttatcggatcatttacaatctttttcataagactgtgcctgagtttaaatacagaattttgcagatattgagagtccaaaaccagtttctttgggagaaatataaaaggaaaaaggaatatatgaacaggaaaatgtttggccgtgacaggataataaatgagagacatttatttcatggaacatcccaggatgtggtagatggaatctgcaaacacaactttgaccctcgagtctgtggaaagcatgctacaatgtttggacaaggcagttattttgcaaagaaggcaagctactctcataacttttctaagaagtcctccaaaggagtccacttcatgtttctggccaaagtgctgacgggcagatacacaatgggcagtcatggcatgagaaggcccccgccagtcaatcctggcagtgtcaccagtgacctttatgactcttgtgtggataatttctttgagcctcagatttttgtcatttttaatgatgaccagagttacccttattttgttatccaatatgaagaagtcagtaacactg

SEQ ID NO: 31162 - DNA, 2150 bp, Homo sapiens
  source 1..2150: mol_type = unassigned DNA
aaaagcataaagaatgtataacaacctaattgttacaagggagtggaattaataatctacaagaaggcacaaaaggacagaaaagaaacagaacaaatgagaaaaatagaaagccaacagtaatatggatttttagactctgaggagcagttggagctaatccacattatggaaatggaaaccaccgaacctgagccagactgtgtagtgcagcctccctctcctcctgatgacttttcatgccaaatgagactctctgagaagatcactccattgaagacttgttttaagaaaaaggatcagaaaagattgggaactggaaccctgaggtctttgaggccaatattaaacactcttctagaatctggctcacttgatggggtttttagatctaggaaccagagtacagatgagaacagcttacatgaacctatgatgaagaaagccatggaaatcaattcatcatgcccaccagcagaaaataatatgtctgttctgattcctgataggacaaatgttggggaccagataccggaagcccatccttccactgaagctccagaacgagtggttccaatccaagatcacagctttccatcagaaaccctcagtgggacggtggcagattccacaccagctcacttccagactgatcttttgcacccagtttcaagtgatgttcctactagtcctgactgcttagacaaagtcatagattatgttccaggcattttccaagaaaacagttttacaatccaatacattctggacaccagtgataagctgagtactgagctctttcaggacaaaagtgaagaggcttcccttgacctcgtgtttgagctggtgaaccagttgcagtaccacactcaccaagagaacggaattgaaatttgcatggactttctgcaaggcacttgtatttatggcagggattgtttgaagcaccacactgtcttgccatatcattggcagatcaaaaggacaactactcaaaagtggcagagtgtattcaatgattctcaggagcacttggaaagattttactgtaacccagaaaatgatagaatgagaatgaagtatggaggacaagaattttgggcagatttgaatgccatgaacgtgtatgaaacaactgaatttgaccaactacgaaggctgtccacaccaccctctagcaatgtcaactctatttaccacacagtctggaaattcttctgtagggaccactttggatggagagagtatcccgagtctgtcattcgattgattgaagaagccaactctcggggtctgaaagaggttcgatttatgatgtggaataaccactacatcctccacaattcattcttcaggagagagataaaaaggagacccctcttccgctcctgttttatactgcttccatatttacagacacttggtggggttcccacacaagctcctccacctcttgaagcaacttcatcatcacaaattatctgcccagatggggtcacttcagcaaacttttaccctgaaacttgggtttatatgcatccatctcaggacttcatccaagtccctgtttctgcagaggataaaagttatcggatcatttacaatctttttcataagactgtgcctgagtttaaatacagaattttgcagatattgagagtccaaaaccagtttctttgggagaaatataaaaggaaaaaggaatatatgaacaggaaaatgtttggccgtgacaggataataaatgagagacatttatttcatggaacatcccaggatgtggtagatggaatctgcaaacacaactttgaccctcgagtctgtggaaagcatgctacaatgtttggacaaggcagttattttgcaaagaaggcaagctactctcataacttttctaagaagtcctccaaaggagtccacttcatgtttctggccaaagtgctgacgggcagatacacaatgggcagtcatggcatgagaaggcccccgccagtcaatcctggcagtgtcaccagtgacctttatgactcttgtgtggataatttctttgagcctcagatttttgtcatttttaatgatgaccagagttacccttattttgttatccaatatgaagaagtcagtaacactgtttccatttgaaaaatctt

SEQ ID NO: 31163 - DNA, 3681 bp, Homo sapiens
  source 1..3681: mol_type = unassigned DNA
caccattcctttctcacctggcacaatctcagatttttagactctgaggagcagttggagctaatccacattatggaaatggaaaccaccgaacctgagccagactgtgtagtgcagcctccctctcctcctgatgacttttcatgccaaatgagactctctgagaagatcactccattgaagacttgttttaagaaaaaggatcagaaaagattgggaactggaaccctgaggtctttgaggccaatattaaacactcttctagaatctggctcacttgatggggtttttagatctaggaaccagagtacagatgagaacagcttacatgaacctatgatgaagaaagccatggaaatcaattcatcatgcccaccagcagaaaataatatgtctgttctgattcctgataggacaaatgttggggaccagataccggaagcccatccttccactgaagctccagaacgagtggttccaatccaagatcacagctttccatcagaaaccctcagtgggacggtggcagattccacaccagctcacttccagactgatcttttgcacccagtttcaagtgatgttcctactagtcctgactgcttagacaaagtcatagattatgttccaggcattttccaagaaaacagttttacaatccaatacattctggacaccagtgataagctgagtactgagctctttcaggacaaaagtgaagaggcttcccttgacctcgtgtttgagctggtgaaccagttgcagtaccacactcaccaagagaacggaattgaaatttgcatggactttctgcaaggcacttgtatttatggcagggattgtttgaagcaccacactgtcttgccatatcattggcagatcaaaaggacaactactcaaaagtggcagagtgtattcaatgattctcaggagcacttggaaagattttactgtaacccagaaaatgatagaatgagaatgaagtatggaggacaagaattttgggcagatttgaatgccatgaacgtgtatgaaacaactgaatttgaccaactacgaaggctgtccacaccaccctctagcaatgtcaactctatttaccacacagtctggaaattcttctgtagggaccactttggatggagagagtatcccgagtctgtcattcgattgattgaagaagccaactctcggggtctgaaagaggttcgatttatgatgtggaataaccactacatcctccacaattcattcttcaggagagagataaaaaggagacccctcttccgctcctgttttatactgcttccatatttacagacacttggtggggttcccacacaagctcctccacctcttgaagcaacttcatcatcacaaattatctgcccagatggggtcacttcagcaaacttttaccctgaaacttgggtttatatgcatccatctcaggacttcatccaagtccctgtttctgcagaggataaaagttatcggatcatttacaatctttttcataagactgtgcctgagtttaaatacagaattttgcagatattgagagtccaaaaccagtttctttgggagaaatataaaaggaaaaaggaatatatgaacaggaaaatgtttggccgtgacaggataataaatgagagacatttatttcatggaacatcccaggatgtggtagatggaatctgcaaacacaactttgaccctcgagtctgtggaaagcatgctacaatgtttggacaaggcagttattttgcaaagaaggcaagctactctcataacttttctaagaagtcctccaaaggagtccacttcatgtttctggccaaagtgctgacgggcagatacacaatgggcagtcatggcatgagaaggcccccgccagtcaatcctggcagtgtcaccagtgacctttatgactcttgtgtggataatttctttgagcctcagatttttgtcatttttaatgatgaccagagttacccttattttgttatccaatatgaagaagtcagtaacactgtttccatttgaaaaatcttggtactgctaaattatttgatatgaactcaatccagcatttgtagcaggttttgaatgggtgggactgggtggggaacagcattggacattaatagggcacttttcagacccattttttaaagtgctagaaaatgctttttttaaaaaaaaaatacaagttttaaaatgaccacttactctttaattatttactaattgctagtgtactcagtgtggaaaagactacagattacacactcttttcattcacacttgtacatatagacagcaatgttattaggagcattaaattaaaaaactgaacagcctaatttaaatgtggcttgggcctggtagaagtttgaccaaatggaatggaggctgtgagcaatgtgaggattctatttatttatttacgtttgataaaacttactggaactagtactaccatgcgtattccctgtccaaagcatcactgctttggtatagtataagttcatgaaattctggtgggtagaaagaaatttttatttctatcagcagtactaaaatgtatcagccaaccagagaacatcagtgactttaacttctgcagagtttgccccagaattcagagttctatttagaggaagttaaaacaacaacaaaaaacaaccatttgaaaaatttttgtcaccagcaaaacttttcactaattagtgatatgaaatgtgatttttgtgttgttaaacttcagctttggaaaactcagtctctttcattatcatccattccaatttgaaggagttgggcagctaatttggttaaaggcagtcttgagggttagaagtattacttccttttcgggttccagacctagcttgtgactgaaagttttagaaaaaggaagtacatctatagccaaattgataaggttattactgtgttttgcacaaagtatattagcaaaagtatttgctggaattattggtagatggcagtcccactcctacacctgctttgtcagatacagctgggttccctggctgactctgtaccttacttacactacttacttaatagaaacacaaacttggaaattgtgccagtggtccagctggagcacaacgtttggtgaatatgctgtttcctcagttcagagaggtagcaactaggtaaactccttataaaaagcaaatacctggatttacaaaagtgaaagtagttgttcacaaaagaattcgccatggaattctttcagttaccaagctctcctggtaatgtttgtggttatatcatttacacaaaacttttcaggaacttctgtgttgtttaagcaagatgtatctgtactgatgtctcagtgaatcagtctgtttattaagcacttatcagggcttccacacacttatttattttgccctagttaatcctgttgtttgctgccattggcatgaaatggccaactgtggctgttacagttctttcattcaattataacttgtaaaccagtgactcctaatctttttcaagttaagacaccttaccattgcttatttggttttatgagacttgttcctttttttctccctaaggaaaaagaaagctttatgacatatttatttttttaataaaactaagcaaaaataaaacttatggtaattcttt

SEQ ID NO: 31164 - DNA, 3051 bp, Homo sapiens
  source 1..3051: mol_type = unassigned DNA
gacatagctgccctaaaaggaatgaggaagcgagagctctccagtgtctggctggctccgtccgtgtgacagcccatgatgttctttccggtctctgtaatattctgaatttccacctgcccgccccttcgcttataatgcagagcatgtgaagggagaccggctcggtctctctctctcccagtggactagaaggagcagagagttatgctgtttctcccattctttacagctcaccggatgtaaaagaactctggctagagaccctccaaggacagaggcacagccacacgggagtgaaatccacccctggacagtcagccgcaatactgatgaagctgagaagcagccacaatgcttcaaaaacactaaacgccaataatatggagacactaatcgaatgtcaatcagagggtgatatcaaggaacatcccctgttggcatcatgtgagagtgaagacagtatttgccagctcattggacattctcactattctatgccttaaaggcccttcaacggaagggatattcaggagagcagccaacgagaaagcccgtaaggagctgaaggaggagctcaactctggggatgcggtggatctggagaggctccccgtgcacctcctcgctgtggtctttaaggacttcctcagaagtatcccccggaagctactttcaagcgacctctttgaggagtggatgggtgctctggagatgcaggacgaggaggacagaatcgaggccctgaaacaggttgcagataagctcccccggcccaacctcctgctactcaagcacttggtctatgtgctgcacctcatcagcaagaactctgaggtgaacaggatggactccagcaatctggccatctgcattggacccaacatgctcaccctggagaatgaccagagcctgtcatttgaagcccagaaggacctgaacaacaaggtgaagacactggtggaattcctcattgataactgctttgaaatatttggggagaacattccagtgcattccagtatcacttctgatgactccctggagcacactgacagttcagatgtgtcgaccctgcagaatgactcagcctacgacagcaacgaccctgatgtggaatccaacagcagcagtggcatcagctctcccagcaggcagccccaggtgcccatggccacagctgctggcttggatagcgcgggcccacaggatgcccgagaggtcagcccagagcccattgtgagcaccgtggccaggctgaaaagctccctcgcacagcccgataggagatactcagagcccagcatgccatcctcccaggagtgcctcgagagccgggtgacaaaccaaacactaacaaagagtgaaggggacttccccgtgccccgggtaggctctcgtttggaaagtgaggaggctgaagacccatttccagaggaggtcttccctgcagtgcaaggcaaaaccaagaggccggtggacctgaagatcaagaacttggccccgggttcggtgctcccgcgggcactggttctcaaagccttctccagcagctcgctggacgcgtcctctgacagctcgcccgtggcttctccttccagtcccaaaagaaatttcttcagcagacatcagtctttcaccacaaagacagagaaaggcaagcccagccgagaaattaaaaagcactccatgtctttcacctttgcccctcacaaaaaagtgctgaccaaaaacctcagcgcgggctctgggaaatcgcaagactttaccagggaccacgtcccgaggggtgtcagaaaggaaagccagcttgccggccgaatcgtgcaggaaaatgggtgtgaaacccacaaccaaacagcccgcggcttctgcctgagaccccacgccctctcggtggatgatgtgttccagggagctgactgggagaggcctggaagcccaccctcttatgaagaggccatgcagggcccggcagccagactagtggcctccgagagccagaccgtggggagcatgacggtggggagcatgagggcgaggatgctggaggcgcactgcctcctaccccctcttccacctgctcaccacgtagaggactcaagacacaggggcagcaaagagccactccctggccacggactctctcccctgcctgagcgatggaaacagagcagaactgtccatgcttctggggactctctggggcacgtgtctggcccagggagacctgagctcctcccgctgaggaccgtctccgagtccgtgcagaggaataagcgggactgtctcgtgcgacgatgtagccagccggtctttgaggctgaccaattccaatatgccaaagaatcgtatatttaggagggaggccatacgccatgccatagcttgtgctatctgtaaatatgagacttgtaaagaactgcctgtagattgtttttaaaaggtcttgaataagctccttgagaaagttgtggaaagccctcctcagtgaggatagctacaccatggccatggcgcatcagatagtctctgtgtacctggatttgtgcaatatgtaaaaatgtatcaaatgtattatagataaggtgttaggtgcaaaggatgtctaataatccctgcacacgttttgaacttgcagtgaagtacactgctgttccttgcttcctggggcacttttctcttggttagtgtttaaaaattatcttcgcttttttaatgtggcctcaaatgtcatgccaattttcacatcttccacaaactccatttagggagaaatgtttaaatctctggtataagtttactccataccagagtaaactatatattactctatataagcagtcttgcaataactaatcaccaccatagaagaaagaaacagactgcaaggaacagagttgagtgtctggagtcatcaaaggcattaaaaactccagtaaaagctggggccgtagcaaaaatcatgaaaaacacttcaacgtgtcctttcaatcatccaattaaatgtgggtagattaatgaaaatgtattacatcaatattaactcat

SEQ ID NO: 31165 - DNA, 1183 bp, Homo sapiens
  source 1..1183: mol_type = unassigned DNA
ataatgcagagcatgtgaagggagaccggctcggtctctctctctcccagtggactagaaggagcagagagttatgctgtttctcccattctttacagctcaccggatgtaaaagaactctggctagagaccctccaaggacagaggcacagccacacgggagtgaaatccacccctggacagtcagccgcaatactgatgaagctgagaagcagccacaatgcttcaaaaacactaaacgccaataatatggagacactaatcgaatgtcaatcagagggtgatatcaaggaacatcccctgttggcatcatgtgagagtgaagacagtatttgccagctcattgaagttaagaagagaaagaaggtgctgtcctggccctttctcatgagaaggctctcccctgcatcagatttttctggggctttggagacagacttgaaagcatcgctatttgatcagcccttgtcaattatctgcggtgacagtgacacactccccagacccatccaggacattctcactattctatgccttaaaggcccttcaacggaagggatattcaggagagcagccaacgagaaagcccgtaaggagctgaaggaggagctcaactctggggatgcggtggatctggagaggctccccgtgcacctcctcgctgtggtctttaaggacttcctcagaagtatcccccggaagctactttcaagcgacctctttgaggagtggatgggtgctctggagatgcaggacgaggaggacagaatcgaggccctgaaacaggttgcagataagctcccccggcccaacctcctgctactcaagcacttggtctatgtgctgcacctcatcagcaagaactctgaggtgaacaggatggactccagcaatctggccatctgcattggacccaacatgctcaccctggagaatgaccagagcctgtcatttgaagcccagaaggacctgaacaacaaggtttgttctgcttactgatgagaaatccccaacttatgatctcaccatctgtttgccaagtccaggcaataaaatgcttcagaatgtctccaactgactcagaatcacagtgaaaatataaaatgcaaaatgcttttgtcatagttccactctctcagatacatgtatctaatgaaactgaataaatccgtgtcttctgtca

SEQ ID NO: 31166 - DNA, 3887 bp, Homo sapiens
  source 1..3887: mol_type = unassigned DNA
gacatagctgccctaaaaggaatgaggaagcgagagctctccagtgtctggctggctccgtccgtgtgacagcccatgatgttctttccggtctctgtaatattctgaatttccacctgcccgccccttcgcttataatgcagagcatgtgaagggagaccggctcggtctctctctctcccagtggactagaaggagcagagagttatgctgtttctcccattctttacagctcaccggatgtaaaagaactctggctagagaccctccaaggacagaggcacagccacacgggagtgaaatccacccctggacagtcagccgcaatactgatgaagctgagaagcagccacaatgcttcaaaaacactaaacgccaataatatggagacactaatcgaatgtcaatcagagggtgatatcaaggaacatcccctgttggcatcatgtgagagtgaagacagtatttgccagctcattgaagttaagaagagaaagaaggtgctgtcctggccctttctcatgagaaggctctcccctgcatcagatttttctggggctttggagacagacttgaaagcatcgctatttgatcagcccttgtcaattatctgcggtgacagtgacacactccccagacccatccaggacattctcactattctatgccttaaaggcccttcaacggaagggatattcaggagagcagccaacgagaaagcccgtaaggagctgaaggaggagctcaactctggggatgcggtggatctggagaggctccccgtgcacctcctcgctgtggtctttaaggacttcctcagaagtatcccccggaagctactttcaagcgacctctttgaggagtggatgggtgctctggagatgcaggacgaggaggacagaatcgaggccctgaaacaggttgcagataagctcccccggcccaacctcctgctactcaagcacttggtctatgtgctgcacctcatcagcaagaactctgaggtgaacaggatggactccagcaatctggccatctgcattggacccaacatgctcaccctggagaatgaccagagcctgtcatttgaagcccagaaggacctgaacaacaaggtgaagacactggtggaattcctcattgataactgctttgaaatatttggggagaacattccagtgcattccagtatcacttctgatgactccctggagcacactgacagttcagatgtgtcgaccctgcagaatgactcagcctacgacagcaacgaccctgatgtggaatccaacagcagcagtggcatcagctctcccagcaggcagccccaggtgcccatggccacagctgctggcttggatagcgcgggcccacaggatgcccgagaggtcagcccagagcccattgtgagcaccgtggccaggctgaaaagctccctcgcacagcccgataggagatactcagagcccagcatgccatcctcccaggagtgcctcgagagccgggtgacaaaccaaacactaacaaagagtgaaggggacttccccgtgccccgggtaggctctcgtttggaaagtgaggaggctgaagacccatttccagaggaggtcttccctgcagtgcaaggcaaaaccaagaggccggtggacctgaagatcaagaacttggccccgggttcggtgctcccgcgggcactggttctcaaagccttctccagcagctcgctggacgcgtcctctgacagctcgcccgtggcttctccttccagtcccaaaagaaatttcttcagcagacatcagtctttcaccacaaagacagagaaaggcaagcccagccgagaaattaaaaagcactccatgtctttcacctttgcccctcacaaaaaagtgctgaccaaaaacctcagcgcgggctctgggaaatcgcaagactttaccagggaccacgtcccgaggggtgtcagaaaggaaagccagcttgccggccgaatcgtgcaggaaaatgggtgtgaaacccacaaccaaacagcccgcggcttctgcctgagaccccacgccctctcggtggatgatgtgttccagggagctgactgggagaggcctggaagcccaccctcttatgaagaggccatgcagggcccggcagccagactagtggcctccgagagccagaccgtggggagcatgacggtggggagcatgagggcgaggatgctggaggcgcactgcctcctaccccctcttccacctgctcaccacgtagaggactcaagacacaggggcagcaaagagccactccctggccacggactctctcccctgcctgagcgatggaaacagagcagaactgtccatgcttctggggactctctggggcacgtgtctggcccagggagacctgagctcctcccgctgaggaccgtctccgagtccgtgcagaggaataagcgggactgtctcgtgcgacgatgtagccagccggtctttgaggctgaccaattccaatatgccaaagaatcgtatatttaggagggaggccatacgccatgccatagcttgtgctatctgtaaatatgagacttgtaaagaactgcctgtagattgtttttaaaaggtcttgaataagctccttgagaaagttgtggaaagccctcctcagtgaggatagctacaccatggccatggcgcatcagatagtctctgtgtacctggatttgtgcaatatgtaaaaatgtatcaaatgtattatagataaggtgttaggtgcaaaggatgtctaataatccctgcacacgttttgaacttgcagtgaagtacactgctgttccttgcttcctggggcacttttctcttggttagtgtttaaaaattatcttcgcttttttaatgtggcctcaaatgtcatgccaattttcacatcttccacaaactccatttagggagaaatgtttaaatctctggtataagtttactccataccagagtaaactatatattactctatataagcagtcttgcaataactaatcaccaccatagaagaaagaaacagactgcaaggaacagagttgagtgtctggagtcatcaaaggcattaaaaactccagtaaaagctggggccgtagcaaaaatcatgaaaaacacttcaacgtgtcctttcaatcatccaattaaatgtgggtagattaatgaaaatgtattacatcaatattaactcatctatagcactttgagtatctttgtagttcatgatatcctatcctataatgtggaggtaaatgattttatatgcattgggggtcatatataaaacttcaatgtaatttcactacaataaattgccttccttatttgaaagtaaaaatgttctttttttattgacatgttaactcctttccctcaattaatagaaatccactaagaaaatcattcacatattggttcactcaacaagcatttattaaatatatattcactattctagactaatagcaagaccggggatcttgtttaggaagaagcagtccctgttctccagaatttgcaaaaccattaaaaaagcacctactttaagccattttttttcagcaaggagtcattctgccagaaaaatgtagtacacaaatacaggataatataacaaatgtaaaatttctcatttctagtgaattaaactttccagtaattttacatctcacctcattcttatgatgctcagtttgcttaattattggcaaacataatggtaaaatgtttgtactgtattagagctttactgttcgattattaagatatttatccagtatcttagagatgctggacttcaattttccttattttatctttttaaaataaaatatcatgcatgcttctgatttgttatagaaa

SEQ ID NO: 31167 - DNA, 828 bp, Homo sapiens
  source 1..828: mol_type = unassigned DNA
atggccacagctgctggcttggatagcgcgggcccacaggatgcccgagaggtcagcccagagcccattgtgagcaccgtggccaggctgaaaagctccctcgcacagcccgataggagatactcagagcccagcatgccatcctcccaggagtgcctcgagagccgggtgacaaaccaaacactaacaaagagtgaaggggacttccccgtgccccgggtaggctctcgtttggaaagtgaggaggctgaagacccatttccagaggaggtcttccctgcagtgcaaggcaaaaccaagaggccggtggacctgaagatcaagaacttggccccgggttcggtgctcccgcgggcactggttctcaaagccttctccagcagctcgctggacgcgtcctctgacagctcgcccgtggcttctccttccagtcccaaaagaaatttcttcagcagacatcagtctttcaccacaaagacagagaaaggcaagcccagccgagaaattaaaaagcactccatgtctttcacctttgcccctcacaaaaaagtgctgaccaaaaacctcagcgcgggctctgggaaatcgcaagactttaccagggaccacgtcccgaggggtgtcagaaaggaaagccagcttgccggccgaatcgtgcaggaaaatgggtgtgaaacccacaaccaaacagcccgcggcttctgcctgagaccccacgccctctcggtggatgatgtgttccagggagctgactgggagaggcctggaagcccaccctcttatgaagaggccatgcagggcccggcagccagaccgtggggagcatga

SEQ ID NO: 31168 - DNA, 630 bp, Homo sapiens
  source 1..630: mol_type = unassigned DNA
ccctgagggccctttctctttccatctcaggaactcaaacatgaccaggaagatcttcacaaataccagggagcggtggaggcagcagaatgtcaacagcgcctttgccaagctgaggaagctcatccccactcaccctccagacaaaaagctgagcaaaaatgaaacgcttcgcctggcaatgaggtatatcaacttcttggtcaaggtcttgggggagcaaagcctgcaacaaacgggagtggctgctcaggggaacattctggggctcttccctcaaggaccccacctgccaggcctggaggacagaactctgcttgagaactaccaggttccttcacctggtccaagccaccacattccttagtgtggctctggctgtcatctcccagggcagcacttgcccagaaatcactgcctgtggacagacttttgcatgttccagagttgacctgatgataactcgtgaagcatgaattctagcttcctgggaggtggctcagagacagctgcagggagctgaaagaagccatgaggaatgtcacttgtgggccgccaccccccagggatgtcaggtagagcggcctacctctgcctattttaaatccaggttctgcataagacttttgg

SEQ ID NO: 31169 - DNA, 2137 bp, Homo sapiens
  source 1..2137: mol_type = unassigned DNA
ccacccgggacttgggcagcggcgccggcagcccagcgtctatttgcgcttaagagccagcaaggaagctccaggggccccagctggccgtgctcccccgggatgcaagtccctgcgctgacgcccggcagcggctggcacgggcgcggctgctccgggtgcacagggatgctgctgtttcggggaccccggcgccctgccttggccagccccgcgggcccctgaggccactctccggagcgcgccgccgctgggcttctggcgctgcctgaggcatcctccccaaccaccgaacctccggcggttctcctcggcccagaccgatggagccggggatgctgggtccacacaacctcccacaccacgagccaatcagcttcggcatcgatcagatcctgagcggccccgaaaccccagggggcggtctaggcctgggtcgcgggggccagggtcatggggagaatggggcgttctcgggtggataccacggagcctcgggctacggtcccgccggctcacttgccccgctgcccggcagctccggagtgggcccaggcggcgtgatccgcgtccctgcgcaccgcccgctgcctgtgccgccgcccgctgggggggcgcctgcagtgcctgggccctcgggtttgggcggcgccggaggcctagcgggactcaccttcccctggatggacagcggccgccgctttgccaaggaccggctcacggctgcgctctcgcccttctctgggacgcgccgcataggccacccctaccaaaaccggacccctccgaagcggaagaagccgcgcacgtccttctcccgctcacaggtgctggagttggagcggcgcttcctgcgccagaagtacctggcctctgcggagagggcggcgctggccaaggccttgcgcatgaccgacgcacaggtcaaaacgtggttccagaaccgacgcaccaagtggcggcgccagacggcggaggagcgcgaggccgagcggcaccgcgcgggccggctgctcctgcatctgcagcaggacgcgttgccacggccgctgcggccgccgctgcccccggaccctctctgcctgcacaactcgtcgctcttcgcgctgcagaacctgcagccctgggccgaggacaacaaagtggcttcagtgtccgggctcgcctcggtggtgtgagcgacgcccgtccgatcggcgtggagcgccgggcccggagcggtggagcgcgcggctgcctgcgtccatggtctagtggcagccgggcgcgtgaggagcggcaggccttgaggctgtcgtcgagggctcctccaccaccggccggctcccaagccagcgttgcgcagatgcacggccagctcagaggcggcctttcccgccatttttcacttcactgccgttacgccctcgctggaacctgaggcgccgagagggcgggacctgcaggacagtagccaatgaggtgcggggagggggccgggctggccaatgggagctgctttcctgagggactcgaaattctccggcgggtggtcgggagctggggctctgaggggctctagcggcgttgcgcgcggtgccggctgggtctgtaccaaaggtgtgaaggaaagaagacaccgaccacggcgaagcaatagagggggtgctggagcgcgagaggctggctgattgtgaccgaaaccagagggttgtccaccccgggcatctcatccctcaactgtaaaataatcgctaaggattccttcctgactttgagcctcacgttgtcatgtgtgttcagcctgctggccacatcctccggcaacacgcccgggcaggaggcgagtcggatacttacacacccaacgaaagagaaaatctggctccggtgtcacatagggacagagaagggagaggaggaaacagtggacaaagttaatgggcccagtggagttagggtgaagagaatttggaaaataatttggaagtgacaagcttaagaagaatcaaaggtaattccaagactggaaatgtgcagcatcaggaaatcaatggtgctgtggatgatgaaagggaaattgggaagactggagcaaaattaactgtataggcaaaactaaatgttatacctagagagaataaatcctggagaagtg

SEQ ID NO: 31170 - DNA, 1883 bp, Homo sapiens
  source 1..1883: mol_type = unassigned DNA
gccgggcgctccatggccgcgccgtaacggggacccagccgcctccccgcccagcccagcccagcccttccgcccgcccaggatggaggcgcccgccagcgcgcagaccccgcacccgcacgagcccatcagcttcggcatcgaccagatccttaacagcccggaccaggacagcgcacccgccccgcggggccccgacggcgccagctacctgggagggccccccgggggccgtccgggcgccacatacccgtctctgcccgcctcctttgcgggcctcggcgcgcccttcgaggacgcgggatcttacagtgtgaacctgagcctagcgcccgcaggcgtgatccgggtgccggcgcacaggccgctgcccggggccgtgccaccgcctctgccaagcgcgctacccgccatgccctccgtgcccacggtctccagccttggcggtctcaatttcccctggatggagagcagccgccgcttcgtgaaagaccgcttcacagcggcggccgcactcacgcccttcaccgtgacccggcgcatcggccacccctaccagaaccggacgccgcccaagcgtaagaagccgcgcacgtccttttcccgggtgcagatctgcgagctggaaaagcgcttccatcgccagaagtacctggcctctgccgagagggcggcgctcgccaagtccctcaaaatgacggacgcgcaggtcaagacctggttccaaaaccggaggaccaagtggcggcggcagacggcggaggagcgggaggcggagcggcagcaggcgagccggctcatgctgcagctgcaacacgacgccttccaaaagagcctcaacgactccatccagcctgacccgctctgtctgcacaactcgtcactctttgctctgcagaatctgcagccctgggaggaggatagttccaaggttcccgctgtcacctccctggtgtgagcccaccagcgcgcaccgtcgccacggatcgccgcccccacccagccgggcgccccggaccccccaggcgggctgcgggggaaccggcgccgagaggggaaggggccgcctagcccgagtaggccccagggcgcggccacagactggcgggccgcggaagggggtagggcccgagctccgcgcggccgcacaatccgagcccccgccccgcgccccgtcccgccccaggcccgggcctgacaagaaagcgccttacgtttctccgccccccgcccgcaccccccgggccgggcgcctgtattatactttgtacttttgcccaaacgtgtaaataataaaaaagttttggcttttttctttagaaaccggccacctgcttcccccgcgggggccgctggaggaagggcagccgacccggccgctgggggaagtgccaggggcccggggcaccctgcgtttaggctgggtccactcttcttcttttccgttccttttatttaagtctttttatttaataaaaaagttagctatttcacttaacgccgcttttatttcgttttcgttccaataatgctcggcgacccccggccctgcgccccacccctgcggcggtagaagccgagcggcggcgcgcagggcgcgtccacttccgcaacgttcgtctgcattcgcctcggctgcaaccccggcccgggcccccgaggaggatgcgcggtgcaggtcagttggtgccggccacccgcagcctgggtgcgcacgggatggggactggacatgggaaaggtgctccaggcccgaaggccgcgggccagcgccggggcgggctggggagtgaaaggctgggcctgggcagatgcctaggccgtccccaggtcaaatccacctggggggtgggaggcagggtggcctcgaacttcttagagct

SEQ ID NO: 31171 - DNA, 2146 bp, Homo sapiens
  source 1..2146: mol_type = unassigned DNA
tactcccggagtcactcatcccttaagcaagcagggtggggttaggtgcgcgtgcgcggttttaatactcctccccgaactgccaactcttcacgcacgcgaagtaggccccaccctggctgggtttacgcgtgcgcactaacgggcctggtcccggaagaccacacgcgtgcgtggtggggactacggtgacagtaccccgggtggggcgagggccagtcatggcggagtcctggtctgggcaggccttgcaggctctgccggccacggtgctgggcgcgctgggcagcgagttcttgcgggagtgggaggcgcaggacatgcgcgtgaccctcttcaagctgctgctgctgtggttggtgttaagtctcctgggcatccagctggcgtgggggttctacgggaatacagtgaccgggttgtatcaccgtccaggtctgggtggtcagaatggatccacgcctgatggctccacgcatttcccttcgtgggaaatggcagcaaacgaacctctcaaaacccacagagaataagggaaggcagcagagggtctccaagggcatcactgggtctgctggcttctacactgggttctgctactccccagacctcagggacaactgccgggggttcagggttggtagcagggagtacccagtgcctacagggctgggcctcttctgcctcttaagcctgctccctcacccaggcactgggcaagtgaagagtttgcctgtactcttatctgggtgccttaaggagagagattgtgttcttcctctctcaggggtgataactcaggaagcctctgggttgggaagaccatcagttcttttgtcttaggtttcttttcctgtccctcttccatccccaagatgtgaccccataaaaatttttcctgagttggccaggcatggtggctcacgcctgtaatcccaacactttgggaggctgaggcaggcagatcacgaggtcaggagttcgagaccagcctgaccaacatggtgaaaaccccatctctactaaaaatacaaaaattagccgggtgtggtggcacacaccagtaatcccagctactcaggaggctgaagcaggagatttgcttgaacctgggaggcagaggttgcagtgagccaagattgcgccgttgtactccagcctgggcaacagagcaagacccatctcaaaaaaaaaatttttttcctgagaggaagcctgaggttgaccagctctggggtttgtaaggcaggtctgttttctcctaggccctgagttttctgaatctctggttttgctttgttggcaaggagccagggaatcctgacctgagccagaccttaagctctatggttatttagctggccattcaggtataaggcagggtggtgtacctgctggcactatccagatggaggcaccaaacacccacatacctggcccaaccagacttctcccgtgagccaggcaaaggaaattgtcatctgccaactgtcctactcatattcctctcagtccttcttgggggtaagctgattacctgaaggacagctgaacccctggggtagcctcctatccaccactgcttaagtgcctatgggaatgtgggtctgcaccttgtcccctcataggatggtaccaagcatttagtgcacagtggccccatcatagcctgcagcctcatcatttcccatctggacctggtacaaatgcacgtcacaggctcagctcctccccactagcattttctctaccttcaagaaccaggcagccctgccatgtcacaataggccaggggagtttccaaagatgtgggtggcaaatgcccctatagaaacaccagtacctgaaagcactgtagccctggacctgcctccttccctcggggccatacttctgtttccatctgctgggccaccagccactttagtgacccctgcctacttccttcctgttggatatcatacttccatctggctgcctttgcttaagccatctttgtggtagaggggccctggaattgcagctgtactgaggatgatgttattcacagcccctggcccacccactaatactactgcacagagtcaggatctcacatttcaccccaggctcaactgaggatgtggcttattaaacacggaagtgc

SEQ ID NO: 31172 - DNA, 1151 bp, Homo sapiens
  source 1..1151: mol_type = unassigned DNA
tggaaagctacacgtgtgagcctagaggcgggtcccggttgcagacttgccatggcctccgaagcttctgtgcgtctaggggtgccccctggccgtctgtggatccagaggcctggcatctacgaagatgaggaggggagaacctgggtgactgtggtcgtgcggttcaatccctcgcgtagggaatgggccagggcctcccagggcagcagatatgaacccagcatcacagtgcacttgtggcagatggcagtgcatacccgggagctactctcctccggccagatgcccttctcccagctgcccgccgtgtggcagctctaccccgggaggaagtaccgagcagcggattccagtttctgggaaatagcagaccatggccagattgactctatggagcagctggtcctaacatatcagccggagaggaaagactgacactgggagtggctggccctgctggccctgcctcttctggcctggtgtctcctcatgccccctcagtgaggatcttcatgtacctgctcttctgtttgcacacccagcatagcctccttgcaggcagaaggcagtagggcccctgcacactcagtttctctcgttttccttagttatcagtcctgtcctgtcccactcaggtctgtacttagggcagctggcctggatgggcttcactggggccctgtctgtgtgctgagccagtttcccctgctggctgcaagctgtgggttctttctcctctgtgcccctcatgctgatcttctagatgccactcccaaatccccttcatacccaccaggatgtgtgcccagccaggcctccagcacccccagtgcagctcgtgattggaaactcaccatcggcaggcagtggttcggtttaagagatggcattagagggagcccagtctggatgtggacttggatgccctgtgggtatcagttctgctgacactttggcccgaaatagatccagtgctgagcaagcaatgtacaccagagcctcagtgagcccatctgcacagtggggagcatggagggatgggtttggcctgtgcttctgcttattcagtccttcagctcacggaagggatgctagtccgtgaaggtgacctcacagtactggttaattaaactttattgctcactgtc

SEQ ID NO: 31173 - DNA, 1738 bp, Homo sapiens
  source 1..1738: mol_type = unassigned DNA
acacgtgtgagcctagaggcgggtcccggttgcagacttgccatggcctccgaagcttctgtgcgtctaggggtgccccctggccgtctgtggatccagaggcctggcatctacgaagatgaggaggggagaacctgggtgactgtggtcgtgcggttcaatccctcgcgtagggaatgggccagggcctcccagggcagcagatatgaacccagcatcacagtgcacttgtggcagatggcagtgcatacccgggagctactctcctccggccagatgcccttctcccagctgcccgccgtgtggcagctctaccccgggaggaagtaccgagcagcggattccagtttctgggaaatagcagaccatggccagattgactctatggagcagctggtcctaacatatcagccggagaggaaagactgacactgggagtggctggtatgttggggccctgtgcgtctcagtgtagggatcagacgaaagtgagaagacctctcctcttttcagaaagacggcgtggcctcctcctccctgctgtttgctgagatttttcttacatagccacctgtcacctctgttccccagccccttggatgtgatggtacacagtgggtgggcccccataataagttcctaaagcatgggatctcatcgaataagactcatcatttaatccttgtgagaattttgtgaggtgtacgtgttaatgtcccatttcacgacgaaaagacaagactctggggatgggaatgacttcctcgagaccatacagccaggaaatagcggtgaatctagtgatctcgggtccctagatttaaccatggcactgaggtgccgtgtgacggtggccttggaggacccagcactgacccatagagggctcctctcagatgggcagcagcttggagcaggccaggcagggcctgggccattggaggggctggcactggacttgcctttgaccccagcagcttggatggggtgccgggctcccccatagttcactgactgtctcctttggtcttctcgcaggccctgctggccctgcctcttctggcctggtgtctcctcatgccccctcagtgaggatcttcatgtacctgctcttctgtttgcacacccagcatagcctccttgcaggcagaaggcagtagggcccctgcacactcagtttctctcgttttccttagttatcagtcctgtcctgtcccactcaggtctgtacttagggcagctggcctggatgggcttcactggggccctgtctgtgtgctgagccagtttcccctgctggctgcaagctgtgggttctttctcctctgtgcccctcatgctgatcttctagatgccactcccaaatccccttcatacccaccaggatgtgtgcccagccaggcctccagcacccccagtgcagctcgtgattggaaactcaccatcggcaggcagtggttcggtttaagagatggcattagagggagcccagtctggatgtggacttggatgccctgtgggtatcagttctgctgacactttggcccgaaatagatccagtgctgagcaagcaatgtacaccagagcctcagtgagcccatctgcacagtggggagcatggagggatgggtttggcctgtgcttctgcttattcagtccttcagctcacggaagggatgctagtccgtgaaggtgacctcacagtactggttaattaaactttattgctcactgtcca

SEQ ID NO: 31174 - DNA, 7200 bp, Homo sapiens
  source 1..7200: mol_type = unassigned DNA
gccccgcatcgtgcccggccccgtcgcggagatcccggacgaccgtcgcgggttgatggtcgcattccagatgtaaacagcttcagaagcctgacggtcatatggtagaatcactgtggactgagacccacctttctagacctgaagcccaggaggaggaagaggaggctggttggtaccatgggcataatgctctgaatcctagtctctcacctagtatgtgagcagtccctgcagatggcccatttggagatcttgacaaagcctcttctgtttccaatggggtttttggcgcattctcacagacttagatgaaactgtgatggccaccgcagggggcaggtgctgacatcgtccccagccctgtggctgttcatccggacatcatttccaacctcaatatctaaatgccacagtgctcttggagcaagttgggctggggaccactgttgccttttaagaccataaaaccatgggaaacgcagaaagtcaacatgtagagcacgagttttatggagaaaagcatgccagcctggggcgcaagcacacttcccgctccctgcgcctctcgcacaagacgcggaggaccaggcacgcttcctcggggaaggtgatccacaggaactccgaagtgagcacccgatccagcagcacccccagcatcccccagtccctggctgaaaatggcctggagcccttctcccaagatggtaccctagaagacttcgggagccccatctgggtggaccgagtggacatgggcttgagacctgtgtcttacactgactcttctgtcactcccagcgtagacagcagcatcgtcctcacagcagcctctgtgcagagcatgccagacactgaggagagcaggctttacggggatgacgctacatatttggctgagggaggcaggaggcagcattcctatacatccaatgggcccactttcatggagacggcgagctttaagaagaaacgctccaaatctgcagacatctggcgggaggacagcctggaattctcactctctgatctgagccaagaacatttaacaagcaacgaagaaatcttgggttccgccgaagagaaggactgcgaggaggctcgggggatggaaacgcgggcgagtccgcggcagctcagcacctgtcagagagccaattccttgggtgacttgtatgctcagaaaaactctggagtgacagcaaacggggggccggggagcaaatttgcaggctactgtcggaatttggtgtctgatattcccaatcttgcaaaccataagatgccaccagctgctgctgaagagactcctccgtacagtaattataacacacttccctgtaggaaatctcactgtctctctgaaggtgccaccaacccacaaattagccatagcaacagcatgcaaggcagaagagctaaaacaactcaggatgttaatgcaggcgagggcagtgagtttgcagacagtgggattgaaggggccactaccgacacggacctcctgtccaggcgatctaatgccaccaactccagctactcacccaccacaggccgggcctttgtgggcagcgacagcggcagcagctccaccggggatgcggctcgtcagggggtgtacgagaacttccggcgggagctggagatgagcaccaccaacagcgagagcctggaggaggccggctcggcgcacagcgatgagcagagcagcggcaccctgagctctccgggccagtcggacatcctgctgaccgccgcacagggcacggtgcgcaaggccggcgccctggccgtcaagaacttcctggtgcacaagaagaacaagaaggtggagtcagccacccggaggaagtggaagcactactgggtgtccctgaaaggatgcacgctatttttctacgagagcgacggcaggtctgggatagaccacaacagcatccccaaacacgccgtctgggtggagaacagcattgtgcaggcggtgcctgagcaccccaagaaggactttgtcttctgcctcagcaattccctgggtgatgccttcctttttcagaccactagccagacggagcttgaaaactggatcaccgccatccactctgcctgcgccactgcggtcgcgaggcaccaccacaaggaagacacgctccgactcctgaaatcagagatcaaaaaactggaacagaagattgacatggatgaaaagatgaagaaaatgggtgaaatgcagctgtcttcagtcactgactcaaagaaaaagaaaacaatattagatcagatctttgtctgggagcaaaatctcgagcagttccaaatggacctgtttcgtttccgctgttatttagccagccttcagggtggggagctgccaaaccccaaaaggcttctcgcttttgcaagtcgaccaacgaaagtggccatgggccgccttggaatcttttcggtatcatcgtttcatgccctggtggcagcacgcactggtgaaactggagtgagaagacgtactcaggccatgtccagatccgcgagcaagcgaaggagcaggttttcttctctgtggggtctggatactacctccaaaaagaagcagggacggccaagcatcaatcaggtgtttggagagggaaccgaagctgtaaagaaatctttagagggaatatttgatgacattgttccagatggcaagagggagaaagaagtggtcttacctaacgttcaccagcacaaccctgactgcgacatttgggtccacgagtatttcactccatcctggttctgtctgcccaataatcagcctgccctgacggtcgtccggccaggcgacactgcacgggacaccctggagctgatttgcaagacacatcaactggatcattctgctcattacctgcgcctgaaatttctaatagaaaacaaaatgcagctctatgttccacagcccgaggaagacatctatgagctgctgtacaaagaaattgaaatctgtccaaaagtcactcagagcatccacattgagaagtcagatacagctgctgatacttacgggttttcactttcttctgtggaagaagatggtattcgaaggctgtacgtgaatagtgtgaaggaaaccggtttagcttccaagaaaggcctgaaagcaggagatgagattcttgagatcaataatcgtgctgctgacgccctgaactcttctatgctcaaagatttcctctcacagccctcgctgggcctcctggtgaggacctaccccgagctggaggaaggagtggagctgctggaaagcccgccccaccgagtggacggccctgccgaccttggcgagagccccctcgcctttctcaccagcaacccagggcacagcctttgcagcgagcagggcagcagtgctgagaccgctccagaggagaccgaggggccagacttggaatcctcagatgagactgatcacagcagcaagagtacagaacaggtggccgcattttgccgcagtttgcatgagatgaacccctctgaccagagcccatctcctcaggactccacggggcctcagctggcgaccatgagacaactctcggatgcagataagctgcgcaaggtgatctgcgagctcctggagacggagcgcacctacgtgaaggatttaaactgtcttatggagagatacctaaagcctcttcaaaaagaaacttttctcacccaggatgagcttgacgtgctttttggaaatttaacggaaatggtagagtttcaagtagaattccttaaaactctagaagatggagtgagactggtacctgatttggaaaagcttgagaaggttgatcaatttaagaaagtgctgttctctctggggggatcattcctgtattatgctgaccgcttcaagctctacagtgccttctgcgccagccacacaaaagttcccaaggtcctggtgaaagccaagacagacacggctttcaaggcattcttggatgcccagaacccgaagcagcagcactcatccacgctggagtcgtacctcatcaagcccatccagaggatcctcaagtacccacttctgctcagggagctgttcgccctgaccgatgcggagagcgaggagcactaccacctggacgtggccatcaagaccatgaacaaggttgccagtcacatcaatgagatgcagaaaatccatgaagagtttggggctgtgtttgaccagctgattgctgaacagactggtgagaaaaaagaggttgcagatctgagcatgggagacctgcttttgcacactaccgtgatctggctgaacccgccggcctcgctgggcaagtggaaaaaggaaccagagttggcagcattcgtcttcaaaactgctgtggtccttgtgtataaagatggttccaaacagaagaagaaacttgtaggatctcacaggctttccatttatgaggactgggaccccttcagatttcgacacatgatccccacggaagcgctgcaggttcgagctttggcgagtgcagatgcagaggcaaatgccgtgtgtgaaattgtccatgtaaaatccgagtctgaagggaggccggagagggtctttcacttgtgctgcagctccccagagagccgaaaggatttcctaaaggctgtgcattcaatcctgcgtgataagcacagaagacagctcctcaaaaccgagagccttccctcatcccagcaatatgtcccttttggaggcaaaagattgtgtgcactgaagggggccaggccggccatgagcagggcagtgtctgccccaagcaagtctcttgggaggaggaggcggcggctggctcgaaacaggtttaccattgattctgatgccgtctccgcaagcagcccggagaaagagtcccagcagccccccggtggtggggacactgaccgatgggtagaggagcagtttgatcttgctcagtatgaggagcaagatgacatcaaggagacagacatcctcagtgacgatgatgagttctgtgagtccgtgaagggtgcctcagtggacagagacctgcaggagcggcttcaggccacctccatcagtcagcgggaaagaggccggaaaaccctggatagtcacgcgtcccgcatggcacagctcaagaagcaagctgccctgtcggggatcaatggaggcctggagagcgcaagcgaggaagtcatttgggttaggcgtgaagactttgccccctccaggaaactgaacactgagatctgactgcgtcacctgccccgtagagaatgtgtgtagatacttcctgccctaactctgcccaccctcctgtaccgtcgacaagaatgtccccttaggtcgcgctcttgcacacacggttttggcagctgacttggttctgaagccatgtagccacccaactttgtcattttcaacaacatcagaaagaattgatcagaatcccaaataagcttgagtcctatcttctgtatattactaagggcttttatttattctcaataaatcagggcctgaacaattaaaagaaaaaagattctatagcactggaaagcaaatcaccccaggagttaacggatgtacaacagattaatttaagggatagtagcacacacacgatccttctatctgaaatcagtctcctagctggggaaacctctttcacacacaaaatgaaatgtgtacagcttgccgtgttctgactgtacccttccctcttccatgtctgagaatctccgtgtattttaagaatgtgtgaggagagggtggcgattcatgtttcaatgagcctctttttttttttccttcctgttttggtctatggctggtcttactctgtgtccatgttcggaagctctagttttgcatagaattatagagatgccaaactctttgaaaagagatccaaatttatcgcttgagagaaagaaaagaaacactattttttgtattttacctgagatacaggggcacaaatagatgagaattttacagtgttagtgtatgtatccctgagcctaaaaaatgaggatataaccttttacagagagagtgaggcgtggtggttttatatttatatatgaaaggccagcaagctcatgcgaaggatatacttttcttccaaaaagcggattttttttttttaatgtttgaatctatatttgagatgggagtttggttggattaaacatgacaccccggtgggcggtgtgtgtgtctgttgcacatggcagggaggggagcctccttctcatggggttgccatggtgatcattggtttttccatcaaaattgcatcttcatccatagattaccttccccttccctgacagtccataaccaaacctttaaacagaacaacctctttaaaaacttctcttgtgtttaacactttcttcatgccaacgaaacagggtaaacatgctcaaaacattaacagtctaaacagatatccaaatactaagaagaaaaacaagttatagcactttcaattttttttttttttttaaaaaaaggtttatagctttttcttttcccatgtcacaatgtccacttcctaagaagggtttaaaatactatgaaaactttctttttggggaaaatatctatttggtgtttgacacatcagtaggtactttaaagacctgaattttatagtagctttaggagttatattttataaaaatcagttatgactttatatttccagacaatagagagttcagtacatcatgctcttgtgcctctgcctgcttttcctgcgttcccaccctgtattccccccgcctttcgggtttccagggcttcgagcttgatcttttgaaagttttattctattaaatttttgctatatcttctggttttctgaaaaagctttagaatggtttctataccctttgtatcactgcatttttccatatcatctccggttcgatcgcgtccagatggaaaacggaagcagaggcttctaatcgtcgcatttactggctccagtgcaacacatccatctgaaaacactcggaagtctggtgcttggagagggtgccattgtctcttgtacataaggtcatgacgtgtctatgtcaaaagttcttatatatttcttttataagctgaaagaaggtctatttttatgtttttaggtctatgaatggaacgttgtaaatgcttgtcaaacaataaaaataacgaaaagtgtc

SEQ ID NO: 31175 - DNA, 7193 bp, Homo sapiens
  source 1..7193: mol_type = unassigned DNA
gccccgcatcgtgcccggccccgtcgcggagatcccggacgaccgtcgcgggttgatggtcgcattccagatgtaaacagcttcagaagcctgacggtcatatggtagaatcactgtggactgagacccacctttctagacctgaagcccaggaggaggaagaggaggctggttggtaccatgggcataatgctctgaatcctagtctctcacctagtatgtgagcagtccctgcagatggcccatttggagatcttgacaaagcctcttctgtttccaatggggtttttggcgcattctcacagacttagatgaaactgtgatggccaccgcagggggcaggtgctgacatcgtccccagccctgtggctgttcatccggacatcatttccaacctcaatatctaaatgccacagtgctcttggagcaagttgggctggggaccactgttgccttttaagaccataaaaccatgggaaacgcagaaagtcaacatgtagagcacgagttttatggagaaaagcatgccagcctggggcgcaagcacacttcccgctccctgcgcctctcgcacaagacgcggaggaccaggcacgcttcctcggggaaggtgatccacaggaactccgaagtgagcacccgatccagcagcacccccagcatcccccagtccctggctgaaaatggcctggagcccttctcccaagatggtaccctagaagacttcgggagccccatctgggtggaccgagtggacatgggcttgagacctgtgtcttacactgactcttctgtcactcccagcgtagacagcagcatcgtcctcacagcagcctctgtgcagagcatgccagacactgaggagagcaggctttacggggatgacgctacatatttggctgagggaggcaggaggcagcattcctatacatccaatgggcccactttcatggagacggcgagctttaagaagaaacgctccaaatctgcagacatctggcgggaggacagcctggaattctcactctctgatctgagccaagaacatttaacaagcaacgaagaaatcttgggttccgccgaagagaaggactgcgaggaggctcgggggatggaaacgcgggcgagtccgcggcagctcagcacctgtcagagagccaattccttgggtgacttgtatgctcagaaaaactctggagtgacagcaaacggggggccggggagcaaatttgcaggctactgtcggaatttggtgtctgatattcccaatcttgcaaaccataagatgccaccagctgctgctgaagagactcctccgtacagtaattataacacacttccctgtaggaaatctcactgtctctctgaaggtgccaccaacccacaaattagccatagcaacagcatgcaaggcagaagagctaaaacaactcaggatgttaatgcaggcgagggcagtgagtttgcagacagtgggattgaaggggccactaccgacacggacctcctgtccaggcgatctaatgccaccaactccagctactcacccaccacaggccgggcctttgtgggcagcgacagcggcagcagctccaccggggatgcggctcgtcagggggtgtacgagaacttccggcgggagctggagatgagcaccaccaacagcgagagcctggaggaggccggctcggcgcacagcgatgagcagagcagcggcaccctgagctctccgggccagtcggacatcctgctgaccgccgcacagggcacggtgcgcaaggccggcgccctggccgtcaagaacttcctggtgcacaagaagaacaagaaggtggagtcagccacccggaggaagtggaagcactactgggtgtccctgaaaggatgcacgctatttttctacgagagcgacggcaggtctgggatagaccacaacagcatccccaaacacgccgtctgggtggagaacagcattgtgcaggcggtgcctgagcaccccaagaaggactttgtcttctgcctcagcaattccctgggtgatgccttcctttttcagaccactagccagacggagcttgaaaactggatcaccgccatccactctgcctgcgccactgcggtcgcgaggcaccaccacaaggaagacacgctccgactcctgaaatcagagatcaaaaaactggaacagaagattgacatggatgaaaagatgaagaaaatgggtgaaatgcagctgtcttcagtcactgactcaaagaaaaagaaaacaatattagatcagatctttgtctgggagcaaaatctcgagcagttccaaatggacctgtttcgtttccgctgttatttagccagccttcagggtggggagctgccaaaccccaaaaggcttctcgcttttgcaagtcgaccaacgaaagtggccatgggccgccttggaatcttttcggtatcatcgtttcatgccctggtggcagcacgcactggtgaaactggagtgagaagacgtactcaggccatgtccagatccgcgagcaagcgaaggagcaggttttcttctctgtggggtctggatactacctccaaaaagaagcagggacggccaagcatcaatcaggtgtttggagagggaaccgaagctgtaaagaaatctttagagggaatatttgatgacattgttccagatggcaagagggagaaagaagtggtcttacctaacgttcaccagcacaaccctgactgcgacatttgggtccacgagtatttcactccatcctggttctgtctgcccaataatcagcctgccctgacggtcgtccggccaggcgacactgcacgggacaccctggagctgatttgcaagacacatcaactggatcattctgctcattacctgcgcctgaaatttctaatagaaaacaaaatgcagctctatgttccacagcccgaggaagacatctatgagctgctgtacaaagaaattgaaatctgtccaaaagtcactcagagcatccacattgagaagtcagatacagctgctgatacttacgggttttcactttcttctgtggaagaagatggtattcgaaggctgtacgtgaatagtgtgaaggaaaccggtttagcttccaagaaaggcctgaaagcaggagatgagattcttgagatcaataatcgtgctgctgacgccctgaactcttctatgctcaaagatttcctctcacagccctcgctgggcctcctggtgaggacctaccccgagctggaggaaggagtggagctgctggaaagcccgccccaccgagtggacggccctgccgaccttggcgagagccccctcgcctttctcaccagcaacccagggcacagcctttgcagcgagcagggcagcagtgctgagaccgctccagaggagaccgaggggccagacttggaatcctcagatgagactgatcacagcagcaagagtacagaacaggtggccgcattttgccgcagtttgcatgagatgaacccctctgaccagagcccatctcctcaggactccacggggcctcagctggcgaccatgagacaactctcggatgcagataagctgcgcaaggtgatctgcgagctcctggagacggagcgcacctacgtgaaggatttaaactgtcttatggagagatacctaaagcctcttcaaaaagaaacttttctcacccaggatgagcttgacgtgctttttggaaatttaacggaaatggtagagtttcaagtagaattccttaaaactctagaagatggagtgagactggtacctgatttggaaaagcttgagaaggttgatcaatttaagaaagtgctgttctctctggggggatcattcctgtattatgctgaccgcttcaagctctacagtgccttctgcgcccacaaaagttcccaaggtcctggtgaaagccaagacagacacggctttcaaggcattcttggatgcccagaacccgaagcagcagcactcatccacgctggagtcgtacctcatcaagcccatccagaggatcctcaagtacccacttctgctcagggagctgttcgccctgaccgatgcggagagcgaggagcactaccacctggacgtggccatcaagaccatgaacaaggttgccagtcacatcaatgagatgcagaaaatccatgaagagtttggggctgtgtttgaccagctgattgctgaacagactggtgagaaaaaagaggttgcagatctgagcatgggagacctgcttttgcacactaccgtgatctggctgaacccgccggcctcgctgggcaagtggaaaaaggaaccagagttggcagcattcgtcttcaaaactgctgtggtccttgtgtataaagatggttccaaacagaagaagaaacttgtaggatctcacaggctttccatttatgaggactgggaccccttcagatttcgacacatgatccccacggaagcgctgcaggttcgagctttggcgagtgcagatgcagaggcaaatgccgtgtgtgaaattgtccatgtaaaatccgagtctgaagggaggccggagagggtctttcacttgtgctgcagctccccagagagccgaaaggatttcctaaaggctgtgcattcaatcctgcgtgataagcacagaagacagctcctcaaaaccgagagccttccctcatcccagcaatatgtcccttttggaggcaaaagattgtgtgcactgaagggggccaggccggccatgagcagggcagtgtctgccccaagcaagtctcttgggaggaggaggcggcggctggctcgaaacaggtttaccattgattctgatgccgtctccgcaagcagcccggagaaagagtcccagcagccccccggtggtggggacactgaccgatgggtagaggagcagtttgatcttgctcagtatgaggagcaagatgacatcaaggagacagacatcctcagtgacgatgatgagttctgtgagtccgtgaagggtgcctcagtggacagagacctgcaggagcggcttcaggccacctccatcagtcagcgggaaagaggccggaaaaccctggatagtcacgcgtcccgcatggcacagctcaagaagcaagctgccctgtcggggatcaatggaggcctggagagcgcaagcgaggaagtcatttgggttaggcgtgaagactttgccccctccaggaaactgaacactgagatctgactgcgtcacctgccccgtagagaatgtgtgtagatacttcctgccctaactctgcccaccctcctgtaccgtcgacaagaatgtccccttaggtcgcgctcttgcacacacggttttggcagctgacttggttctgaagccatgtagccacccaactttgtcattttcaacaacatcagaaagaattgatcagaatcccaaataagcttgagtcctatcttctgtatattactaagggcttttatttattctcaataaatcagggcctgaacaattaaaagaaaaaagattctatagcactggaaagcaaatcaccccaggagttaacggatgtacaacagattaatttaagggatagtagcacacacacgatccttctatctgaaatcagtctcctagctggggaaacctctttcacacacaaaatgaaatgtgtacagcttgccgtgttctgactgtacccttccctcttccatgtctgagaatctccgtgtattttaagaatgtgtgaggagagggtggcgattcatgtttcaatgagcctctttttttttttccttcctgttttggtctatggctggtcttactctgtgtccatgttcggaagctctagttttgcatagaattatagagatgccaaactctttgaaaagagatccaaatttatcgcttgagagaaagaaaagaaacactattttttgtattttacctgagatacaggggcacaaatagatgagaattttacagtgttagtgtatgtatccctgagcctaaaaaatgaggatataaccttttacagagagagtgaggcgtggtggttttatatttatatatgaaaggccagcaagctcatgcgaaggatatacttttcttccaaaaagcggattttttttttttaatgtttgaatctatatttgagatgggagtttggttggattaaacatgacaccccggtgggcggtgtgtgtgtctgttgcacatggcagggaggggagcctccttctcatggggttgccatggtgatcattggtttttccatcaaaattgcatcttcatccatagattaccttccccttccctgacagtccataaccaaacctttaaacagaacaacctctttaaaaacttctcttgtgtttaacactttcttcatgccaacgaaacagggtaaacatgctcaaaacattaacagtctaaacagatatccaaatactaagaagaaaaacaagttatagcactttcaattttttttttttttttaaaaaaaggtttatagctttttcttttcccatgtcacaatgtccacttcctaagaagggtttaaaatactatgaaaactttctttttggggaaaatatctatttggtgtttgacacatcagtaggtactttaaagacctgaattttatagtagctttaggagttatattttataaaaatcagttatgactttatatttccagacaatagagagttcagtacatcatgctcttgtgcctctgcctgcttttcctgcgttcccaccctgtattccccccgcctttcgggtttccagggcttcgagcttgatcttttgaaagttttattctattaaatttttgctatatcttctggttttctgaaaaagctttagaatggtttctataccctttgtatcactgcatttttccatatcatctccggttcgatcgcgtccagatggaaaacggaagcagaggcttctaatcgtcgcatttactggctccagtgcaacacatccatctgaaaacactcggaagtctggtgcttggagagggtgccattgtctcttgtacataaggtcatgacgtgtctatgtcaaaagttcttatatatttcttttataagctgaaagaaggtctatttttatgtttttaggtctatgaatggaacgttgtaaatgcttgtcaaacaataaaaataacgaaaagtg

SEQ ID NO: 31176 - DNA, 1187 bp, Homo sapiens
  source 1..1187: mol_type = unassigned DNA
atcatagcacgaaacttcacaagttacacccactgcctccgccagcagccggggaaggctgctgcttcctcatttctgttactggaagtttgggacatgtgaagccagacggggagaaacgtgcgcgccttgttgagcagcggtagaatcactgtggactgagacccacctttctagacctgaagcccaggaggaggaagaggaggctggttggtaccatgggcataatgctctgaatcctagtctctcacctagtatgtgagcagtccctgcagatggcccatttggagatcttgacaaagcctcttctgtttccaatggggtttttggcgcattctcacagacttagatgaaactgtgatggccaccgcagggggcaggtgctgacatcgtccccagccctgtggctgttcatccggacatcatttccaacctcaatatctaaatgccacagtgctcttggagcaagttgggctggggaccactgttgccttttaagaccataaaaccatgggaaacgcagaaagtcaacatgtagagcacgagttttatggagaaaagcatgccagcctggggcgcaagcacacttcccgctccctgcgcctctcgcacaagacgcggaggaccaggcacgcttcctcggggaaggtgatccacaggaactccgaagtgagcacccgatccagcagcacccccagcatcccccagtccctggctgaaaatggcctggagcccttctcccaagatggtaccctagaagacttcgggagccccatctgggtggaccgagtggacatgggcttgagacctgtgtcttacactgactcttctgtcactcccagcgtagacagcagcatcgtcctcacagcagcctctgtgcagagcatgccagacactgaggagagcaggctttacggggatgacgctacatatttggctgagggaggcaggaggcagcattcctatacatccaatgggcccactttcatggagacggcgagctttaagaagaaacgctccaaatctgcagacatctggcgggaggacagcctggaattctcactctctgatctgagccaagaacatttaacaagcaacgaagaaatcttgggttccgccgaagagaaggactgcgaggaggctcgggggatggaaacgcgggcgagtccgcggcagctcagcacctg

SEQ ID NO: 31177 - DNA, 4654 bp, Homo sapiens
  source 1..4654: mol_type = unassigned DNA
agcaagttgggctggggaccactgttgccttttaagaccataaaaccatgggaaacgcagaaagtcaacatgtagagcacgagttttatggagaaaagcatgccagcctggggcgcaagcacacttcccgctccctgcgcctctcgcacaagacgcggaggaccaggcacgcttcctcggggaaggtgatccacaggaactccgaagtgagcacccgatccagcagcacccccagcatcccccagtccctggctgaaaatggcctggagcccttctcccaagatggtaccctagaagacttcgggagccccatctgggtggaccgagtggacatgggcttgagacctgtgtcttacactgactcttctgtcactcccagcgtagacagcagcatcgtcctcacagcagcctctgtgcagagcatgccagacactgaggagagcaggctttacggggatgacgctacatatttggctgagggaggcaggaggcagcattcctatacatccaatgggcccactttcatggagacggcgagctttaagaagaaacgctccaaatctgcagacatctggcgggaggacagcctggaattctcactctctgatctgagccaagaacatttaacaagcaacgaagaaatcttgggttccgccgaagagaaggactgcgaggaggctcgggggatggaaacgcgggcgagtccgcggcagctcagcacctgtcagagagccaattccttgggtgacttgtatgctcagaaaaactctggagtgacagcaaacggggggccggggagcaaatttgcaggctactgtcggaatttggtgtctgatattcccaatcttgcaaaccataagatgccaccagctgctgctgaagagactcctccgtacagtaattataacacacttccctgtaggaaatctcactgtctctctgaaggtgccaccaacccacaaattagccatagcaacagcatgcaaggcagaagagctaaaacaactcaggatgttaatgcaggcgagggcagtgagtttgcagacagtgggattgaaggggccactaccgacacggacctcctgtccaggcgatctaatgccaccaactccagctactcacccaccacaggccgggcctttgtgggcagcgacagcggcagcagctccaccggggatgcggctcgtcagggggtgtacgagaacttccggcgggagctggagatgagcaccaccaacagcgagagcctggaggaggccggctcggcgcacagcgatgagcagagcagcggcaccctgagctctccgggccagtcggacatcctgctgaccgccgcacagggcacggtgcgcaaggccggcgccctggccgtcaagaacttcctggtgcacaagaagaacaagaaggtggagtcagccacccggaggaagtggaagcactactgggtgtccctgaaaggatgcacgctatttttctacgagagcgacggcaggtctgggatagaccacaacagcatccccaaacacgccgtctgggtggagaacagcattgtgcaggcggtgcctgagcaccccaagaaggactttgtcttctgcctcagcaattccctgggtgatgccttcctttttcagaccactagccagacggagcttgaaaactggatcaccgccatccactctgcctgcgccactgcggtcgcgaggcaccaccacaaggaagacacgctccgactcctgaaatcagagatcaaaaaactggaacagaagattgacatggatgaaaagatgaagaaaatgggtgaaatgcagctgtcttcagtcactgactcaaagaaaaagaaaacaatattagatcagatctttgtctgggagcaaaatctcgagcagttccaaatggacctgtttcgtttccgctgttatttagccagccttcagggtggggagctgccaaaccccaaaaggcttctcgcttttgcaagtcgaccaacgaaagtggccatgggccgccttggaatcttttcggtatcatcgtttcatgccctggtggcagcacgcactggtgaaactggagtgagaagacgtactcaggccatgtccagatccgcgagcaagcgaaggagcaggttttcttctctgtggggtctggatactacctccaaaaagaagcagggacggccaagcatcaatcagagggagaaagaagtggtcttacctaacgttcaccagcacaaccctgactgcgacatttgggtccacgagtatttcactccatcctggttctgtctgcccaataatcagcctgccctgacggtcgtccggccaggcgacactgcacgggacaccctggagctgatttgcaagctgtacaaagaaattgaaatctgtccaaaagtcactcagagcatccacattgagaagtcagatacagctgctgatacttacgggttttcactttcttctgtggaagaagatggtattcgaaggctgtacgtgaatagtgtgaaggaaaccggtttagcttccaagaaaggcctgaaagcaggagatgagattcttgagatcaataatcgtgctgctgacgccctgaactcttctatgctcaaagatttcctctcacagccctcgctgggcctcctggtgaggacctaccccgagctggaggaaggagtggagctgctggaaagcccgccccaccgagtggacggccctgccgaccttggcgagagccccctcgcctttctcaccagcaacccagggcacagcctttgcagcgagcagggcagcagtgctgagaccgctccagaggagaccgaggggccagacttggaatcctcagatgagactgatcacagcagcaagagtacagaacaggtggccgcattttgccgcagtttgcatgagatgaacccctctgaccagagcccatctcctcaggactccacggggcctcagctggcgaccatgagacaactctcggatgcagataagctgcgcaaggtgatctgcgagctcctggagacggagcgcacctacgtgaaggatttaaactgtcttatggagagatacctaaagcctcttcaaaaagaaacttttctcacccaggatgagcttgacgtgctttttggaaatttaacggaaatggtagagtttcaagtagaattccttaaaactctagaagatggagtgagactggtacctgatttggaaaagcttgagaaggttgatcaatttaagaaagtgctgttctctctggggggatcattcctgtattatgctgaccgcttcaagctctacagtgccttctgcgccagccacacaaaagttcccaaggtcctggtgaaagccaagacagacacggctttcaaggcattcttggatgcccagaacccgaagcagcagcactcatccacgctggagtcgtacctcatcaagcccatccagaggatcctcaagtacccacttctgctcagggagctgttcgccctgaccgatgcggagagcgaggagcactaccacctggacgtggccatcaagaccatgaacaaggttgccagtcacatcaatgagatgcagaaaatccatgaagagtttggggctgtgtttgaccagctgattgctgaacagactggtgagaaaaaagaggttgcagatctgagcatgggagacctgcttttgcacactaccgtgatctggctgaacccgccggcctcgctgggcaagtggaaaaaggaaccagagttggcagcattcgtcttcaaaactgctgtggtccttgtgtataaagatggttccaaacagaagaagaaacttgtaggatctcacaggctttccatttatgaggactgggaccccttcagatttcgacacatgatccccacggaagcgctgcaggttcgagctttggcgagtgcagatgcagaggcaaatgccgtgtgtgaaattgtccatgtaaaatccgagtctgaagggaggccggagagggtctttcacttgtgctgcagctccccagagagccgaaaggatttcctaaaggctgtgcattcaatcctgcgtgataagcacagaagacagctcctcaaaaccgagagccttccctcatcccagcaatatgtcccttttggaggcaaaagattgtgtgcactgaagggggccaggccggccatgagcagggcagtgtctgccccaagcaagtctcttgggaggaggaggcggcggctggctcgaaacaggtttaccattgattctgatgccgtctccgcaagcagcccggagaaagagtcccagcagccccccggtggtggggacactgaccgatgggtagaggagcagtttgatcttgctcagtatgaggagcaagatgacatcaaggagacagacatcctcagtgacgatgatgagttctgtgagtccgtgaagggtgcctcagtggacagagacctgcaggagcggcttcaggccacctccatcagtcagcgggaaagaggccggaaaaccctggatagtcacgcgtcccgcatggcacagctcaagaagcaagctgccctgtcggggatcaatggaggcctggagagcgcaagcgaggaagtcatttgggttaggcgtgaagactttgccccctccaggaaactgaacactgagatctgactgcgtcacct

SEQ ID NO: 31178 - DNA, 2677 bp, Homo sapiens
  source 1..2677: mol_type = unassigned DNA
gcggcgcctagtcccgggctggcgggagtgcagttctgagtcccgcccggcgtgcgcggagcggggcagccagcagcggaggcgcggcgcgcagcacacccggggaccatgggctccatgttccggagcgaggaggtggccctggtccagctctttctgcccacagcggctgcctacacctgcgtgagtcggctgggcgagctgggcctcgtggagttcagagacctcaacgcctcggtgagcgccttccagagacgctttgtggttgatgttcggcgctgtgaggagctggagaagaccttcaccttcctgcaggaggaggtgcggcgggctgggctggtcctgcccccgccaaaggggaggctgccggcacccccaccccgggacctgctgcgcatccaggaggagacggagcgcctggcccaggagctgcgggatgtgcggggcaaccagcaggccctgcgggcccagctgcaccagctgcagctccacgccgccgtgctacgccagggccatgaacctcagctggcagccgcccacacagatggggcctcagagaggacgcccctgctccaggcccccggggggccgcaccaggacctgagggtcaactttgtggcaggtgccgtggagccccacaaggcccctgccctagagcgcctgctctggagggcctgccgcggcttcctcattgccagcttcagggagctggagcagccgctggagcaccccgtgacgggcgagccagccacgtggatgaccttcctcatctcctactggggtgagcagatcggacagaagatccgcaagatcacggactgcttccactgccacgtcttcccgtttctgcagcaggaggaggcccgcctcggggccctgcagcagctgcaacagcagagccaggagctgcaggaggtcctcggggagacagagcggttcctgagccaggtgctaggccgggtgctgcagctgctgccgccagggcaggtgcaggtccacaagatgaaggccgtgtacctggccctgaaccagtgcagcgtgagcaccacgcacaagtgcctcattgccgaggcctggtgctctgtgcgagacctgcccgccctgcaggaggccctgcgggacagctcgatggaggagggagtgagtgccgtggctcaccgcatcccctgccgggacatgccccccacactcatccgcaccaaccgcttcacggccagcttccagggcatcgtggatgcctacggcgtgggccgctaccaggaggtcaaccccgctccctacaccatcatcaccttccccttcctgtttgctgtgatgttcggggatgtgggccacgggctgctcatgttcctgttcgccctggccatggtccttgcggagaaccgaccggctgtgaaggccgcgcagaacgagatctggcagactttcttcaggggccgctacctgctcctgcttatgggcctgttctccatctacaccggcttcatctacaacgagtgcttcagtcgcgccaccagcatcttcccctcgggctggagtgtggccgccatggccaaccagtctggctggagtgatgcattcctggcccagcacacgatgcttaccctggatcccaacgtcaccggtgtcttcctgggaccctacccctttggcatcgatcctatttggagcctggctgccaaccacttgagcttcctcaactccttcaagatgaagatgtccgtcatcctgggcgtcgtgcacatggcctttggggtggtcctcggagtcttcaaccacgtgcactttggccagaggcaccggctgctgctggagacgctgccggagctcaccttcctgctgggactcttcggttacctcgtgttcctagtcatctacaagtggctgtgtgtctgggctgccagggccgcctcggcccccagcatcctcatccacttcatcaacatgttcctcttctcccacagccccagcaacaggctgctctacccccggcaggaggtggtccaggccacgctggtggtcctggccttggccatggtgcccatcctgctgcttggcacacccctgcacctgctgcaccgccaccgccgccgcctgcggaggaggcccgctgaccgacaggaggaaaacaaggccgggttgctggacctgcctgacgcatctgtgaatggctggagctccgatgaggaaaaggcagggggcctggatgatgaagaggaggccgagctcgtcccctccgaggtgctcatgcaccaggccatccacaccatcgagttctgcctgggctgcgtctccaacaccgcctcctacctgcgcctgtgggccctgagcctggcccacgcccagctgtccgaggttctgtgggccatggtgatgcgcataggcctgggcctgggccgggaggtgggcgtggcggctgtggtgctggtccccatctttgccgcctttgccgtgatgaccgtggctatcctgctggtgatggagggactctcagccttcctgcacgccctgcggctgcactgggtggaattccagaacaagttctactcaggcacgggctacaagctgagtcccttcaccttcgctgccacagatgactagggcccactgcaggtcctgccagacctccttcctgacctctgaggcaggagaggaataaagacggtccgccctggca

SEQ ID NO: 31179 - DNA, 842 bp, Homo sapiens
  source 1..842: mol_type = unassigned DNA
gcagcacacccggggttgttcccccaccccctgggaagtgctggaaggagcccggccctcgagccctcggcatagtggctgtgggagccctgatggccctgagccaggggtgacccctccccagatccccagagctgattccccacacctccttatttggccagcacagccccaaagggagccaggaccatgggctccatgttccggagcgaggaggtggccctggtccagctctttctgcccacagcggctgcctacacctgcgtgagtcggctgggcgagctgggcctcgtggagttcagagacctcaacgcctcggtgagcgccttccagagacgctttgtggttgatgttcggcgctgtgaggagctggagaagaccttcaccttcctgcaggaggaggtgcggcgggctgggctggtcctgcccccgccaaaggggaggctgccggcacccccaccccgggacctgctgcgcatccaggaggagacggagcgcctggcccaggagctgcgggatgtgcggggcaaccagcaggccctgcgggcccagctgcaccagctgcagctccacgccgccgtgctacgccagggccatgaacctcagctggcagccgcccacacagatggggcctcagagaggacgcccctgctccaggcccccggggggccgcaccaggacctgagggtcaactttgtggcaggtgccgtggagccccacaaggcccctgccctagagcgcctgctctggagggcctgccgcggcttcctcattgccagcttcagggagctggagcagccgctggagcaccccgtgacgggcgagccagccacgtggatgac

SEQ ID NO: 31180 - DNA, 220 bp, Homo sapiens
  source 1..220: mol_type = unassigned DNA
gatgatgaagaggaggccgagctcgtcccctccgaggtgctcatgcaccaggccatccacaccatcgagttctgcctgggctgcgtctccaacaccgcctcctacctgcgcctgtgggccctgagcctggcccacgcccggtggaattccagaacaagttctactcaggcacgggctacaagctgagtcccttcaccttcgctgccacagatgactaggg

SEQ ID NO: 31181 - DNA, 2457 bp, Homo sapiens
  source 1..2457: mol_type = unassigned DNA
ggacgcccctgctccaggcccccggggggccgcaccaggacctgagggtcaagtgagtgagggatgacctcatgccctttctggccagcccagaacccctggccagtcgctgggctgggccaggctgagctccgactccttgtccagtgctctccccaggctggccccgcctcctccttcaggcccggaacttcccacagtcccaagccctagccctagggggttctcctcttctggtcctgcccgggaggcctcctgccttcccctgtgggcagggccagtgtgcccaattgcccgattgcccgtgctgggcagggtcctgcccggggggcctggtgggggaggcagggcaggaggttggagcagccctgcccagccccgtggccgccagctttgtggcaggtgccgtggagccccacaaggcccctgccctagagcgcctgctctggagggcctgccgcggcttcctcattgccagcttcagggagctggagcagccgctggagcaccccgtgacgggcgagccagccacgtggatgaccttcctcatctcctactggggtgagcagatcggacagaagatccgcaagatcacggactgcttccactgccacgtcttcccgtttctgcagcaggaggaggcccgcctcggggccctgcagcagctgcaacagcagagccaggagctgcaggaggtcctcggggagacagagcggttcctgagccaggtgctaggccgggtgctgcagctgctgccgccagggcaggtgcaggtccacaagatgaaggccgtgtacctggccctgaaccagtgcagcgtgagcaccacgcacaagtgcctcattgccgaggcctggtgctctgtgcgagacctgcccgccctgcaggaggccctgcgggacagctcgatggaggagggagtgagtgccgtggctcaccgcatcccctgccgggacatgccccccacactcatccgcaccaaccgcttcacggccagcttccagggcatcgtggatgcctacggcgtgggccgctaccaggaggtcaaccccgctccctacaccatcatcaccttccccttcctgtttgctgtgatgttcggggatgtgggccacgggctgctcatgttcctgttcgccctggccatggtccttgcggagaaccgaccggctgtgaaggccgcgcagaacgagatctggcagactttcttcaggggccgctacctgctcctgcttatgggcctgttctccatctacaccggcttcatctacaacgagtgcttcagtcgcgccaccagcatcttcccctcgggctggagtgtggccgccatggccaaccagtctggctggagtgatgcattcctggcccagcacacgatgcttaccctggatcccaacgtcaccggtgtcttcctgggaccctacccctttggcatcgatcctatttggagcctggctgccaaccacttgagcttcctcaactccttcaagatgaagatgtccgtcatcctgggcgtcgtgcacatggcctttggggtggtcctcggagtcttcaaccacgtgcactttggccagaggcaccggctgctgctggagacgctgccggagctcaccttcctgctgggactcttcggttacctcgtgttcctagtcatctacaagtggctgtgtgtctgggctgccagggccgcctcggcccccagcatcctcatccacttcatcaacatgttcctcttctcccacagccccagcaacaggctgctctacccccggcaggaggtggtccaggccacgctggtggtcctggccttggccatggtgcccatcctgctgcttggcacacccctgcacctgctgcaccgccaccgccgccgcctgcggaggaggcccgctgaccgacaggaggaaaacaaggccgggttgctggacctgcctgacgcatctgtgaatggctggagctccgatgaggaaaaggcagggggcctggatgatgaagaggaggccgagctcgtcccctccgaggtgctcatgcaccaggccatccacaccatcgagttctgcctgggctgcgtctccaacaccgcctcctacctgcgcctgtgggccctgagcctggcccacgcccagctgtccgaggttctgtgggccatggtgatgcgcataggcctgggcctgggccgggaggtgggcgtggcggctgtggtgctggtccccatctttgccgcctttgccgtgatgaccgtggctatcctgctggtgatggagggactctcagccttcctgcacgccctgcggctgcactgggtggaattccagaacaagttctactcaggcacgggctacaagctgagtcccttcaccttcgctgccacagatgactagggcccactgcaggtcctgccagacctccttcctgacctctgaggcaggagaggaataaagacggtccgccctggca

SEQ ID NO: 31182 - DNA, 1477 bp, Homo sapiens
  source 1..1477: mol_type = unassigned DNA
cctggtgctctgtgcgagacctgcccgccctgcaggaggccctgcgggacagctcgatggaggagggagtgagtgccgtggctcaccgcatcccctgccgggacatgccccccacactcatccgcaccaaccgcttcacggccagcttccagggcatcgtggatgcctacggcgtgggccgctaccaggaggtcaaccccgctccctacaccatcatcaccttccccttcctgtttgctgtgatgttcggggatgtgggccacgggctgctcatgttcctgttcgccctggccatggtccttgcggagaaccgaccggctgtgaaggccgcgcagaacgagatctggcagactttcttcaggggccgctacctgctcctgcttatgggcctgttctccatctacaccggcttcatctacaacgagtgcttcagtcgcgccaccagcatcttcccctcgggctggagtgtggccgccatggccaaccagtctggctggaggtgaggcccgggccccagcccggctgggggccccgcagcacccgcagccctgaccgccctcccctgcgttgccgcagtgatgcattcctggcccagcacacgatgcttaccctggatcccaacgtcaccggtgtcttcctgggaccctacccctttggcatcgatcctatttggagcctggctgccaaccacttgagcttcctcaactccttcaagatgaagatgtccgtcatcctgggcgtcgtgcacatggcctttggggtggtcctcggagtcttcaaccacgtgcactttggccagaggcaccggctgctgctggagacgctgccggagctcaccttcctgctgggactcttcggttacctcgtgttcctagtcatctacaagtggctgtgtgtctgggctgccagggccgcctcggcccccagcatcctcatccacttcatcaacatgttcctcttctcccacagccccagcaacaggctgctctacccccggcaggaggtggtccaggccacgctggtggtcctggccttggccatggtgcccatcctgctgcttggcacacccctgcacctgctgcaccgccaccgccgccgcctgcggaggaggcccgctgaccgacaggaggaaaacaaggccgggttgctggacctgcctgacgcatctgtgaatggctggagctccgatgaggaaaaggcagggggcctggatgatgaagaggaggccgagctcgtcccctccgaggtgctcatgcaccaggccatccacaccatcgagttctgcctgggctgcgtctccaacaccgcctcctacctgcgcctgtgggccctgagcctggcccacgcccggtggaattccagaacaagttctactcaggcacgggctacaagctgagtcccttcaccttcgctgccacagatgactagggcccactgcaggtcctgccagacctccttcctgacctctgaggcagga

SEQ ID NO: 31183 - DNA, 2499 bp, Homo sapiens
  source 1..2499: mol_type = unassigned DNA
aaaaatgccgaccccgccccttccccggagcctcacttccgtcacagtcctgtttctctccctgttgtccctgcctctttttccttcccgccgtgccccgcggccgggccggggcagccgggaagcgggtggggtggtgtgttacccagtagctcctgggacatcgctcgggtacgctccacgccgtcgcagccactgctgtggtcgccggtcggccgaggggccgcgatactggttgcccgcggtgtaagcagaattcgacgtgtatcgctgccgtcaagatggaggggcctttgtccgtgttcggtgaccgcagcactggggaaacgatccgctcccaaaacgttatggctgcagcttcgattgccaatattgtaaaaagttctcttggtccagttggcttggataaaatgttggtggatgatattggtgatgtaaccattactaacgatggtgcaaccatcctgaagttactggaggtagaacatcctgcagctaaagttctttgtgagctggctgatctgcaagacaaagaagttggagatggaactacttcagtggttattattgcagcagaactcctaaaaaatgcagatgaattagtcaaacagaaaattcatcccacatcagttattagtggctatcgacttgcttgcaaggaagcagtgcgttatatcaatgaaaacctaattgttaacacagatgaactgggaagagattgcctgattaatgctgctaagacatccatgtcttccaaaatcattggaataaatggtgatttctttgctaacatggtagtagatgctgtacttgctattaaatacacagacataagaggccagccacgctatccagtcaactctgttaatattttgaaagcccatgggagaagtcaaatggagagtatgctcatcagtggctatgcactcaactgtgtggtgggatcccagggcatgcccaagagaatcgtaaatgcaaaaattgcttgccttgacttcagcctgcaaaaaacaaaaatgaagcttggtgtacaggtggtcattacagaccctgaaaaactggaccaaattagacagagagaatcagatatcaccaaggagagaattcagaagatcctggcaactggtgccaatgttattctaaccactggtggaattgatgatatgtgtctgaagtattttgtggaggctggtgctatggcagttagaagagttttaaaaagggaccttaaacgcattgccaaagcttctggagcaactattctgtcaaccctggccaatttggaaggtgaagaaacttttgaagctgcaatgttgggacaggcagaagaagtggtacaggagagaatttgtgatgatgagctgatcttaatcaaaaatactaaggctcgtacgtctgcatcgattatcttacgtggggcaaatgatttcatgtgtgatgagatggagcgctctttacatgatgcactttgtgtagtgaagagagttttggagtcaaaatctgtggttcccggtgggggtgctgtagaagcagccctttccatataccttgaaaactatgcaaccagcatggggtctcgggaacagcttgcgattgcagagtttgcaagatcacttcttgttattcccaatacactagcagttaatgctgcccaggactccacagatctggttgcaaaattaagagcttttcataatgaggcccaggttaacccagaacgtaaaaatctaaaatggattggtcttgatttgagcaatggtaaacctcgagacaacaaacaagcaggggtgtttgaaccaaccatagttaaagttaagagtttgaaatttgcaacagaagctgcaatcaccattcttcgaattgatgatcttattaaattacatccagaaagtaaagatgataaacatggaagttatgaagatgctgttcactctggagcccttaatgattgatctgatgttccttttatttataacaatgttaaatgcaattgtcttgtaccttgagttgagtattacacattaaagtaaagtacaagctgtaaacttgggtttttgtgatgtaggaaatggtttccatctgtactttggtcctctgatttcacatattgcaacctagtactttattagtttaaaaagaaattgaggttgttcaaagtttaagcaattcattctctctgaacacacattgctattcccatcccacccccaatgcacagggctgcaacaccacgacttctgcccattctctccagtgtgtgtaacagggtcacaagaattcgacagccagatgctccaagagggtggcccaaggctatagcccctccttcaatattgacctaacgggggagaaaagatttagattgtttattcttctgtggacacagtttaaaatcttaaacttgtctttttcctcttaatgtatcagcatgctaccctttcaaactcaaattttcattttaactgcttaggaataaatttacacctttgtgaaaattca

SEQ ID NO: 31184 - DNA, 1878 bp, Homo sapiens
  source 1..1878: mol_type = unassigned DNA
gtcctgtttctctccctgttgtccctgcctctttttccttcccgccgtgccccgcggccgggccggggcagccgggaagcgggtggggtggtgtgttacccagtagctcctgggacatcgctcgggtacgctccacgccgtcgcagccactgctgtggtcgccggtcggccgaggggccgcgatactggttgcccgcggtgtaagcagaattcgacgtgtatcgctgccgtcaagatggaggggcctttgtccgtgttcggtgaccgcagcactggggaaacgatccgctcccaaaacggatgtaaccattactaacgatggtgcaaccatcctgaagttactggaggtagaacatcctgcagctaaagttctttgtgagctggctgatctgcaagacaaagaagttggagatggaactacttcagtggttattattgcagcagaactcctaaaaaatgcagatgaattagtcaaacagaaaattcatcccacatcagttattagtggctatcgacttgcttgcaaggaagcagtgcgttatatcaatgaaaacctaattgttaacacagatgaactgggaagagattgcctgattaatgctgctaagacatccatgtcttccaaaatcattggaataaatggtgatttctttgctaacatggtagtagatgctgtacttgctattaaatacacagacataagaggccagccacgctatccagtcaactctgttaatattttgaaagcccatgggagaagtcaaatggagagtatgctcatcagtggctatgcactcaactgtgtggtgggatcccagggcatgcccaagagaatcgtaaatgcaaaaattgcttgccttgacttcagcctgcaaaaaacaaaaatgaagcttggtgtacaggtggtcattacagaccctgaaaaactggaccaaattagacagagagaatcagatatcaccaaggagagaattcagaagatcctggcaactggtgccaatgttattctaaccactggtggaattgatgatatgtgtctgaagtattttgtggaggctggtgctatggcagttagaagagttttaaaaagggaccttaaacgcattgccaaagcttctggagcaactattctgtcaaccctggccaatttggaaggtgaagaaacttttgaagctgcaatgttgggacaggcagaagaagtggtacaggagagaatttgtgatgatgagctgatcttaatcaaaaatactaaggctcgtacgtctgcatcgattatcttacgtggggcaaatgatttcatgtgtgatgagatggagcgctctttacatgatgcactttgtgtagtgaagagagttttggagtcaaaatctgtggttcccggtgggggtgctgtagaagcagccctttccatataccttgaaaactatgcaaccagcatggggtctcgggaacagcttgcgattgcagagtttgcaagatcacttcttgttattcccaatacactagcagttaatgctgcccaggactccacagatctggttgcaaaattaagagcttttcataatgaggcccaggttaacccagaacgtaaaaatctaaaatggattggtcttgatttgagcaatggtaaacctcgagacaacaaacaagcaggggtgtttgaaccaaccatagttaaagttaagagtttgaaatttgcaacagaagctgcaatcaccattcttcgaattgatgatcttattaaattacatccagaaagtaaagatgataaacatggaagttatgaagatgctgttcactctggagcccttaatgattgatctgatgttccttttatttataacaatgttaaatgcaattgtcttgtaccttgagttg

SEQ ID NO: 31185 - DNA, 1671 bp, Homo sapiens
  source 1..1671: mol_type = unassigned DNA
tccacgccgtcgcagccactgctgtggtcgccggtcggccgaggggccgcgatactggttgcccgcggtgtaagcagaattcgacgtgtatcgctgccgtcaagatggaggggcctttgtccgtgttcggtgaccgcagcactggggaaacgatccgctcccaaaacgttatggctgcagcttcgattgccaatattgtaaaaagttctcttggtccagttggcttggataaaatgttggtggatgatattggtgatgtaaccattactaacgatggtgcaaccatcctgaagttactggaggtagaacatcctgcagctaaagttctttgtgagctggctgatctgcaagacaaagaagttggagatggaactacttcagtggttattattgcagcagaactcctaaaaaatgcagatgaattagtcaaacagaaaattcatcccacatcagttattagtggctatcgacttgcttgcaaggaagcagtgcgttatatcaatgaaaacctaattgttaacacagatgaactgggaagagattgcctgattaatgctgctaagacatccatgtcttccaaaatcattggaataaatggtgatttctttgctaacatggtagtagatgctgtacttgctattaaatacacagacataagaggccagccacgctatccagtcaactctgttaatattttgaaagcccatgggagaagtcaaatggagagtatgctcatcagtggctatgcactcaactgtgtggtgggatcccagggcatgcccaagagaatcgtaaatgcaaaaattgcttgccttgacttcagcctgcaaaaaacaaaaatgaagcttggtgtacaggtggtcattacagaccctgaaaaactggaccaaattagacagagagaatcagatatcaccaaggagagaattcagaagatcctggcaactggtgccaatgttattctaaccactggtggaattgatgatatgtgtctgaagtattttgtggaggctggtgctatggcagttagaagagttttaaaaagggaccttaaacgcattgccaaagcttctggagcaactattctgtcaaccctggccaatttggaaggtgaagaaacttttgaagctgcaatgttgggacaggcagaagaagtggtacaggagagaatttgtgatgatgagctgatcttaatcaaaaatactaaggctcgtacgtctgcatcgattatcttacgtggggcaaatgatttcatgtgtgatgagatggagcgctctttacatgatgcactttgtgtagtgaagagagttttggagtcaaaatctgtggttcccggtgggggtgctgtagaagcagccctttccatataccttgaaaactatgcaaccagcatggattggtcttgatttgagcaatggtaaacctcgagacaacaaacaagcaggggtgtttgaaccaaccatagttaaagttaagagtttgaaatttgcaacagaagctgcaatcaccattcttcgaattgatgatcttattaaattacatccagaaagtaaagatgataaacatggaagttatgaagatgctgttcactctggagcccttaatgattgatctgatgttccttttatttataacaatgttaaatgcaattgtcttgtaccttgagttgag

SEQ ID NO: 31186 - DNA, 984 bp, Homo sapiens
  source 1..984: mol_type = unassigned DNA
ggaactgtccgctgctctctggtctctggatatgaggcaggagggcttggggacaactgtggggacatggcccagatgatctgatcctggcagtagtgactgttggggaccaggatgctggcaggtcaactcgaggccagggaccccaaagagggcacccacccagaggacccgtgcccaggagctggggctgtcatggagaagacagctgtggcagccgaggttctcacggaggactgcaacactggggagatgccaccattacagcagcagatcatcagactccaccaagagcttgggagacagaagtctctgtgggctgatgttcatggaaaactccggagtcatatagatgctttgagggagcagaacatggagctccgagaaaagctgagagctctgcagctgcagcggtggaaagccaggaagaaatctgcagcgtccccacacgcggggcaagaatcgcacactctggcattggaacctgcttttggaaaaatttcacctctgtcagctgatgaagagacaatacccaaatacgctggccacaagaatcagagtgccactctcctgggacaaagatcgtcatctaacaattcagctcctccaaagccaatgagtttaaagatagaaagaattagctcgtggaaaacaccaccacaggaaaatagagataaaaatctttccaggagacgtcaagacagaagagcaacacctactggaaggccaactccctgtgcagagagacgggggggtgtctgaagatggaaaggtggcctcggacacctgtgtcactctacactggccccttggaaaattcagattcagataaagttccacttaggtctaataaaagtactcaatttgttattcaaaatagacctagtaatttattaaactaattatgtttctatagataaaaacttgaagttcttcagacatgtctctaatgctataaaagcaaacaacttggattgggtttta

SEQ ID NO: 31187 - DNA, 2141 bp, Homo sapiens
  source 1..2141: mol_type = unassigned DNA
ggagatgaggcgggaggacttggggacagctgtggggacacggcccagatgctctggtcccagcagaagtgactggcggggaccaggatgctggagggtcagctcgaggccgggtagcccaaggagggcacccacccagaagacccgtgcccgggagctggggctgccatggagaagacacctgcagcagccgaggtccccagggaggacagcaatgccggggagatgccgtcattacagcagcagatcaccagcctccaccaagagctcgggagacagcagtcgctgtgggctgatattcacagaaaactccagagtcatatggatgccttgaggaagcagaaccgggagctccgagaagagctgagaggcctgcagcggcagcagtgggaagccgggaagaaacccgcagcgtccccacacgcggggcgagaatcacacactctggcattggaacctgcttttggaaaaatttcacatctgtcagctgatgaagacacaacgcccaaatacgctggccgcaagagtcagagtgccactctcctgggacaaagatggtcatctaaccacttagctcctccaaagccaatgagtttaaagacagaaagaattaactcggggaaaacaccaccacaggaagatagagagaaaagtcctcccgggagacgtcaagacagaagtccagcacccactggaaggccgactcccggtgcagaaagacggggggtgtctgaagacggaaagattatgcatccatcttcccgaagtccgcaaaactccggtggcagaaaatcaccagtgcaggcttcccaggccaccacgctgcaggagcagacggcagcagccagaggagctgacagaagctcatcagtcttagggagttctgaaggcggatttctcagccgcgttcaagctgacgagttcgccagttctgccccagacagtgcagagcggcagaatcttcctgtaaacccaccatcttccctggaaatagcacaggccatggacactaagatgaaaaaggaggaagtacaggaagaaaaacgacatccaaagggcaaggcagatgactgccggcggtccggtttcccgagtgaatttccaggagctctgcacgccgctccctccagacaggacatggggccctgacctggaggccaggcgtttctagcattgttgactgccagtttattcccagtaaataaagcaatacgcttttcaggaggaagatttgttttaaatacttaaaaaaaaacccaaaactatagcctcaaatatcttccagccaccacattttagcccttgaggagagctcagttccggaaggacgcgtcaaggtggcggtggtcggcattgactcaggaaggggtgggaagaggcacctgctgcggctgcggctgcggctacagtgttttgtgagctccgaggagacccagtcctgcctggggcagcacatcatcgctgcttcttcagctcaacagttcgttcatctcacgcctcttgctggcctgttagaaactgggagtcggcctcaggctagctttgctgagggaactctgcctcagtaaaagcgaattcatgtcttgcaagcgggtaaagcatttggataaatgaacaacagggaatgctacttgcagtaacagtttgaattcactgaaatgcttttgtctttagcgcagtggttgtagtggtttgtcaggggagaaggaaacccacatcatttgagcacctgaccttgccatccccgtaggcaggtccatgagacataagtgatgctcctccttggctaagtgcatggaggaaccaatcgctgaagctcatgaaaccacgaagatgaggacacaagaactaggtaacgcgctgtgccctctgctagcgcgatccttcctttctccccacaaccagcggtcacccacctctgcctgcccctatgtctctggctcccccaccctccctcccaggtcttcagcactttcctcttctcgtgactcatcttgcatctacttcttgtgtatcttgcattggatatgccaaagttctttccttttttgtgttttctttcttttaataatataaactccaaaatagattgtttgattcttttcatgtggaacatttaaaatattatttgtgctttatta

SEQ ID NO: 31188 - DNA, 2023 bp, Homo sapiens
  source 1..2023: mol_type = unassigned DNA
agcctgccgcttccggctctggcggggggggcacgtgccccgtcccgttgccccggcgaccgcggcggtttgttctcaggccccggcctttctcaccgtgcgacgccccaacccgccgctccgccgcggtggtacgctccaggccgccaggccgcgaggcccaccgagcggacgccagtggatgacccgcggcgggggaggaggagataccatcagcaaaatgccagacgtcaaggagagtgtgcccccgaaatatcctggcgactcagagggcaggtcctgtaagcccgaaacctcaggacccccccaggaagacaagagcggctccgaggacccccctccctagaacgtaactagtcatcaaactgaggagctgtccgtgtgcaacaactcaagataaaattcttgactattgaaatgcgaaaaattagattgaggctttgcggctgaattagattggtttttcttgtggccacatgaggtcgctgctggttaactgaatggcaccaaaaggcatattggggtcatttccaacagctatgaacctgagtctggaaggcaaggtcaaggagacagtgcacaatgccttttgggaccatcttaaagagcaactatcagcaactccccctgacttcagctgtgctcttgaacttctgaaagaaattaaagagatcttgctatcactgctattaccacgccagaaccgcctgagaattgagattgaagaagctctggacatggacttgctcaagcaggaggcagaacatggggccctgaaagtcctctatctctctaagtacgttctcaacatgatggctttgctgtgtgcaccagttcgagatgaagcagtgcagaaactagaaaacattacggatcctgtttggctactgagagggatcttccaggttctgggccggatgaaaatggacatggtgaactacactatccagagccttcaaccccacctgcaggaacattccattcagtatgaacgggctaaattccaggaactcctcaataagcagcctagtctccttaatcacaccaccaaatggctgacccaagcagcaggagacctcaccatgtcacctccgacttgcccagacacttctgactcctccagtgtggctggcccctctcccaatgaggcagccaacaacccagagcccctcagccccacaatggtgctgtgtcagggcttcttgaacctccttctctgggaccttgaaaatgaagagttccctgagaccctgctgatggacagaacccggctgcaggagctgaagtcccagttgcaccagttaaccgtcatggcctcagtcttgctggtggccagtagtttctccggcagtgttttgtttggctcaccccaatttgtagataaactgaaacgcataaccaaatccttgttggaagactttcactccaggcctgaggaagctatactgactgtgagtgaacaggtatctcaggaaatccatcaaagcctcaagaatatgggccttgttgctctaagcagtgataatacagcatctctaatgggacagctccagaacattgccaagaaggagaactgtgtctgcagtgttattgatcagcggatccatttgtttctcaaatgctgtttggttcttggtgtgcagcggtctctattagaccttcctggaggccttactctcattgaagcagaactggcagaactgggccaaaagtttgtcaacttgacacatcacaatcagcaggtgtttggtccctactacactgagatcctaaaaaccctcatttccccagcccaggcactggaaacaaaagtggagtctgtttgatagcgtcggctcagagccctggtaccttggacccaagaggaggcccatcatcttcctggagtaacatcaccagtgaccagcagacagtgagcttctatcccaggccctgcagccagtacaccaaggctgtagggatcaagcatgtaaacaccaactggtccatacccattcattaataaacttcttaagtgcaagaa

SEQ ID NO: 31189 - DNA, 2166 bp, Homo sapiens
  source 1..2166: mol_type = unassigned DNA
atgtgaggaaagagcgcggcccctgcgcccctgcggcacacgctgtgaaacaaccctcctgggtgtggctcggcttctcggctgtccaaacagcctgaagaaaagccccatgcatgctctggcctcgtctcagcagttccaggccatccttctcgaggggcgggagctgaccggcatgaaccggccgcagcgagccgctcgaggcctggttggcttcgagctcaggagggacgcacgagcctgccgcttccggctctggcggggggggcacgtgccccgtcccgttgccccggcgaccgcggcggtttgttctcaggccccggcctttctcaccgtgcgacgccccaacccgccgctccgccgcggtggtacgctccaggccgccaggccgcgaggcccaccgagcggacgccagtggatgacccgcggcgggggaggaggagataccatcagcaaaatgccagacgtcaaggagagtgtgcccccgaaatatcctggcgactcagagggcaggtcctgtaagcccgaaacctcaggacccccccaggaagacaagagcggctccgaggacccccctccctttctttctgtcacaggtctgacagaaaccgttaatgaagtttccaagctgagcaacaagattgggatgaattgtgattactacatggaagagaaggttttacctccaagcagtctggaaggcaaggtcaaggagacagtgcacaatgccttttgggaccatcttaaagagcaactatcagcaactccccctgacttcagctgtgctcttgaacttctgaaagaaattaaagagatcttgctatcactgctattaccacgccagaaccgcctgagaattgagattgaagaagctctggacatggacttgctcaagcaggaggcagaacatggggccctgaaagtcctctatctctctaagtacgttctcaacatgatggctttgctgtgtgcaccagttcgagatgaagcagtgcagaaactagaaaacattacggatcctgtttggctactgagagggatcttccaggttctgggccggatgaaaatggacatggtgaactacactatccagagccttcaaccccacctgcaggaacattccattcagtatgaacgggctaaattccaggaactcctcaataagcagcctagtctccttaatcacaccaccaaatggctgacccaagcagcaggagacctcaccatgtcacctccgacttgcccagacacttctgactcctccagtgtggctggcccctctcccaatgaggcagccaacaacccagagcccctcagccccacaatggtgctgtgtcagggcttcttgaacctccttctctgggaccttgaaaatgaagagttccctgagaccctgctgatggacagaacccggctgcaggagctgaagtcccagttgcaccagttaaccgtcatggcctcagtcttgctggtggccagtagtttctccggcagtgttttgtttggctcaccccaatttgtagataaactgaaacgcataaccaaatccttgttggaagactttcactccaggcctgaggaagctatactgactgtgagtgaacaggtatctcaggaaatccatcaaagcctcaagaatatgggccttgttgctctaagcagtgataatacagcatctctaatgggacagctccagaacattgccaagaaggagaactgtgtctgcagtgttattgatcagcggatccatttgtttctcaaatgctgtttggttcttggtgtgcagcggtctctattagaccttcctggaggccttactctcattgaagcagaactggcagaactgggccaaaagtttgtcaacttgacacatcacaatcagcaggtgtttggtccctactacactgagatcctaaaaaccctcatttccccagcccaggcactggaaacaaaagtggagtctgtttgatagcgtcggctcagagccctggtaccttggacccaagaggaggcccatcatcttcctggagtaacatcaccagtgaccagcagacagtgagcttctatcccaggccctgcagccagtacaccaaggctgtagggatcaagcatgtaaacaccaactggtccatacccattcattaataaacttcttaagtgcaagaa

SEQ ID NO: 31190 - DNA, 1679 bp, Homo sapiens
  source 1..1679: mol_type = unassigned DNA
agcctgccgcttccggctctggcggggggggcacgtgccccgtcccgttgccccggcgaccgcggcggtttgttctcaggccccggcctttctcaccgtgcgacgccccaacccgccgctccgccgcggtggtacgctccaggccgccaggccgcgaggcccaccgagcggacgccagtggatgacccgcggcgggggaggaggagtctggaaggcaaggtcaaggagacagtgcacaatgccttttgggaccatcttaaagagcaactatcagcaactccccctgacttcagctgtgctcttgaacttctgaaagaaattaaagagatcttgctatcactgctattaccacgccagaaccgcctgagaattgagattgaagaagctctggacatggacttgctcaagcaggaggcagaacatggggccctgaaagtcctctatctctctaagtacgttctcaacatgatggctttgctgtgtgcaccagttcgagatgaagcagtgcagaaactagaaaacattacggatcctgtttggctactgagagggatcttccaggttctgggccggatgaaaatggacatggtgaactacactatccagagccttcaaccccacctgcaggaacattccattcagtatgaacgggctaaattccaggaactcctcaataagcagcctagtctccttaatcacaccaccaaatggctgacccaagcagcaggagacctcaccatgtcacctccgacttgcccagacacttctgactcctccagtgtggctggcccctctcccaatgaggcagccaacaacccagagcccctcagccccacaatggtgctgtgtcagggcttcttgaacctccttctctgggaccttgaaaatgaagagttccctgagaccctgctgatggacagaacccggctgcaggagctgaagtcccagttgcaccagttaaccgtcatggcctcagtcttgctggtggccagtagtttctccggcagtgttttgtttggctcaccccaatttgtagataaactgaaacgcataaccaaatccttgttggaagactttcactccaggcctgaggaagctatactgactgtgagtgaacaggtatctcaggaaatccatcaaagcctcaagaatatgggccttgttgctctaagcagtgataatacagcatctctaatgggacagctccagaacattgccaagaaggagaactgtgtctgcagtgttattgatcagcggatccatttgtttctcaaatgctgtttggttcttggtgtgcagcggtctctattagaccttcctggaggccttactctcattgaagcagaactggcagaactgggccaaaagtttgtcaacttgacacatcacaatcagcaggtgtttggtccctactacactgagatcctaaaaaccctcatttccccagcccaggcactggaaacaaaagtggagtctgtttgatagcgtcggctcagagccctggtaccttggacccaagaggaggcccatcatcttcctggagtaacatcaccagtgaccagcagacagtgagcttctatcccaggccctgcagccagtacaccaaggctgtagggatcaagcatgtaaacaccaactggtccatacccattcattaataaacttcttaagtgcaagaa

SEQ ID NO: 31191 - DNA, 1882 bp, Homo sapiens
  source 1..1882: mol_type = unassigned DNA
ctcaggccccggcctttctcaccgtgcgacgccccaacccgccgctccgccgcggtggtacgctccaggccgccaggccgcgaggcccaccgagcggacgccagtggatgacccgcggcgggggaggaggagataccatcagcaaaatgccagacgtcaaggagagtgtgcccccgaaatatcctggcgactcagagggcagagaacgtaactagtcatcaaactgaggagctgtccgtgtgcaacaactcaagataaaattcttgactattgaaatgcgaaaaattagattgaggctttgcggctgaattagattggtttttcttgtggccacatgaggtcgctgctggttaactgaatggcaccaaaaggcatattggggtcatttccaacagctatgaacctgagtctggaaggcaaggtcaaggagacagtgcacaatgccttttgggaccatcttaaagagcaactatcagcaactccccctgacttcagctgtgctcttgaacttctgaaagaaattaaagagatcttgctatcactgctattaccacgccagaaccgcctgagaattgagattgaagaagctctggacatggacttgctcaagcaggaggcagaacatggggccctgaaagtcctctatctctctaagtacgttctcaacatgatggctttgctgtgtgcaccagttcgagatgaagcagtgcagaaactagaaaacattacggatcctgtttggctactgagagggatcttccaggttctgggccggatgaaaatggacatggtgaactacactatccagagccttcaaccccacctgcaggaacattccattcagtatgaacgggctaaattccaggaactcctcaataagcagcctagtctccttaatcacaccaccaaatggctgacccaagcagcaggagacctcaccatgtcacctccgacttgcccagacacttctgactcctccagtgtggctggcccctctcccaatgaggcagccaacaacccagagcccctcagccccacaatggtgctgtgtcagggcttcttgaacctccttctctgggaccttgaaaatgaagagttccctgagaccctgctgatggacagaacccggctgcaggagctgaagtcccagttgcaccagttaaccgtcatggcctcagtcttgctggtggccagtagtttctccggcagtgttttgtttggctcaccccaatttgtagataaactgaaacgcataaccaaatccttgttggaagactttcactccaggcctgaggaagctatactgactgtgagtgaacaggtatctcaggaaatccatcaaagcctcaagaatatgggccttgttgctctaagcagtgataatacagcatctctaatgggacagctccagaacattgccaagaaggagaactgtgtctgcagtgttattgatcagcggatccatttgtttctcaaatgctgtttggttcttggtgtgcagcggtctctattagaccttcctggaggccttactctcattgaagcagaactggcagaactgggccaaaagtttgtcaacttgacacatcacaatcagcaggtgtttggtccctactacactgagatcctaaaaaccctcatttccccagcccaggcactggaaacaaaagtggagtctgtttgatagcgtcggctcagagccctggtaccttggacccaagaggaggcccatcatcttcctggagtaacatcaccagtgaccagcagacagtgagcttctatcccaggccctgcagccagtacaccaaggctgtagggatcaagcatgtaaacaccaactggtccatacccattcattaataaacttcttaagtgcaagaaa

SEQ ID NO: 31192 - DNA, 615 bp, Homo sapiens
  source 1..615: mol_type = unassigned DNA
gaccgcggcggtttgttctcaggccccggcctttctcaccgtgcgacgccccaacccgccgctccgccgcggtggtacgctccaggccgccaggccgcgaggcccaccgagcggacgccagtggatgacccgcggcgggggaggaggagagaacgtaactagtcatcaaactgaggagctgtccgtgtgcaacaactcaagataaaattcttgactattgaaatgcgaaaaattagattgaggctttgcggctgaattagattggtttttcttgtggccacatgaggtcgctgctggttaactgaatggcaccaaaaggcatattggggtcatttccaacagctatgaacctgagtctggaaggcaaggtcaaggagacagtgcacaatgccttttgggaccatcttaaagagcaactatcagcaactccccctgacttcagctgtgctcttgaacttctgaaagaaattaaagagatcttgctatcactgctattaccacgccagaaccgcctgagaattgagattgaagaagctctggacatggacttgctcaagcaggaggcagaacatggggccctgaaagtcctctatctctctaagtacgttctcaaca

SEQ ID NO: 31193 - DNA, 1669 bp, Homo sapiens
  source 1..1669: mol_type = unassigned DNA
acgctcctttgcccctttctgcccctcagcacccccaagaccctgaggccgctaccccccttcccgccgcccccagggacccccttggcaattggggaggccccttccccgacgccaacaacacgcctttctccctcacccagataccatcagcaaaatgccagacgtcaaggagagtgtgcccccgaaatatcctggcgactcagagggcaggtcctgtaagcccgaaacctcaggacccccccaggaagacaagagcggctccgaggacccccctccctttctttctgtcacaggtctgacagaaaccgttaatgaagtttccaagctgagcaacaagattgggatgaattgtgattactacatggaagagaaggttttacctccaagcagtctggaaggcaaggtcaaggagacagtgcacaatgccttttgggaccatcttaaagagcaactatcagcaactccccctgacttcagctgtgctcttgaacttctgaaagaaattaaagagatcttgctatcactgctattaccacgccagaaccgcctgagaattgagattgaagaagctctggacatggacttgctcaagcaggaggcagaacatggggccctgaaagtcctctatctctctaagtacgttctcaacatgatggctttgctgtgtgcaccagttcgagatgaagcagtgcagaaactagaaaacattacggatcctgtttggctactgagagggatcttccaggttctgggccggatgaaaatggacatggtgaactacactatccagagccttcaaccccacctgcaggaacattccattcagtatgaacgggctaaattccaggaactcctcaataagcagcctagtctccttaatcacaccaccaaatggctgacccaagcagcaggagacctcaccatgtcacctccgacttgcccagacacttctgactcctccagtgtggctggcccctctcccaatgaggcagccaacaacccagagcccctcagccccacaatggtgctgtgtcagggcttcttgaacctccttctctgggaccttgaaaatgaagagttccctgagaccctgctgatggacagaacccggctgcaggagctgaagtcccagttgcaccagttaaccgtcatggcctcagtcttgctggtggccagtagtttctccggcagtgttttgtttggctcaccccaatttgtagataaactgaaacgcataaccaaatccttgttggaagactttcactccaggcctgaggaagctatactgactgtgagtgaacaggtatctcaggaaatccatcaaagcctcaagaatatgggccttgttgctctaagcagtgataatacagcatctctaatgggacagctccagaacattgccaagaaggagaactgtgtctgcagtgttattgatcagcggatccatttgtttctcaaatgctgtttggttcttggtgtgcagcggtctctattagaccttcctggaggccttactctcattgaagcagaactggcagaactgggccaaaagtttgtcaacttgacacatcacaatcagcaggtgtttggtccctactacactgagatcctaaaaaccctcatttccccagcccaggcactggaaacaaaagtggagtctgtttga

SEQ ID NO: 31194 - DNA, 1689 bp, Homo sapiens
  source 1..1689: mol_type = unassigned DNA
ccgtcccgttgccccggcgaccgcggcggtttgttctcaggccccggcctttctcaccgtgcgacgccccaacccgccgctccgccgcggtggtacgctccaggccgccaggccgcgaggcccaccgagcggacgccagtggatgacccgcggcgggggaggaggagttctttctgtcacaggtctgacagaaaccgttaatgaagtttccaagctgagcaacaagattgggatgaattgtgattactacatggaagagaaggttttacctccaagcagtctggaaggcaaggtcaaggagacagtgcacaatgccttttgggaccatcttaaagagcaactatcagcaactccccctgacttcagctgtgctcttgaacttctgaaagaaattaaagagatcttgctatcactgctattaccacgccagaaccgcctgagaattgagattgaagaagctctggacatggacttgctcaagcaggaggcagaacatggggccctgaaagtcctctatctctctaagtacgttctcaacatgatggctttgctgtgtgcaccagttcgagatgaagcagtgcagaaactagaaaacattacggatcctgtttggctactgagagggatcttccaggttctgggccggatgaaaatggacatggtgaactacactatccagagccttcaaccccacctgcaggaacattccattcagtatgaacgggctaaattccaggaactcctcaataagcagcctagtctccttaatcacaccaccaaatggctgacccaagcagcaggagacctcaccatgtcacctccgacttgcccagacacttctgactcctccagtgtggctggcccctctcccaatgaggcagccaacaacccagagcccctcagccccacaatggtgctgtgtcagggcttcttgaacctccttctctgggaccttgaaaatgaagagttccctgagaccctgctgatggacagaacccggctgcaggagctgaagtcccagttgcaccagttaaccgtcatggcctcagtcttgctggtggccagtagtttctccggcagtgttttgtttggctcaccccaatttgtagataaactgaaacgcataaccaaatccttgttggaagactttcactccaggcctgaggaagctatactgactgtgagtgaacaggtatctcaggaaatccatcaaagcctcaagaatatgggccttgttgctctaagcagtgataatacagcatctctaatgggacagctccagaacattgccaagaaggagaactgtgtctgcagtgttattgatcagcggatccatttgtttctcaaatgctgtttggttcttggtgtgcagcggtctctattagaccttcctggaggccttactctcattgaagcagaactggcagaactgggccaaaagtttgtcaacttgacacatcacaatcagcaggtgtttggtccctactacactgagatcctaaaaaccctcatttccccagcccaggcactggaaacaaaagtggagtctgtttgatagcgtcggctcagagccctggtaccttggacccaagaggaggcccatcatcttcctggagtaacatcaccagtgaccagcagacagtgagcttctatcccaggccctgcagccagtacaccaaggctgtaggg

SEQ ID NO: 31195 - DNA, 1690 bp, Homo sapiens
  source 1..1690: mol_type = unassigned DNA
ctttctcaccgtgcgacgccccaacccgccgctccgccgcggtggtacgctccaggccgccaggccgcgaggcccaccgagcggacgccagtggatgacccgcggcgggggaggaggaggtctgacagaaaccgttaatgaagtttccaagctgagcaacaagattgggatgaattgtgattactacatggaagagaaggttttacctccaagcagtctggaaggcaaggtcaaggagacagtgcacaatgccttttgggaccatcttaaagagcaactatcagcaactccccctgacttcagctgtgctcttgaacttctgaaagaaattaaagagatcttgctatcactgctattaccacgccagaaccgcctgagaattgagattgaagaagctctggacatggacttgctcaagcaggaggcagaacatggggccctgaaagtcctctatctctctaagtacgttctcaacatgatggctttgctgtgtgcaccagttcgagatgaagcagtgcagaaactagaaaacattacggatcctgtttggctactgagagggatcttccaggttctgggccggatgaaaatggacatggtgaactacactatccagagccttcaaccccacctgcaggaacattccattcagtatgaacgggctaaattccaggaactcctcaataagcagcctagtctccttaatcacaccaccaaatggctgacccaagcagcaggagacctcaccatgtcacctccgacttgcccagacacttctgactcctccagtgtggctggcccctctcccaatgaggcagccaacaacccagagcccctcagccccacaatggtgctgtgtcagggcttcttgaacctccttctctgggaccttgaaaatgaagagttccctgagaccctgctgatggacagaacccggctgcaggagctgaagtcccagttgcaccagttaaccgtcatggcctcagtcttgctggtggccagtagtttctccggcagtgttttgtttggctcaccccaatttgtagataaactgaaacgcataaccaaatccttgttggaagactttcactccaggcctgaggaagctatactgactgtgagtgaacaggtatctcaggaaatccatcaaagcctcaagaatatgggccttgttgctctaagcagtgataatacagcatctctaatgggacagctccagaacattgccaagaaggagaactgtgtctgcagtgttattgatcagcggatccatttgtttctcaaatgctgtttggttcttggtgtgcagcggtctctattagaccttcctggaggccttactctcattgaagcagaactggcagaactgggccaaaagtttgtcaacttgacacatcacaatcagcaggtgtttggtccctactacactgagatcctaaaaaccctcatttccccagcccaggcactggaaacaaaagtggagtctgtttgatagcgtcggctcagagccctggtaccttggacccaagaggaggcccatcatcttcctggagtaacatcaccagtgaccagcagacagtgagcttctatcccaggccctgcagccagtacaccaaggctgtagggatcaagcatgtaaacaccaactggtccatacccattcattaataaacttcttaagtgcaagaaa

SEQ ID NO: 31196 - DNA, 1978 bp, Homo sapiens
  source 1..1978: mol_type = unassigned DNA
ggcccaccgagcggacgccagtggatgacccgcggcgggggaggaggagataccatcagcaaaatgccagacgtcaaggagagtgtgcccccgaaatatcctggcgactcagagggcaggtcctgtaagcccgaaacctcaggacccccccaggaagacaagagcggctccgaggacccccctccctagaacgtaactagtcatcaaactgaggagctgtccgtgtgcaacaactcaagataaaattcttgactattgaaatgcgaaaaattagattgaggctttgcggctgaattagattggtttttcttgtggccacatgaggtcgctgctggttaactgaatggcaccaaaaggcatattggggtcatttccaacagctatgaacctgagttctttctgtcacaggtctgacagaaaccgttaatgaagtttccaagctgagcaacaagattgggatgaattgtgattactacatggaagagaaggttttacctccaagcagtctggaaggcaaggtcaaggagacagtgcacaatgccttttgggaccatcttaaagagcaactatcagcaactccccctgacttcagctgtgctcttgaacttctgaaagaaattaaagagatcttgctatcactgctattaccacgccagaaccgcctgagaattgagattgaagaagctctggacatggacttgctcaagcaggaggcagaacatggggccctgaaagtcctctatctctctaagtacgttctcaacatgatggctttgctgtgtgcaccagttcgagatgaagcagtgcagaaactagaaaacattacggatcctgtttggctactgagagggatcttccaggttctgggccggatgaaaatggacatggtgaactacactatccagagccttcaaccccacctgcaggaacattccattcagtatgaacgggctaaattccaggaactcctcaataagcagcctagtctccttaatcacaccaccaaatggctgacccaagcagcaggagacctcaccatgtcacctccgacttgcccagacacttctgactcctccagtgtggctggcccctctcccaatgaggcagccaacaacccagagcccctcagccccacaatggtgctgtgtcagggcttcttgaacctccttctctgggaccttgaaaatgaagagttccctgagaccctgctgatggacagaacccggctgcaggagctgaagtcccagttgcaccagttaaccgtcatggcctcagtcttgctggtggccagtagtttctccggcagtgttttgtttggctcaccccaatttgtagataaactgaaacgcataaccaaatccttgttggaagactttcactccaggcctgaggaagctatactgactgtgagtgaacaggtatctcaggaaatccatcaaagcctcaagaatatgggccttgttgctctaagcagtgataatacagcatctctaatgggacagctccagaacattgccaagaaggagaactgtgtctgcagtgttattgatcagcggatccatttgtttctcaaatgctgtttggttcttggtgtgcagcggtctctattagaccttcctggaggccttactctcattgaagcagaactggcagaactgggccaaaagtttgtcaacttgacacatcacaatcagcaggtgtttggtccctactacactgagatcctaaaaaccctcatttccccagcccaggcactggaaacaaaagtggagtctgtttgatagcgtcggctcagagccctggtaccttggacccaagaggaggcccatcatcttcctggagtaacatcaccagtgaccagcagacagtgagcttctatcccaggccctgcagccagtacaccaaggctgtagggatcaagcatgtaaacaccaactggtccatacccattcattaataaacttcttaagtgcaagaa

SEQ ID NO: 31197 - DNA, 1974 bp, Homo sapiens
  source 1..1974: mol_type = unassigned DNA
ccaggccgcgaggcccaccgagcggacgccagtggatgacccgcggcgggggaggaggagataccatcagcaaaatgccagacgtcaaggagagtgtgcccccgaaatatcctggcgactcagagggcaggtcctgtaagcccgaaacctcaggacccccccaggaagacaagagcggctccgaggacccccctccctagaacgtaactagtcatcaaactgaggagctgtccgtgtgcaacaactcaagataaaattcttgactattgaaatgcgaaaaattagattgaggctttgcggctgaattagattggtttttcttgtggccacatgaggtcgctgctggttaactgaatggcaccaaaaggcatattggggtcatttccaacagctatgaacctgaggtctgacagaaaccgttaatgaagtttccaagctgagcaacaagattgggatgaattgtgattactacatggaagagaaggttttacctccaagcagtctggaaggcaaggtcaaggagacagtgcacaatgccttttgggaccatcttaaagagcaactatcagcaactccccctgacttcagctgtgctcttgaacttctgaaagaaattaaagagatcttgctatcactgctattaccacgccagaaccgcctgagaattgagattgaagaagctctggacatggacttgctcaagcaggaggcagaacatggggccctgaaagtcctctatctctctaagtacgttctcaacatgatggctttgctgtgtgcaccagttcgagatgaagcagtgcagaaactagaaaacattacggatcctgtttggctactgagagggatcttccaggttctgggccggatgaaaatggacatggtgaactacactatccagagccttcaaccccacctgcaggaacattccattcagtatgaacgggctaaattccaggaactcctcaataagcagcctagtctccttaatcacaccaccaaatggctgacccaagcagcaggagacctcaccatgtcacctccgacttgcccagacacttctgactcctccagtgtggctggcccctctcccaatgaggcagccaacaacccagagcccctcagccccacaatggtgctgtgtcagggcttcttgaacctccttctctgggaccttgaaaatgaagagttccctgagaccctgctgatggacagaacccggctgcaggagctgaagtcccagttgcaccagttaaccgtcatggcctcagtcttgctggtggccagtagtttctccggcagtgttttgtttggctcaccccaatttgtagataaactgaaacgcataaccaaatccttgttggaagactttcactccaggcctgaggaagctatactgactgtgagtgaacaggtatctcaggaaatccatcaaagcctcaagaatatgggccttgttgctctaagcagtgataatacagcatctctaatgggacagctccagaacattgccaagaaggagaactgtgtctgcagtgttattgatcagcggatccatttgtttctcaaatgctgtttggttcttggtgtgcagcggtctctattagaccttcctggaggccttactctcattgaagcagaactggcagaactgggccaaaagtttgtcaacttgacacatcacaatcagcaggtgtttggtccctactacactgagatcctaaaaaccctcatttccccagcccaggcactggaaacaaaagtggagtctgtttgatagcgtcggctcagagccctggtaccttggacccaagaggaggcccatcatcttcctggagtaacatcaccagtgaccagcagacagtgagcttctatcccaggccctgcagccagtacaccaaggctgtagggatcaagcatgtaaacaccaactggtccatacccattcattaataaacttcttaagtgcaagaa

SEQ ID NO: 31198 - DNA, 1233 bp, Homo sapiens
  source 1..1233: mol_type = unassigned DNA
gacaaagacctgcgccggcgcgcgggactctgcgtgaggcgagcgccggggctcccggagcggatccctacctgtttcaaggacctgccagtctgagaagcttcttgtcataaggccatccaggggccacgcacccctaccttgccagcctccagcatgcaggataccgtaacgacatcagcattgttggaccccagccactcctcagtctccacccaggacaattcctccactggaggacacacttcaagcacaagcccacagctctcaaagccttcaatcacaccagtccctgcaaagtccaggaacccacatcccagggccaatatccgtcggatgcgccggatcattgctgaggatcctgagtggtcactggccatcgtgcccctcctcacagagctctgcattcagcacattatcaggaacttccagaaaaaccctatcctgaagcagatgctcccggaacaccagcagaaggtcctgaaccacctgtcccctgacctaccactggctgtgaccgccaacctgatagacagtgagaactactggctccgctgctgcatgcatcgctggcccgtgtgccacgtggcccaccatggcggcagctggaaacgcatgttcttcgagcggcacctggagaacctgctaaagcactttatcccaggcaccacagaccctgcggtgatcctcgacctgctgccgctctgccggaattacgtgcgcagggtccacgtcgatcagttccttccgccggtgcagctcccggcccagctccggccgggcgaccagtccgactcaggcagcgagggagagatggaggagcccaccgttgaccactaccaactgggcgatctggtagctggcctgagccacctggaggagctggacctggtgtacgatgtcaaggactgcggcatgaatttcgagtggaatctcttcctcttcacctaccgtgactgcctctccttggcagccgccatcaaggcatgccacaccctcaaggacggtgggaagcagctcctggaaggcatgtcagacaacaagaccctcctggaatttgacttgcgcctgtcagatgtggcccaggaaagcgagtacctcattggccaggccctctacgcaaaccgagaagcagcccgccagcgggccctgaatcccagccacttcatgtcaaccataactgccaatggccctgagaactctgtgggataaaatgacctgacttggatcatg

SEQ ID NO: 31199 - DNA, 616 bp, Homo sapiens
  source 1..616: mol_type = unassigned DNA
cgcatgttcttcgagcggcacctggagaacctgctaaagcactttatcccaggcaccacagaccctgcggtgatcctcgacctgctgccgctctgccggaattacgtgcgcagggtccacgtcgatcagttccttccgccggtgcagctcccggcccagctccggccgggcgaccagtccgactcaggcagcgagggagagatggaggagcccaccgttgaccactaccaactgggcgatctggtagctggcctgagccacctggaggagctggacctggtgtacgatgtcaaggactgcggcatgaatttcgagtggaatctcttcctcttcacctaccgtgactgcctctccttggcagccgccatcaaggcatgccacaccctcaaggacggtgggaagcagctcctggaaggcatgtcagacaacaagaccctcctggaatttgacttgcgcctgtcagatgtggcccaggaaagcgagtacctcattggccaggccctctacgcaaaccgagaagcagcccgccagcgggccctgaatcccagccacttcatgtcaaccataactgccaatggccctgagaactctgtgggataaaatgacctgacttgga

SEQ ID NO: 31200 - DNA, 3067 bp, Homo sapiens
  source 1..3067: mol_type = unassigned DNA
gtgaggcgagcgccggggctcccggagcggatccctacctgtttcaaggacctgccagtctgagaagcttcttgtcataaggccatccaggggccacgcacccctaccttgccagcctccagcatgcaggataccgtaacgacatcagcattgttggaccccagccactcctcagtctccacccaggacaattcctccactggaggacacacttcaagcacaagcccacagctctcaaagccttcaatcacaccagtccctgcaaagtccaggaacccacatcccagggccaatatccgtcggatgcgccggatcattgctgaggatcctgagtggtcactggccatcgtgcccctcctcacagagctctgcattcagcacattatcaggaacttccagaaaaaccctatcctgaagcagatgctcccggaacaccagcagaaggtcctgaaccacctgtcccctgacctaccactggctgtgaccgccaacctgatagacagtgagaactactggctccgctgctgcatgcatcgctggcccgtgtgccacgtggcccaccatggcggcagctggaaacgcatgttcttcgagcggcacctggagaacctgctaaagcactttatcccaggcaccacagaccctgcggtgatcctcgacctgctgccgctctgccggaattacgtgcgcagggtccacgtcgatcagttccttccgccggtgcagctcccggcccagctccggccgggcgaccagtccgactcaggcagcgagggagagatggaggagcccaccgttgaccactaccaactgggcgatctggtagctggcctgagccacctggaggagctggacctggtgtacgatgtcaaggactgcggcatgaatttcgagtggaatctcttcctcttcacctaccgtgactgcctctccttggcagccgccatcaaggcatgccacaccctcaagatcttcaagctgacccgaagcaaggtggatgatgacaaggcacgcatcataattcgaagccttctggaccacccagtcctcgaggagctggacttgtcacaaaacctcattggagaccgtggtgcacgaggtgctgccaagctgctgagccacagccgcctgcgtgtgctcaacctggctaacaaccaggtgcgtgcacccggtgcccagtccctggctcacgctctggcacacaacaccaacctcatttccctcaacctacgtctcaactgcatcgaggatgagggtggccaggctcttgcccatgccttgcagaccaacaagtgcctcaccacgctgcacctcggtggcaatgagctgtctgagcccaccgccacactcctgtcacaggtgctcgccatcaacaccacactcaccagcatcaacctgtcctgcaaccacatcgggctggacggtgggaagcagctcctggaaggcatgtcagacaacaagaccctcctggaatttgacttgcgcctgtcagatgtggcccaggaaagcgagtacctcattggccaggccctctacgcaaaccgagaagcagcccgccagcgggccctgaatcccagccacttcatgtcaaccataactgccaatggccctgagaactctgtgggataaaatgacctgacttggatcatggccccagccccatccctcatttcatacccctgccatgcctgctgcagagtatcacactggttcagagggagcggggagggggactgtgaataaccttggagtgatcaagggttgtatggatggagacatgaggcagggaagggagcctggcatgggggaagaaagggtatgcagtagggacccagcctttgtgcccagggaaaggatattactggacacccacaaatgaccaacttctttcaggaacagggaagtcagagaggtgtctgagggactgtgcctgccagattctcccgttggggctgcctgcctccctgactccccaccattttcttctctaccaaacagatccttgatcttcaaacacacacacacacacacacacacacacacacacacacacacacacaccctctggctacagcagggctatgcctggctctctctgccaccctcatccctgtagatgcatttccctgttgcttgactctgctttaagtgatccagttctacaggccacgccatcccctagttccccaactcccaacctgggaaggggacaatgagctgacaccaggggctcagacccagtggactcctctggggaggcaactgtagatgacaacttccagggaaggatgacacaatccctgccacccaccccagagagcttccctgggagggagggaaagaagtgccacactgggacaggaagtcagtgagtcatccacgactttattatccaccagtttgatttgtacaatctttgcgcttaaatccacgacaaaaaggccacagtgtgatgcacccaattgacagagacctgtcttctccccagccaggcccagcccaccccacaagcccttgtccccaggacacatggagccttccaggtgccctacatgagtcccccatcactctgtagctgtccaccctggggccacacctacaggaatcacatcagcccccagggccacaagagacctagctgactgattcaggctgagcgccattgcccatcctccttgggctgattcattggcccagagcctccagaactgtgtccccaaagggcaggtcatgggctacaaccccagtccaggagtgcctgctctccagggactccttccgctaagcaggcgctgagcagagcaccaaagggggcttgggagtgactgcatgtgtgtgcctgtctaggcaacctagagtctgtctgtgcctgacaccctctgacagttccggagtgcaaacgtgtaggtgtgagggtgtgtgtgtgtgtgtgtgtgtgtatagccacagctgctagcagaagttctaattagagaaacaagaacattcagtgtaaagtttaattttagagattaattaattttctggttttcattttccctggcaatcagtaaagctaccaagaaaa

SEQ ID NO: 31201 - DNA, 769 bp, Homo sapiens
  source 1..769: mol_type = unassigned DNA
cgaggcgcaggtgggagacttccgccctcgcgggactggctagggcgtttgaccgccggcggtgaaggggaggcggtgggcgtcttggagaacagagcgagatggagaagcgaggccgaggcgtgaagtcgagccccatccagaccccgaaccagacccctcagcaggctccggtgacgcctaggaaagaaaggaggcctagcatgttcgagaaggaggcatatacacagattttaagagaaagactgagagagtcaattcacaatgttcagtatgtggagcctccttttgatgactcaattgctgatataggtaaagaatggaagagtgccctggcaaaattaaagtttgctaattcatatagaatggagccattgaagaaattccaagctcattcagtagaaactaaagtccagcagatactaacagaaagtcttaaagatgtcaaatatgatgataaagtattctctcacttgtcacttgaattggcagaccgcatactgttagcagtcaaagaatttgggtaccaccgttataagttcattataaaagtattatttattcaaaagactggccaagcaataaatattgccagcagatggatctgggacattgcatgggacagctgggtcgcagctaaacacgaagcagaatcctacgtggcactggtcttggtgtttgccctttattatgaatagctcattacaggtactaaggattgtttacttccgaacttttcaaaaataaatgaaatttacatatttgtaaa

SEQ ID NO: 31202 - DNA, 763 bp, Homo sapiens
  source 1..763: mol_type = unassigned DNA
caggtccatggccagcaggcctctgcccccgggacgccaggaggaggagaatgccaaagactccgggcggaaaccctcaccggtgcggccccgaggctgcctgcccagcattgatgaggcccgaccggcaggtccaggtccagccccggcctcgcgccggggctccatgctgggcctggccgcgtccttctcccgccgcaactcgctggtcgggccaggcgcgggtcctgggggtcagcggccatccctgggcccggtgccccctctgggctcaagggtcagcttctcagggttgcccctggcgcccgcccgttgggtggcgccctcctaccgcacggagccagtgcccggggagcgctgggaggctgcgcgtgcacagcgtgccctggaggcggcgctggccgcagggctgcacgacgcgtgctactccagcgacgaggccgcgcggctggtgcgggagctctgcgagcaggtgcacgttcgcctgcgcgagctcagcccgccacgctacaagctggtatgcagtgtggtgctggggccgcgcgcgggccagggcgttcacgtggtcagccgtgcgctctgggacgtggcgcgcgatgggctggcctcggtctcctacaccaacacctcgctcttcgcggtggccacggtccacgggctctactgcgagtgagggggagtccaattctgcaaaattgtttattatcctaggaggaggcccccctggggctcacatcccaataaataagtgtctgacaataaa

SEQ ID NO: 31203 - DNA, 1262 bp, Homo sapiens
  source 1..1262: mol_type = unassigned DNA
agaactgattctggaggaagtgggatcagaggccaaaggcagaaggtggaagggggcttcatgagtcatctgccctcagcctgggccaggtgtaggggagatctttgtgccagccaccctagagtagatctgggtggaagatgactggattcaacacccccagggctggaaggatctgtggggttgaaggagctgagtctgtcagtccttcctggttaggggttggaggctctgcctccacagtccaggctgaggcagaggcctgcctctccttccagagaagtcgggtggaagggagaaatggcagtctctaagactccgagcgtacctggctaacttccatagtgcccagagaaggagctcagtcggcaaggactagccgaggatcccagtcctagcagcctcctgtcccctgctcatgtgtctaacagcctttaaccttctcagcacctaggaacccaggcagcctgggactatctgatccacttgttctaaaacacagcaggtccatggccagcaggcctctgcccccgggacgccaggaggaggagaatgccaaagactccgggcggaaaccctcaccggtgcggccccgaggctgcctgcccagcattgatgaggcccgaccggcaggtccaggtccagccccggcctcgcgccggggctccatgctgggcctggccgcgtccttctcccgccgcaactcgctggtcgggccaggcgcgggtcctgggggtcagcggccatccctgggcccggtgccccctctgggctcaagggtcagcttctcagggttgcccctggcgcccgcccgttgggtggcgccctcctaccgcacggagccagtgcccggggagcgctgggaggctgcgcgtgcacagcgtgccctggaggcggcgctggccgcagggctgcacgacgcgtgctactccagcgacgaggccgcgcggctggtgcgggagctctgcgagcaggtgcacgttcgcctgcgcgagctcagcccgccacgctacaagctggtatgcagtgtggtgctggggccgcgcgcgggccagggcgttcacgtggtcagccgtgcgctctgggacgtggcgcgcgatgggctggcctcggtctcctacaccaacacctcgctcttcgcggtggccacggtccacgggctctactgcgagtgagggggagtccaattctgcaaaattgtttattatcctaggaggaggcccccctggggctcacatcccaataaataagtgtctgacaat

SEQ ID NO: 31204 - DNA, 3075 bp, Homo sapiens
  source 1..3075: mol_type = unassigned DNA
tcgcagttaccaccaaacccaggaggagactctccctggaaaacttcccttccctttcggtttattttcttgaaaaggctccaggcttcggcttggaaaatcccaccgccaaaattgagcccagcagctggagcggcagtgagagccctgccgaaaacatggaaaggatgagtgactctgcagataagccaattgacaatgatgcagaaggggtctggagccccgacatcgagcaaagctttcaggaggccctggctatctatccaccatgtgggaggaggaaaatcatcttatcagacgaaggcaaaatgtatggtaggaatgaattgatagccagatacatcaaactcaggacaggcaagacgaggaccagaaaacaggtgtctagtcacattcaggttcttgccagaaggaaatctcgtgattttcattccaagctaaaggtaacaagcatggatcagactgcaaaggataaggccctgcagcacatggcggccatgtcctcagcccagatcgtctcggccactgccattcataacaagctggggctgcctgggattccacgcccgaccttcccaggggcgccggggttctggccgggaatgattcaaacagggcagccaggatcctcacaagacgtcaagccttttgtgcagcaggcctaccccatccagccagcggtcacagcccccattccagggtttgagcctgcatcggccccagctccctcagtccctgcctggcaaggtcgctccattggcacaaccaagcttcgcctggtggaattttcagcttttctcgagcagcagcgagacccagactcggctgatttaaactgcaatattcaagatgatgctggggctttttatggtgtaaccagtcagtacgagagttctgaaaatatgacagtcacctgttccaccaaagtttgctcctttgggaagcaagtagtagaaaaagtagagacggagtatgcaaggtttgagaatggccgatttgtataccgaataaaccgctccccaatgtgtgaatatatgatcaacttcatccacaagctcaaacacttaccagagaaatatatgatgaacagtgttttggaaaacttcacaattttattggtggtaacaaacagggatacacaagaaactctactctgcatggcctgtgtgtttgaagtttcaaatagtgaacacggagcacaacatcatatttacaggcttgtaaaggactgaacatggttatttatatatatagatatctgtatatacacacacacatatgtgcacacacacactctctctccattatcgaacgactgactgtaaacctcaccacacagggtggtgccctggccccgaggtcaccccgacttttctaaatcttgtttgagtgaagtcattttttcatgtgttcatactatcattgtagctgtgaagttctggtacagttgtaaaaagagaaattgagttgtttctctatgttcttcagatgtgcagcccacaattcctcgggaaaggtgaacctgaacaacccaagtctctctctgcagagccctgtttctaattgtggtagaaaatattgagacagagcatttgccatgggacatttacagcctttatacaaatgtatttagttctcttttttccaacataaaattcttgttttaagatacaagtaaaattaatctttaaatataaatgtaaattagtacacaaaactaagaatctttagacttatctttgtaactaattagggtggaagttatgaaagaatgtaattcactaaattattttttaaatgaaacctttttttttctttttgaaaccaaatgttaaactatagccttaagaaatgcttggtagaagtgtcctaatgagacaaatttgtacttttatcctcaaggttaacactaatctcctaatccattaaactcttgaacaggtattacaaaggaagaaaacttcaccccttatccttaacatatatagtatatttaaaaaatataaaattgtattgtactaatgtgatgatggattatttaatgaaaaagaaaaaatggctctttttgcaataagtagatacatactgaaaaaatctaaacttacaatgtttatagtcttgtgtgtgcagttatattttatatggacgaccaaattttttattaagatgagtaaatatttgaaccactgaattttaataacaaaattttaaaattggcatgaatacggaatactgcactgtgagatgcaaagtatacagaatctgtggctgggagaaaatttcatcaaatagacaagtaaaaggctcatcagttttagcatctctgctccccagaaaattgtaagcatcctcaccagcctgtggatacattctttatttctagtgacccaatatgcatattaacctgctataactagggctatatgtgtaggtatgtgtatacatatacacaaatgcacatatagagttaacacatttagtgaacacttgtttagtgtcactcagtttgctaggtgctgatatgtacgtatatctcaatgtgtctgtagacttagatacatcctcttgaagcacatccatttctttagcgtctctcagtaagttacagtacttgtttgacttaggtttaagaggcccagctacctatctctgaccttttcaaataggctcatttgggagattcttttgccaggagagattcaactttccaatctaagtattccagagcattgcccaggcagagttggtttgatgtggccagatgttttgagttatttcccttaagtgtttcactggggagagaacagggagtgctcctccagcttcccaaagaaatatgtttttgtaagtggtaggaacatgtgcacacaatagaacatgaaataagttttttaacttgtaaaacatgtcaagatttttccaccaagctagaaaataaaaaacttagttctaccacatccaattaacttacacacccccttccctgtctcaacacctgctttgaccctgcttttctattattacatcagtcagcatcttgtggtccctaacatgaggatgtggctggctcgtggg

SEQ ID NO: 31205 - DNA, 9430 bp, Homo sapiens
  source 1..9430: mol_type = unassigned DNA
ttccgaacattcttagcatcgctcgcgccgcgccgcgccgcctgagccgagccgagcctctgctgccgccgccgcggccccgccgcccgccgcgggcgcccaccaagcactttgcagactcgcttccaccctgcgggccattccgcgcggcggggcccgggcccggggcggccgcgtccaggcacaggccatgcagtgacgcccccccacccctccacctttgcccggagcgcgggcagcagcccagcgcgccagccggccccggggcaggagcggtgctaggcaggggtggggtggccgggcccagggaccgggagccggggagggagccgggcaccgagcagagggcgggggaagcggcgccgaagtttgcctcggactcgccgggcgctgcggtggctccctgggccgaggactgttgctgccgctgccgccgccgcttcattgcacattcaagtggaaaattttcaggagtcagcagaaacattgtgtccaaaaaagactgagtcgcagttaccaccaaacccaggaggagactctccctggaaaacttcccttccctttcggtttattttcttgaaaaggctccaggcttcggcttggaaaatcccaccgccaaaattgagcccagcagctggagcggcagtgagagccctgccgaaaacatggaaaggatgagtgactctgcagataagccaattgacaatgatgcagaaggggtctggagccccgacatcgagcaaagctttcaggaggccctggctatctatccaccatgtgggaggaggaaaatcatcttatcagacgaaggcaaaatgtatggtaggaatgaattgatagccagatacatcaaactcaggacaggcaagacgaggaccagaaaacaggtgtctagtcacattcaggttcttgccagaaggaaatctcgtgattttcattccaagctaaaggatcagactgcaaaggataaggccctgcagcacatggcggccatgtcctcagcccagatcgtctcggccactgccattcataacaagctggggctgcctgggattccacgcccgaccttcccaggggcgccggggttctggccgggaatgattcaaacagggcagccaggatcctcacaagacgtcaagccttttgtgcagcaggcctaccccatccagccagcggtcacagcccccattccagggtttgagcctgcatcggccccagctccctcagtccctgcctggcaaggtcgctccattggcacaaccaagcttcgcctggtggaattttcagcttttctcgagcagcagcgagacccagactcgtacaacaaacacctcttcgtgcacattgggcatgccaaccattcttacagtgacccattgcttgaatcagtggacattcgtcagatttatgacaaatttcctgaaaagaaaggtggcttaaaggaactgtttggaaagggccctcaaaatgccttcttcctcgtaaaattctgggctgatttaaactgcaatattcaagatgatgctggggctttttatggtgtaaccagtcagtacgagagttctgaaaatatgacagtcacctgttccaccaaagtttgctcctttgggaagcaagtagtagaaaaagtagagacggagtatgcaaggtttgagaatggccgatttgtataccgaataaaccgctccccaatgtgtgaatatatgatcaacttcatccacaagctcaaacacttaccagagaaatatatgatgaacagtgttttggaaaacttcacaattttattggtggtaacaaacagggatacacaagaaactctactctgcatggcctgtgtgtttgaagtttcaaatagtgaacacggagcacaacatcatatttacaggcttgtaaaggactgaacatggttatttatatatatagatatctgtatatacacacacacatatgtgcacacacacactctctctccattatcgaacgactgactgtaaacctcaccacacagggtggtgccctggccccgaggtcaccccgacttttctaaatcttgtttgagtgaagtcattttttcatgtgttcatactatcattgtagctgtgaagttctggtacagttgtaaaaagagaaattgagttgtttctctatgttcttcagatgtgcagcccacaattcctcgggaaaggtgaacctgaacaacccaagtctctctctgcagagccctgtttctaattgtggtagaaaatattgagacagagcatttgccatgggacatttacagcctttatacaaatgtatttagttctcttttttccaacataaaattcttgttttaagatacaagtaaaattaatctttaaatataaatgtaaattagtacacaaaactaagaatctttagacttatctttgtaactaattagggtggaagttatgaaagaatgtaattcactaaattattttttaaatgaaacctttttttttctttttgaaaccaaatgttaaactatagccttaagaaatgcttggtagaagtgtcctaatgagacaaatttgtacttttatcctcaaggttaacactaatctcctaatccattaaactcttgaacaggtattacaaaggaagaaaacttcaccccttatccttaacatatatagtatatttaaaaaatataaaattgtattgtactaatgtgatgatggattatttaatgaaaaagaaaaaatggctctttttgcaataagtagatacatactgaaaaaatctaaacttacaatgtttatagtcttgtgtgtgcagttatattttatatggacgaccaaattttttattaagatgagtaaatatttgaaccactgaattttaataacaaaattttaaaattggcatgaatacggaatactgcactgtgagatgcaaagtatacagaatctgtggctgggagaaaatttcatcaaatagacaagtaaaaggctcatcagttttagcatctctgctccccagaaaattgtaagcatcctcaccagcctgtggatacattctttatttctagtgacccaatatgcatattaacctgctataactagggctatatgtgtaggtatgtgtatacatatacacaaatgcacatatagagttaacacatttagtgaacacttgtttagtgtcactcagtttgctaggtgctgatatgtacgtatatctcaatgtgtctgtagacttagatacatcctcttgaagcacatccatttctttagcgtctctcagtaagttacagtacttgtttgacttaggtttaagaggcccagctacctatctctgaccttttcaaataggctcatttgggagattcttttgccaggagagattcaactttccaatctaagtattccagagcattgcccaggcagagttggtttgatgtggccagatgttttgagttatttcccttaagtgtttcactggggagagaacagggagtgctcctccagcttcccaaagaaatatgtttttgtaagtggtaggaacatgtgcacacaatagaacatgaaataagttttttaacttgtaaaacatgtcaagatttttccaccaagctagaaaataaaaaacttagttctaccacatccaattaacttacacacccccttccctgtctcaacacctgctttgaccctgcttttctattattacatcagtcagcatcttgtggtccctaacatgaggatgtggctggctcgtgggaaacagcaaaacactaagcctgacctctcccaaattgggaagaccagaggagaaagtgcaaaactgtccccatttggaatgcccattccttctagaaaccagttggacagtgctcctctgcccttcataaacagactactgttgggtccctgattccaggctggcctgtgaaggattgccccaggtgtcccctttcacggttgtcacatttacagtgacttctgttgaacacccctcttagggatgtttcttttgctcttatttcctgcatctttccttaagggaagccccatcctctcccaggaccaggagtttatgaccaggcgagcacaaatggctaaaagccaagctgtcctagaacttcagtgggagagctgtctggttcatattctacccaggaatggtacttttcagtgcagccaggagggctcttgggatttcctttccaaagcacaaaaatactgggacccaagaagaacagctagaggacaactctgttggcacagagacggggacagcccagtctgctgacctcacagggtcagctgggcccccctggtgcttcaccacctgcatcctcttgctcagaatgcctttgcagttgagttttctgggtttctatgattgaccttgaggtttactccttgctcttacaacatttctaaggatttttaaaagtttacttcttgtcttgttcttctaaagctttctccaggacagatattttccctgtcttaaccactggtccagtcatcccagtgggcttctctttgtctctcccagattagacctttgggtgagattggcatcacaacatctaatctgagtctgtcttttgtccttcattctgtatggcagtctccctttgttataaaagctttctaaagcatactaaagaagccttcccagagccccgtcttgcttctcttccaggtgctctatcccctcgagaccctctggtgccaggcttgcttcacggccatcttgtgttgtcactgcagagtttggaggccagttttccacagcctaaacagggaggagctgcagaatggggctctggtctctgggcattcatttccctcatagaggctgagaataaaacaaggacttattcacacatgttctagaaccccagaatggcccaagttacctgagaccagggtttctcaaccttgacaccattgacattttggactgggtaattctttgttctgcagagctgtcctttgcactgtaggagatttactaatatccctggcctctacccagtagtaccactagcacctattccccacccagcgtgtctccagatattgtcaaatatcccatcgggtgcaaaatgatccctggtcaagatctgttgcccaagatgttacaggtcacaatgaccacatttgaaattgttttccctttcattttaccctgtgaaagcatctctcctagagccttgcaagaggcaggtgacattgtgtccatatttcttcctgtttcagaacttctgtttcacaacaatttctctctcgctacaagtattctttcactcagcactggggaagttgggaacagctggtcaccatcatccctttaatcaactcacacctgtttaaagagtgtttctgatttgaccttcatcccttagtttactggcgttaaaaaaagtctcagcaattttcattatttctcgtgggtctcattatcaaacctttacttatttcggcatatttcctctgggcttcttctagtttctgccttacaagcaatgctgttctgtaaatttattgaaacctctggaacatttcacctttagagatggaggatggaaggattggtaccagaagagggctaagatacgttttctgtcttgagctgaaagcacagtctactctccttcgttttgtcgatgagaaagttgaggccagaggggaggtgacatgtttagagtcacccagctggttagtgacagaaaaagcgtgagagttgtctaggattcctgccactttggtccctggcctctcctgggggaggctgctgttcttaggtgctctaagcttaatccctcagaatgtgtggacaggtcagcttagaagagatggggagattcaggatccccctgtgccagagcacagcctcaccggatgctgcttcccacactgaagtgtcctgtccgaccattgctatctgaggcatccacaagcaggtaggaaagctggcgagccattttacttcctgaggacaattccccagccacaggctctgagtcaaatttctatttggtaagcatcctagcagcaaagtcctgcactcagaccagccaaaaaacagcccccattccaagtacttggtgtcaaaagtccccgaacgacttttaaacccaagtcttcttaaggtttcagtactgtggtggctttagcagttgtttttgtgcaactataaattatttaaatcatctgagatgacagtcaattttacaaaccaggtacatattaatttgtataattttgtatatgctctggtacactacctgaactaacgaagggtagaactaattctgtttgtcagtgttcacacctgtaacattaggaggatatgtctgcattgcttatttctttatgttggtgtttctgtggcaaagccctgcacatggcatttctgaaaagccttaaatctttaagatgttgcatgtagggtatgcagtgcaaaaggctgcctcagaactgtgagcccttttgtaagctggaagcatttctcttactactgttacttttgtaggaagttttcaattcagagctgccaaagtgttcccgtaagcagtgccttagtaataccttagtcatgccgccagccttttcttacaccaattcctaatgttcatttacgaattggcccaatattggaaacaaaacaagcaaaaattgtcttcatttttgttttgtaagcccattttttctccagttctataggaaactgactgcttggtgtaaaatccgaaactggacacaagtcagttctttcaccacactcaaatgtatataccaaaacaaaaggttgcaacttcatagtttactatgaaaagcaaattgtactttttaatgttgccttttaaattcatgaccaaatacttagctatttgtgaatcttctgcactctagcatgaaagtgcctttggtttgagattccagcttagaaaagtgctgccataataacgataatttgtagagagaccaaaaatattttgagatcaccgtaatgcctttggtttaccgggatgagtaaccaaccacaggcctctgttcacaagagcacgacgtggtccccgcctgctgctagtctgtctgccactgggggcctcccaacatccatagcacacttcagcggaaggaccccagaaactgttgtgtttgtgtgtgctgatgacctagtgtgtcatttcacctcgtcacccagccctgcgtccggatgaggggacttctgcacaaatgacagaatctcggctggtggacagatactacagctttctcctcctccttgtgttcgtgttcagtctctgtggagactttcttttccattcaaatgacagtgcgcacttatctggtttacacaatgataccattttgaaagttggaagcctcaaactgagacgacagtgcagaacaaaacaaaagtgagttagggtcgttaaaattgaagtgttcttcttagggcaaacatgttgactccgagtattgtgtatgaatgtgctacgagaaacttccaaagagcaccattcacaatttggcattttcaaagaatgttccagccctcaaaggggcaactctttaaagtccttgttggcttttatccaaaccttgtagaaattgggaaagctgatagaggtaaggaagacgagtgaaaaggacaagaaggccaaacaccagccaaaaagaaactaggaaaaaaagattttctttgctaatatagatgtaaaaataacatcagacatctttgaaaattagcctctaaactcttaatacatacgttctgtgtgtctctacctggcgtctttaagaatatcctctctgggctctgaaattttaggagtgattcttatccactccaagttgtaagtatttgtagaaatttgtgcaaacaaacaaaaactatcaaatgaaaagaaaatgtactcaacctaacttatagttagcagctggaattctcaactcttccctgccagcactataccacagtgtggaagaaattagtcaaatgcttgttttcctgcttctcttttcaactgttactgtgctttgtttgaaagtagttttctctctcaaagccgttgcttatatcgttaagaatgaaggtttgtgtttaaaatttattgcattgcaaagggtagtttcactgaagtcatgcaccattaaataagatgaaatatttgtatttattgtcctacttcctaagccgtaacttcttttcctctgtgaatttgcattgagtcactcatgctacactacatcgctttagtatttgagatggcatttatgtttcctctcgtttatcatgaaatggggtcagattccatcagattccacctctgtcaggtggactcttgtctgccttccatgatgagattttttttctccttcccctttctttaagagaggctgacagatctaggtgtcaatcaattggaaaccagtctctgattttttttcattagttattttctatcattagtttcactgtgtaaattagatatcaactgcacttctttaaaaaaaaatacatctccctattacctccttgaaagatttacttctgtaggcctttttcaataggctcatgactgcagacaaggaaaaaaaaagtaaaaacaaaaacagtatgtgcctgaaaatgacaaaaaaaaaatttgtaacatttaaaaaagaaacctgaatagcctttaattctttaataatacacttaaattttatgtaaatcggttttcgccacgtgtgtttgttcacattctaaatgacttaatgggattctcacggtctgtgtctttgtgtcacgtgtataaaatgggcttgtgatgtaagcgtttcatctggtcagtggttcctttgatattgtactgctgctgggagtgggctgtggaacctgccttcgggtaactgggttcctcttgggtagattggagagatgggggtgggcgtgggcaaattctcacacatgttttcttaacctatttgcagaaactttcaaaaggcatttgattaaacctcttggcagtacagtattcttgtatttgttaacgtctgtgtttaggtactggtacctttttgttttaaaatgttctaagtgttggctttaaagtgaatttatctttagtatgatagttatatgaaaattataggatttgtgtgcagagaatttttttataaagtgctttgtaaaaaaaaaaaaatgtattctagcttttgcggtacatatgtgtgataactttaatacccatgacagttaagtgcaattatttcatcactctaaaaatgctatttttgtgtcagttcctgcaggtgttttcatgtctttgcaaagtgacacattttgatgccttcttgataaagtggtagacattttgtagctttctagaaactttgtattcatacggtatcaatgaaaaataaagaaaatgaaagtgtgggtcaccttttttatctgc

SEQ ID NO: 31206 - DNA, 8156 bp, Homo sapiens
  source 1..8156: mol_type = unassigned DNA
agggagtgtggtggcattgctctgcagagacatgaacagctccctgggagacactgctggggaaagatgagtcgagtctacggttttttctcatcctcctgtttattttcttgaaaaggctccaggcttcggcttggaaaatcccaccgccaaaattgagcccagcagctggagcggcagtgagagccctgccgaaaacatggaaaggatgagtgactctgcagataagccaattgacaatgatgcagaaggggtctggagccccgacatcgagcaaagctttcaggaggccctggctatctatccaccatgtgggaggaggaaaatcatcttatcagacgaaggcaaaatgtatggtaggaatgaattgatagccagatacatcaaactcaggacaggcaagacgaggaccagaaaacaggtgtctagtcacattcaggttcttgccagaaggaaatctcgtgattttcattccaagctaaaggatcagactgcaaaggataaggccctgcagcacatggcggccatgtcctcagcccagatcgtctcggccactgccattcataacaagctggggctgcctgggattccacgcccgaccttcccaggggcgccggggttctggccgggaatgattcaaacagggcagccaggatcctcacaagacgtcaagccttttgtgcagcaggcctaccccatccagccagcggtcacagcccccattccagggtttgagcctgcatcggccccagctccctcagtccctgcctggcaaggtcgctccattggcacaaccaagcttcgcctggtggaattttcagcttttctcgagcagcagcgagacccagactcgtacaacaaacacctcttcgtgcacattgggcatgccaaccattcttacagtgacccattgcttgaatcagtggacattcgtcagatttatgacaaatttcctgaaaagaaaggtggcttaaaggaactgtttggaaagggccctcaaaatgccttcttcctcgtaaaattctgggctgatttaaactgcaatattcaagatgatgctggggctttttatggtgtaaccagtcagtacgagagttctgaaaatatgacagtcacctgttccaccaaagtttgctcctttgggaagcaagtagtagaaaaagtagagacggagtatgcaaggtttgagaatggccgatttgtataccgaataaaccgctccccaatgtgtgaatatatgatcaacttcatccacaagctcaaacacttaccagagaaatatatgatgaacagtgttttggaaaacttcacaattttattggtggtaacaaacagggatacacaagaaactctactctgcatggcctgtgtgtttgaagtttcaaatagtgaacacggagcacaacatcatatttacaggcttgtaaaggactgaacatggttatttatatatatagatatctgtatatacacacacacatatgtgcacacacacactctctctccattatcgaacgactgactgtaaacctcaccacacagggtggtgccctggccccgaggtcaccccgacttttctaaatcttgtttgagtgaagtcattttttcatgtgttcatactatcattgtagctgtgaagttctggtacagttgtaaaaagagaaattgagttgtttctctatgttcttcagatgtgcagcccacaattcctcgggaaaggtgaacctgaacaacccaagtctctctctgcagagccctgtttctaattgtggtagaaaatattgagacagagcatttgccatgggacatttacagcctttatacaaatgtatttagttctcttttttccaacataaaattcttgttttaagatacaagtaaaattaatctttaaatataaatgtaaattagtacacaaaactaagaatctttagacttatctttgtaactaattagggtggaagttatgaaagaatgtaattcactaaattattttttaaatgaaacctttttttttctttttgaaaccaaatgttaaactatagccttaagaaatgcttggtagaagtgtcctaatgagacaaatttgtacttttatcctcaaggttaacactaatctcctaatccattaaactcttgaacaggtattacaaaggaagaaaacttcaccccttatccttaacatatatagtatatttaaaaaatataaaattgtattgtactaatgtgatgatggattatttaatgaaaaagaaaaaatggctctttttgcaataagtagatacatactgaaaaaatctaaacttacaatgtttatagtcttgtgtgtgcagttatattttatatggacgaccaaattttttattaagatgagtaaatatttgaaccactgaattttaataacaaaattttaaaattggcatgaatacggaatactgcactgtgagatgcaaagtatacagaatctgtggctgggagaaaatttcatcaaatagacaagtaaaaggctcatcagttttagcatctctgctccccagaaaattgtaagcatcctcaccagcctgtggatacattctttatttctagtgacccaatatgcatattaacctgctataactagggctatatgtgtaggtatgtgtatacatatacacaaatgcacatatagagttaacacatttagtgaacacttgtttagtgtcactcagtttgctaggtgctgatatgtacgtatatctcaatgtgtctgtagacttagatacatcctcttgaagcacatccatttctttagcgtctctcagtaagttacagtacttgtttgacttaggtttaagaggcccagctacctatctctgaccttttcaaataggctcatttgggagattcttttgccaggagagattcaactttccaatctaagtattccagagcattgcccaggcagagttggtttgatgtggccagatgttttgagttatttcccttaagtgtttcactggggagagaacagggagtgctcctccagcttcccaaagaaatatgtttttgtaagtggtaggaacatgtgcacacaatagaacatgaaataagttttttaacttgtaaaacatgtcaagatttttccaccaagctagaaaataaaaaacttagttctaccacatccaattaacttacacacccccttccctgtctcaacacctgctttgaccctgcttttctattattacatcagtcagcatcttgtggtccctaacatgaggatgtggctggctcgtgggaaacagcaaaacactaagcctgacctctcccaaattgggaagaccagaggagaaagtgcaaaactgtccccatttggaatgcccattccttctagaaaccagttggacagtgctcctctgcccttcataaacagactactgttgggtccctgattccaggctggcctgtgaaggattgccccaggtgtcccctttcacggttgtcacatttacagtgacttctgttgaacacccctcttagggatgtttcttttgctcttatttcctgcatctttccttaagggaagccccatcctctcccaggaccaggagtttatgaccaggcgagcacaaatggctaaaagccaagctgtcctagaacttcagtgggagagctgtctggttcatattctacccaggaatggtacttttcagtgcagccaggagggctcttgggatttcctttccaaagcacaaaaatactgggacccaagaagaacagctagaggacaactctgttggcacagagacggggacagcccagtctgctgacctcacagggtcagctgggcccccctggtgcttcaccacctgcatcctcttgctcagaatgcctttgcagttgagttttctgggtttctatgattgaccttgaggtttactccttgctcttacaacatttctaaggatttttaaaagtttacttcttgtcttgttcttctaaagctttctccaggacagatattttccctgtcttaaccactggtccagtcatcccagtgggcttctctttgtctctcccagattagacctttgggtgagattggcatcacaacatctaatctgagtctgtcttttgtccttcattctgtatggcagtctccctttgttataaaagctttctaaagcatactaaagaagccttcccagagccccgtcttgcttctcttccaggtgctctatcccctcgagaccctctggtgccaggcttgcttcacggccatcttgtgttgtcactgcagagtttggaggccagttttccacagcctaaacagggaggagctgcagaatggggctctggtctctgggcattcatttccctcatagaggctgagaataaaacaaggacttattcacacatgttctagaaccccagaatggcccaagttacctgagaccagggtttctcaaccttgacaccattgacattttggactgggtaattctttgttctgcagagctgtcctttgcactgtaggagatttactaatatccctggcctctacccagtagtaccactagcacctattccccacccagcgtgtctccagatattgtcaaatatcccatcgggtgcaaaatgatccctggtcaagatctgttgcccaagatgttacaggtcacaatgaccacatttgaaattgttttccctttcattttaccctgtgaaagcatctctcctagagccttgcaagaggcaggtgacattgtgtccatatttcttcctgtttcagaacttctgtttcacaacaatttctctctcgctacaagtattctttcactcagcactggggaagttgggaacagctggtcaccatcatccctttaatcaactcacacctgtttaaagagtgtttctgatttgaccttcatcccttagtttactggcgttaaaaaaagtctcagcaattttcattatttctcgtgggtctcattatcaaacctttacttatttcggcatatttcctctgggcttcttctagtttctgccttacaagcaatgctgttctgtaaatttattgaaacctctggaacatttcacctttagagatggaggatggaaggattggtaccagaagagggctaagatacgttttctgtcttgagctgaaagcacagtctactctccttcgttttgtcgatgagaaagttgaggccagaggggaggtgacatgtttagagtcacccagctggttagtgacagaaaaagcgtgagagttgtctaggattcctgccactttggtccctggcctctcctgggggaggctgctgttcttaggtgctctaagcttaatccctcagaatgtgtggacaggtcagcttagaagagatggggagattcaggatccccctgtgccagagcacagcctcaccggatgctgcttcccacactgaagtgtcctgtccgaccattgctatctgaggcatccacaagcaggtaggaaagctggcgagccattttacttcctgaggacaattccccagccacaggctctgagtcaaatttctatttggtaagcatcctagcagcaaagtcctgcactcagaccagccaaaaaacagcccccattccaagtacttggtgtcaaaagtccccgaacgacttttaaacccaagtcttcttaaggtttcagtactgtggtggctttagcagttgtttttgtgcaactataaattatttaaatcatctgagatgacagtcaattttacaaaccaggtacatattaatttgtataattttgtatatgctctggtacactacctgaactaacgaagggtagaactaattctgtttgtcagtgttcacacctgtaacattaggaggatatgtctgcattgcttatttctttatgttggtgtttctgtggcaaagccctgcacatggcatttctgaaaagccttaaatctttaagatgttgcatgtagggtatgcagtgcaaaaggctgcctcagaactgtgagcccttttgtaagctggaagcatttctcttactactgttacttttgtaggaagttttcaattcagagctgccaaagtgttcccgtaagcagtgccttagtaataccttagtcatgccgccagccttttcttacaccaattcctaatgttcatttacgaattggcccaatattggaaacaaaacaagcaaaaattgtcttcatttttgttttgtaagcccattttttctccagttctataggaaactgactgcttggtgtaaaatccgaaactggacacaagtcagttctttcaccacactcaaatgtatataccaaaacaaaaggttgcaacttcatagtttactatgaaaagcaaattgtactttttaatgttgccttttaaattcatgaccaaatacttagctatttgtgaatcttctgcactctagcatgaaagtgcctttggtttgagattccagcttagaaaagtgctgccataataacgataatttgtagagagaccaaaaatattttgagatcaccgtaatgcctttggtttaccgggatgagtaaccaaccacaggcctctgttcacaagagcacgacgtggtccccgcctgctgctagtctgtctgccactgggggcctcccaacatccatagcacacttcagcggaaggaccccagaaactgttgtgtttgtgtgtgctgatgacctagtgtgtcatttcacctcgtcacccagccctgcgtccggatgaggggacttctgcacaaatgacagaatctcggctggtggacagatactacagctttctcctcctccttgtgttcgtgttcagtctctgtggagactttcttttccattcaaatgacagtgcgcacttatctggtttacacaatgataccattttgaaagttggaagcctcaaactgagacgacagtgcagaacaaaacaaaagtgagttagggtcgttaaaattgaagtgttcttcttagggcaaacatgttgactccgagtattgtgtatgaatgtgctacgagaaacttccaaagagcaccattcacaatttggcattttcaaagaatgttccagccctcaaaggggcaactctttaaagtccttgttggcttttatccaaaccttgtagaaattgggaaagctgatagaggtaaggaagacgagtgaaaaggacaagaaggccaaacaccagccaaaaagaaactaggaaaaaaagattttctttgctaatatagatgtaaaaataacatcagacatctttgaaaattagcctctaaactcttaatacatacgttctgtgtgtctctacctggcgtctttaagaatatcctctctgggctctgaaattttaggagtgattcttatccactccaagttgtaagtatttgtagaaatttgtgcaaacaaacaaaaactatcaaatgaaaagaaaatgtactcaacctaacttatagttagcagctggaattctcaactcttccctgccagcactataccacagtgtggaagaaattagtcaaatgcttgttttcctgcttctcttttcaactgttactgtgctttgtttgaaagtagttttctctctcaaagccgttgcttatatcgttaagaatgaaggtttgtgtttaaaatttattgcattgcaaagggtagtttcactgaagtcatgcaccattaaataagatgaaatatttgtatttattgtcctacttcctaagccgtaacttcttttcctctgtgaatttgcattgagtcactcatgctacactacatcgctttagtatttgagatggcatttatgtttcctctcgtttatcatgaaatggggtcagattccatcagattccacctctgtcaggtggactcttgtctgccttccatgatgagattttttttctccttcccctttctttaagagaggctgacagatctaggtgtcaatcaattggaaaccagtctctgattttttttcattagttattttctatcattagtttcactgtgtaaattagatatcaactgcacttctttaaaaaaaaatacatctccctattacctccttgaaagatttacttctgtaggcctttttcaataggctcatgactgcagacaaggaaaaaaaaagtaaaaacaaaaacagtatgtgcctgaaaatg

SEQ ID NO: 31207 - DNA, 8477 bp, Homo sapiens
  source 1..8477: mol_type = unassigned DNA
tgagaggcttcacattctgttggaaaatggatttaatccctaaaaaaagccttgccccattgggtcttcccagtaaatgttgagaggtacggtaggttgagtgtggtttagccttctggctgtgttatttatccatgcatgtttgctttttttggcctattttgtggctctgtattttagtccatgtgctcgtggctgtgcctgtgtaacctgcctggtagccatgcgttatgtattaagttggtgtgtcactgtcaccttcaaggatcagactgcaaaggataaggccctgcagcacatggcggccatgtcctcagcccagatcgtctcggccactgccattcataacaagctggggctgcctgggattccacgcccgaccttcccaggggcgccggggttctggccgggaatgattcaaacagggcagccaggatcctcacaagacgtcaagccttttgtgcagcaggcctaccccatccagccagcggtcacagcccccattccagggtttgagcctgcatcggccccagctccctcagtccctgcctggcaaggtcgctccattggcacaaccaagcttcgcctggtggaattttcagcttttctcgagcagcagcgagacccagactcgtacaacaaacacctcttcgtgcacattgggcatgccaaccattcttacagtgacccattgcttgaatcagtggacattcgtcagatttatgacaaatttcctgaaaagaaaggtggcttaaaggaactgtttggaaagggccctcaaaatgccttcttcctcgtaaaattctgggctgatttaaactgcaatattcaagatgatgctggggctttttatggtgtaaccagtcagtacgagagttctgaaaatatgacagtcacctgttccaccaaagtttgctcctttgggaagcaagtagtagaaaaagtagagacggagtatgcaaggtttgagaatggccgatttgtataccgaataaaccgctccccaatgtgtgaatatatgatcaacttcatccacaagctcaaacacttaccagagaaatatatgatgaacagtgttttggaaaacttcacaattttattggtggtaacaaacagggatacacaagaaactctactctgcatggcctgtgtgtttgaagtttcaaatagtgaacacggagcacaacatcatatttacaggcttgtaaaggactgaacatggttatttatatatatagatatctgtatatacacacacacatatgtgcacacacacactctctctccattatcgaacgactgactgtaaacctcaccacacagggtggtgccctggccccgaggtcaccccgacttttctaaatcttgtttgagtgaagtcattttttcatgtgttcatactatcattgtagctgtgaagttctggtacagttgtaaaaagagaaattgagttgtttctctatgttcttcagatgtgcagcccacaattcctcgggaaaggtgaacctgaacaacccaagtctctctctgcagagccctgtttctaattgtggtagaaaatattgagacagagcatttgccatgggacatttacagcctttatacaaatgtatttagttctcttttttccaacataaaattcttgttttaagatacaagtaaaattaatctttaaatataaatgtaaattagtacacaaaactaagaatctttagacttatctttgtaactaattagggtggaagttatgaaagaatgtaattcactaaattattttttaaatgaaacctttttttttctttttgaaaccaaatgttaaactatagccttaagaaatgcttggtagaagtgtcctaatgagacaaatttgtacttttatcctcaaggttaacactaatctcctaatccattaaactcttgaacaggtattacaaaggaagaaaacttcaccccttatccttaacatatatagtatatttaaaaaatataaaattgtattgtactaatgtgatgatggattatttaatgaaaaagaaaaaatggctctttttgcaataagtagatacatactgaaaaaatctaaacttacaatgtttatagtcttgtgtgtgcagttatattttatatggacgaccaaattttttattaagatgagtaaatatttgaaccactgaattttaataacaaaattttaaaattggcatgaatacggaatactgcactgtgagatgcaaagtatacagaatctgtggctgggagaaaatttcatcaaatagacaagtaaaaggctcatcagttttagcatctctgctccccagaaaattgtaagcatcctcaccagcctgtggatacattctttatttctagtgacccaatatgcatattaacctgctataactagggctatatgtgtaggtatgtgtatacatatacacaaatgcacatatagagttaacacatttagtgaacacttgtttagtgtcactcagtttgctaggtgctgatatgtacgtatatctcaatgtgtctgtagacttagatacatcctcttgaagcacatccatttctttagcgtctctcagtaagttacagtacttgtttgacttaggtttaagaggcccagctacctatctctgaccttttcaaataggctcatttgggagattcttttgccaggagagattcaactttccaatctaagtattccagagcattgcccaggcagagttggtttgatgtggccagatgttttgagttatttcccttaagtgtttcactggggagagaacagggagtgctcctccagcttcccaaagaaatatgtttttgtaagtggtaggaacatgtgcacacaatagaacatgaaataagttttttaacttgtaaaacatgtcaagatttttccaccaagctagaaaataaaaaacttagttctaccacatccaattaacttacacacccccttccctgtctcaacacctgctttgaccctgcttttctattattacatcagtcagcatcttgtggtccctaacatgaggatgtggctggctcgtgggaaacagcaaaacactaagcctgacctctcccaaattgggaagaccagaggagaaagtgcaaaactgtccccatttggaatgcccattccttctagaaaccagttggacagtgctcctctgcccttcataaacagactactgttgggtccctgattccaggctggcctgtgaaggattgccccaggtgtcccctttcacggttgtcacatttacagtgacttctgttgaacacccctcttagggatgtttcttttgctcttatttcctgcatctttccttaagggaagccccatcctctcccaggaccaggagtttatgaccaggcgagcacaaatggctaaaagccaagctgtcctagaacttcagtgggagagctgtctggttcatattctacccaggaatggtacttttcagtgcagccaggagggctcttgggatttcctttccaaagcacaaaaatactgggacccaagaagaacagctagaggacaactctgttggcacagagacggggacagcccagtctgctgacctcacagggtcagctgggcccccctggtgcttcaccacctgcatcctcttgctcagaatgcctttgcagttgagttttctgggtttctatgattgaccttgaggtttactccttgctcttacaacatttctaaggatttttaaaagtttacttcttgtcttgttcttctaaagctttctccaggacagatattttccctgtcttaaccactggtccagtcatcccagtgggcttctctttgtctctcccagattagacctttgggtgagattggcatcacaacatctaatctgagtctgtcttttgtccttcattctgtatggcagtctccctttgttataaaagctttctaaagcatactaaagaagccttcccagagccccgtcttgcttctcttccaggtgctctatcccctcgagaccctctggtgccaggcttgcttcacggccatcttgtgttgtcactgcagagtttggaggccagttttccacagcctaaacagggaggagctgcagaatggggctctggtctctgggcattcatttccctcatagaggctgagaataaaacaaggacttattcacacatgttctagaaccccagaatggcccaagttacctgagaccagggtttctcaaccttgacaccattgacattttggactgggtaattctttgttctgcagagctgtcctttgcactgtaggagatttactaatatccctggcctctacccagtagtaccactagcacctattccccacccagcgtgtctccagatattgtcaaatatcccatcgggtgcaaaatgatccctggtcaagatctgttgcccaagatgttacaggtcacaatgaccacatttgaaattgttttccctttcattttaccctgtgaaagcatctctcctagagccttgcaagaggcaggtgacattgtgtccatatttcttcctgtttcagaacttctgtttcacaacaatttctctctcgctacaagtattctttcactcagcactggggaagttgggaacagctggtcaccatcatccctttaatcaactcacacctgtttaaagagtgtttctgatttgaccttcatcccttagtttactggcgttaaaaaaagtctcagcaattttcattatttctcgtgggtctcattatcaaacctttacttatttcggcatatttcctctgggcttcttctagtttctgccttacaagcaatgctgttctgtaaatttattgaaacctctggaacatttcacctttagagatggaggatggaaggattggtaccagaagagggctaagatacgttttctgtcttgagctgaaagcacagtctactctccttcgttttgtcgatgagaaagttgaggccagaggggaggtgacatgtttagagtcacccagctggttagtgacagaaaaagcgtgagagttgtctaggattcctgccactttggtccctggcctctcctgggggaggctgctgttcttaggtgctctaagcttaatccctcagaatgtgtggacaggtcagcttagaagagatggggagattcaggatccccctgtgccagagcacagcctcaccggatgctgcttcccacactgaagtgtcctgtccgaccattgctatctgaggcatccacaagcaggtaggaaagctggcgagccattttacttcctgaggacaattccccagccacaggctctgagtcaaatttctatttggtaagcatcctagcagcaaagtcctgcactcagaccagccaaaaaacagcccccattccaagtacttggtgtcaaaagtccccgaacgacttttaaacccaagtcttcttaaggtttcagtactgtggtggctttagcagttgtttttgtgcaactataaattatttaaatcatctgagatgacagtcaattttacaaaccaggtacatattaatttgtataattttgtatatgctctggtacactacctgaactaacgaagggtagaactaattctgtttgtcagtgttcacacctgtaacattaggaggatatgtctgcattgcttatttctttatgttggtgtttctgtggcaaagccctgcacatggcatttctgaaaagccttaaatctttaagatgttgcatgtagggtatgcagtgcaaaaggctgcctcagaactgtgagcccttttgtaagctggaagcatttctcttactactgttacttttgtaggaagttttcaattcagagctgccaaagtgttcccgtaagcagtgccttagtaataccttagtcatgccgccagccttttcttacaccaattcctaatgttcatttacgaattggcccaatattggaaacaaaacaagcaaaaattgtcttcatttttgttttgtaagcccattttttctccagttctataggaaactgactgcttggtgtaaaatccgaaactggacacaagtcagttctttcaccacactcaaatgtatataccaaaacaaaaggttgcaacttcatagtttactatgaaaagcaaattgtactttttaatgttgccttttaaattcatgaccaaatacttagctatttgtgaatcttctgcactctagcatgaaagtgcctttggtttgagattccagcttagaaaagtgctgccataataacgataatttgtagagagaccaaaaatattttgagatcaccgtaatgcctttggtttaccgggatgagtaaccaaccacaggcctctgttcacaagagcacgacgtggtccccgcctgctgctagtctgtctgccactgggggcctcccaacatccatagcacacttcagcggaaggaccccagaaactgttgtgtttgtgtgtgctgatgacctagtgtgtcatttcacctcgtcacccagccctgcgtccggatgaggggacttctgcacaaatgacagaatctcggctggtggacagatactacagctttctcctcctccttgtgttcgtgttcagtctctgtggagactttcttttccattcaaatgacagtgcgcacttatctggtttacacaatgataccattttgaaagttggaagcctcaaactgagacgacagtgcagaacaaaacaaaagtgagttagggtcgttaaaattgaagtgttcttcttagggcaaacatgttgactccgagtattgtgtatgaatgtgctacgagaaacttccaaagagcaccattcacaatttggcattttcaaagaatgttccagccctcaaaggggcaactctttaaagtccttgttggcttttatccaaaccttgtagaaattgggaaagctgatagaggtaaggaagacgagtgaaaaggacaagaaggccaaacaccagccaaaaagaaactaggaaaaaaagattttctttgctaatatagatgtaaaaataacatcagacatctttgaaaattagcctctaaactcttaatacatacgttctgtgtgtctctacctggcgtctttaagaatatcctctctgggctctgaaattttaggagtgattcttatccactccaagttgtaagtatttgtagaaatttgtgcaaacaaacaaaaactatcaaatgaaaagaaaatgtactcaacctaacttatagttagcagctggaattctcaactcttccctgccagcactataccacagtgtggaagaaattagtcaaatgcttgttttcctgcttctcttttcaactgttactgtgctttgtttgaaagtagttttctctctcaaagccgttgcttatatcgttaagaatgaaggtttgtgtttaaaatttattgcattgcaaagggtagtttcactgaagtcatgcaccattaaataagatgaaatatttgtatttattgtcctacttcctaagccgtaacttcttttcctctgtgaatttgcattgagtcactcatgctacactacatcgctttagtatttgagatggcatttatgtttcctctcgtttatcatgaaatggggtcagattccatcagattccacctctgtcaggtggactcttgtctgccttccatgatgagattttttttctccttcccctttctttaagagaggctgacagatctaggtgtcaatcaattggaaaccagtctctgattttttttcattagttattttctatcattagtttcactgtgtaaattagatatcaactgcacttctttaaaaaaaaatacatctccctattacctccttgaaagatttacttctgtaggcctttttcaataggctcatgactgcagacaaggaaaaaaaaagtaaaaacaaaaacagtatgtgcctgaaaatgacaaaaaaaaaatttgtaacatttaaaaaagaaacctgaatagcctttaattctttaataatacacttaaattttatgtaaatcggttttcgccacgtgtgtttgttcacattctaaatgacttaatgggattctcacggtctgtgtctttgtgtcacgtgtataaaatgggcttgtgatgtaagcgtttcatctggtcagtggttcctttgatattgtactgctgctgggagtgggctgtggaacctgccttcgggtaactgggttcctcttgggtagattggagagatgggggtgggcgtgggcaaattctcacacatgttttcttaacctatttgcagaaactttcaaaaggcatttgattaaacctcttggcagtacagtattcttgtatttgttaacgtctgtgtttaggtactggtacctttttgttttaaaatgttctaagtgttggctttaaagtgaatttatctttagtatgatagttatatgaaaattataggatttgtgtgcagagaatttttttataaagtgctttgt

SEQ ID NO: 31208 - DNA, 477 bp, Homo sapiens
  source 1..477: mol_type = unassigned DNA
gtgacgcccccccacccctccacctttgcccggagcgcgggcagcagcccagcgcgccagccggccccggggcaggagcggtgctaggcaggggtggggtggccgggcccagggaccgggagccggggagggagccgggcaccgagcagagggcgggggaagcggcgccgaagtttgcctcggactcgccgggcgctgcggtggctccctgggccgaggtttattttcttgaaaaggctccaggcttcggcttggaaaatcccaccgccaaaattgagcccagcagctggagcggcagtgagagccctgccgaaaacatggaaaggatgagtgactctgcagataagccaattgacaatgatgcagaaggggtctggagccccgacatcgagcaaagctttcaggaggccctggctatctatccaccatgtgggaggaggaaaatcatcttatcagacgaaggcaaaatgtatggta

SEQ ID NO: 31209 - DNA, 2544 bp, Homo sapiens
  source 1..2544: mol_type = unassigned DNA
ggccgcgtccaggcacaggccatgcagtgacgcccccccacccctccacctttgcccggagcgcgggcagcagcccagcgcgccagccggccccggggcaggagcggtgctaggcaggggtggggtggccgggcccagggaccgggagccggggagggagccgggcaccgagcagagggcgggggaagcggcgccgaagtttgcctcggactcgccgggcgctgcggtggctccctgggccgaggactgttgctgccgctgccgccgccgcttcattgcacattcaagtggaaaattttcaggagtcagcagaaacattgtgtccaaaaaagactgagtcgcagttaccaccaaacccaggaggagactctccctggaaaacttcccttccctttcggtttattttcttgaaaaggctccaggcttcggcttggaaaatcccaccgccaaaattgagcccagcagctggagcggcagtgagagccctgccgaaaacatggaaaggatgagtgactctgcagataagccaattgacaatgatgcagaaggggtctggagccccgacatcgagcaaagctttcaggaggccctggctatctatccaccatgtgggaggaggaaaatcatcttatcagacgaaggcaaaatgtatggtaggaatgaattgatagccagatacatcaaactcaggacaggcaagacgaggaccagaaaacaggtgtctagtcacattcaggttcttgccagaaggaaatctcgtgattttcattccaagctaaaggatcagactgcaaaggataaggccctgcagcacatggcggccatgtcctcagcccagatcgtctcggccactgccattcataacaagctggggctgcctgggattccacgcccgaccttcccaggggcgccggggttctggccgggaatgattcaaacagggcagccaggatcctcacaagacgtcaagccttttgtgcagcaggcctaccccatccagccagcggtcacagcccccattccagggtttgagcctgcatcggccccagctccctcagtccctgcctggcaaggtcgctccattggcacaaccaagcttcgcctggtggaattttcagcttttctcgagcagcagcgagacccagactcgtacaacaaacacctcttcgtgcacattgggcatgccaaccattcttacagtgacccattgcttgaatcagtggacattcgtcagatttatgacaaatttcctgaaaagaaaggtggcttaaaggaactgtttggaaagggccctcaaaatgccttcttcctcgtaaaattctgggctgatttaaactgcaatattcaagatgatgctggggctttttatggtgtaaccagtcagtacgagagttctgaaaatatgacagtcacctgttccaccaaagtttgctcctttgggaagcaagtagtagaaaaagtagagacggagtatgcaaggtttgagaatggccgatttgtataccgaataaaccgctccccaatgtgtgaatatatgatcaacttcatccacaagctcaaacacttaccagagaaatatatgatgaacagtgttttggaaaacttcacaattttattggtggtaacaaacagggatacacaagaaactctactctgcatggcctgtgtgtttgaagtttcaaatagtgaacacggagcacaacatcatatttacaggcttgtaaaggactgaacatggttatttatatatatagatatctgtatatacacacacacatatgtgcacacacacactctctctccattatcgaacgactgactgtaaacctcaccacacagggtggtgccctggccccgaggtcaccccgacttttctaaatcttgtttgagtgaagtcattttttcatgtgttcatactatcattgtagctgtgaagttctggtacagttgtaaaaagagaaattgagttgtttctctatgttcttcagatgtgcagcccacaattcctcgggaaaggtgaacctgaacaacccaagtctctctctgcagagccctgtttctaattgtggtagaaaatattgagacagagcatttgccatgggacatttacagcctttatacaaatgtatttagttctcttttttccaacataaaattcttgttttaagatacaagtaaaattaatctttaaatataaatgtaaattagtacacaaaactaagaatctttagacttatctttgtaactaattagggtggaagttatgaaagaatgtaattcactaaattattttttaaatgaaacctttttttttctttttgaaaccaaatgttaaactatagccttaagaaatgcttggtagaagtgtcctaatgagacaaatttgtacttttatcctcaaggttaacactaatctcctaatccattaaactcttgaacaggtattacaaaggaagaaaacttcaccccttatccttaacatatatagtatatttaaaaaatataaaattgtattgtactaatgtgatgatggattatttaatg

SEQ ID NO: 31210 - DNA, 2159 bp, Homo sapiens
  source 1..2159: mol_type = unassigned DNA
cccacttttcccaaacaaagctcccggcaactttctccctcgcagcgccccgcccgcccgcggctccccagccccaggccgggaggcccagatgggggaaccccgggctggggccgccctggacgatggcagcggctggacgggcagtgaggaaggcagtgaggagggtaccggcggcagtgagggggctgggggtgacgggggcccggatgcagagggggtgtggagcccagacattgagcagagcttccaggaggccctggccatctatccaccctgcggccgccggaaaataattttgtctgatgaaggcaagatgtatggtcggaatgaactgatcgcccgctacatcaagctgagaacggggaagacccgaactcgaaaacaggtttctagtcacatccaggttttggcccgaaggaaatcaagggaaatccagtccaagttgaaggaccaggtttccaaggacaaggctttccagacaatggcaaccatgtcctctgcccagctcatctccgcgccttctctgcaggccaaactgggtcccactggtcctcaggcctctgagcttttccagttttggtctggaggatctgggcccccctggaatgttccagatgtgaagccattctcacagacaccgttcaccttgtcactgactcccccatctactgacctcccagggtacgagcccccccaagccctctcacccctgcccccacctaccccatcgcccccagcctggcaggctcggggcctgggcaccgcccggttgcagctggtagagttctcagccttcgtggaaccgccagatgcagttgattcttaccagaggcacctgttcgtgcacatcagccagcactgccccagccccggagcgccgccgctcgagagtgtggacgtccggcagatctacgacaaattccctgagaaaaagggtggcctccgagagctatatgatcgtggccccccccatgccttcttcctggtcaagttctgggcggacctgaactggggcccaagtggtgaggaggcaggggccggtggcagcatcagcagtggtggcttctacggagtgagcagccagtatgagagcctggaacacatgaccctcacctgttcctccaaggtctgctcttttggcaagcaggtggtggagaaggtggagacggaacgggcccagctggaggacggcagatttgtgtaccgcctgctgcgctcgcccatgtgcgagtacctggtgaatttcttgcacaagttgcggcagctgcctgagcgatacatgatgaacagcgtcctggaaaacttcaccatcctccaggtggtgacaaacagagacacccaggaactgctgctctgcaccgcctatgtcttcgaggtctccaccagcgagcgtggggcccagcatcacatttaccgcctggtcagggactgaagggggaccccaaaactggctcaccccccagaacaccctcctcccagggagggtcctccagctcacctcatgcttcttatttggggagagggctgtgatgtaaaggggttgacctcagaggcctaagcaactggggccatcccccccattagaggggcccccaaaacttggttggagagctgaacaggctgggactgaggaaaggataaaccccgatattgggacctcacagtgggtgtctgaaaggacagatcactccggagtatcagggattgtggggacaggagtgagacaaccccccaggtacagcactggcttttcttttcagcccctgacaggccacccccactcctctgcatgtcttggagagcgctagttacacattggcttgtcccctttactttttcccagccacccctccccctgaaatttctgcccctctctaccaccctcactccatgacctgtgagatcacaaagtgaagatgaaccctttctgtgcaggagcagagccaggtgggccctggacattttttttttttttaatataacgagatatttataagtgggtgctagggtcttgactttatctccgctgcacaagcagtgtgttgaactttctaatctcatccctctcctaagtgagccctgagctagacggtttccttcctcccctctcaaagtttgtttgtttgtgttctgacagaggataaagctattttacc

SEQ ID NO: 31211 - DNA, 2440 bp, Homo sapiens
  source 1..2440: mol_type = unassigned DNA
cttctcctccctcagactcaggagtccagaccccagccccttctccctcacacccaggagtccaggcctccagcccccgctccctcagacccaggagtccaggccccagatcctcctccctcagtcctaggagtccgggccccagcccctcctccctcagactcaggagttcaggccccagatcctcctccctcagacccaggaataccccccagctcctcttccctcagacccaggagtccaggtccccagcccctcctccctcagacccagtggtccagagtcccagccctctcagcttcaagtcccttgagggtggggtttgggggaagcttgctgagttctgtgttcctccaggcccagatgggggaaccccgggctggggccgccctggacgatggcagcggctggacgggcagtgaggaaggcagtgaggagggtaccggcggcagtgagggggctgggggtgacgggggcccggatgcagagggggtgtggagcccagacattgagcagagcttccaggaggccctggccatctatccaccctgcggccgccggaaaataattttgtctgatgaaggcaagatgtatggtcggaatgaactgatcgcccgctacatcaagctgagaacggggaagacccgaactcgaaaacaggtttctagtcacatccaggttttggcccgaaggaaatcaagggaaatccagtccaagttgaaggaccaggtttccaaggacaaggctttccagacaatggcaaccatgtcctctgcccagctcatctccgcgccttctctgcaggccaaactgggtcccactggtcctcaggtggtccaggcctctgagcttttccagttttggtctggaggatctgggcccccctggaatgttccagatgtgaagccattctcacagacaccgttcaccttgtcactgactcccccatctactgacctcccagggtacgagcccccccaagccctctcacccctgcccccacctaccccatcgcccccagcctggcaggctcggggcctgggcaccgcccggttgcagctggtagagttctcagccttcgtggaaccgccagatgcagttgattcttaccagaggcacctgttcgtgcacatcagccagcactgccccagccccggagcgccgccgctcgagagtgtggacgtccggcagatctacgacaaattccctgagaaaaagggtggcctccgagagctatatgatcgtggccccccccatgccttcttcctggtcaagttctgggcggacctgaactggggcccaagtggtgaggaggcaggggccggtggcagcatcagcagtggtggcttctacggagtgagcagccagtatgagagcctggaacacatgaccctcacctgttcctccaaggtctgctcttttggcaagcaggtggtggagaaggtggagacggaacgggcccagctggaggacggcagatttgtgtaccgcctgctgcgctcgcccatgtgcgagtacctggtgaatttcttgcacaagttgcggcagctgcctgagcgatacatgatgaacagcgtcctggaaaacttcaccatcctccaggtggtgacaaacagagacacccaggaactgctgctctgcaccgcctatgtcttcgaggtctccaccagcgagcgtggggcccagcatcacatttaccgcctggtcagggactgaagggggaccccaaaactggctcaccccccagaacaccctcctcccagggagggtcctccagctcacctcatgcttcttatttggggagagggctgtgatgtaaaggggttgacctcagaggcctaagcaactggggccatcccccccattagaggggcccccaaaacttggttggagagctgaacaggctgggactgaggaaaggataaaccccgatattgggacctcacagtgggtgtctgaaaggacagatcactccggagtatcagggattgtggggacaggagtgagacaaccccccaggtacagcactggcttttcttttcagcccctgacaggccacccccactcctctgcatgtcttggagagcgctagttacacattggcttgtcccctttactttttcccagccacccctccccctgaaatttctgcccctctctaccaccctcactccatgacctgtgagatcacaaagtgaagatgaaccctttctgtgcaggagcagagccaggtgggccctggacattttttttttttttaatataacgagatatttataagtgggtgctagggtcttgactttatctccgctgcacaagcagtgtgttgaactttctaatctcatccctctcctaagtgagccctgagctagacggtttccttcctcccctctcaaagtttgtttgtttgtgttctgacagaggataaagctattttacc

SEQ ID NO: 31212 - DNA, 1444 bp, Homo sapiens
  source 1..1444: mol_type = unassigned DNA
aaagctcccggcaactttctccctcgcagcgccccgcccgcccgcggctccccagccccaggccgggaggtcggaatgaactgatcgcccgctacatcaagctgagaacggggaagacccgaactcgaaaacaggtttctagtcacatccaggttttggcccgaaggaaatcaagggaaatccagtccaagttgaaggctctgaacgtggaccaggtttccaaggacaaggctttccagacaatggcaaccatgtcctctgcccagctcatctccgcgccttctctgcaggccaaactgggtcccactggtcctcaggtggtccaggcctctgagcttttccagttttggtctggaggatctgggcccccctggaatgttccagatgtgaagccattctcacagacaccgttcaccttgtcactgactcccccatctactgacctcccagggtacgagcccccccaagccctctcacccctgcccccacctaccccatcgcccccagcctggcaggctcggggcctgggcaccgcccggttgcagctggtagagttctcagccttcgtggaaccgccagatgcagttgattcttaccagaggcacctgttcgtgcacatcagccagcactgccccagccccggagcgccgccgctcgagagtgtggacgtccggcagatctacgacaaattccctgagaaaaagggtggcctccgagagctatatgatcgtggccccccccatgccttcttcctggtcaagttctgggcggacctgaactggggcccaagtggtgaggaggcaggggccggtggcagcatcagcagtggtggcttctacggagtgagcagccagtatgagagcctggaacacatgaccctcacctgttcctccaaggtctgctcttttggcaagcaggtggtggagaaggtggagacggaacgggcccagctggaggacggcagatttgtgtaccgcctgctgcgctcgcccatgtgcgagtacctggtgaatttcttgcacaagttgcggcagctgcctgagcgatacatgatgaacagcgtcctggaaaacttcaccatcctccaggtggtgacaaacagagacacccaggaactgctgctctgcaccgcctatgtcttcgaggtctccaccagcgagcgtggggcccagcatcacatttaccgcctggtcagggactgaagggggaccccaaaactggctcaccccccagaacaccctcctcccagggagggtcctccagctcacctcatgcttcttatttggggagagggctgtgatgtaaaggggttgacctcagaggcctaagcaactggggccatcccccccattagaggggcccccaaaacttggttggagagctgaacaggctgggactgaggaaaggataaaccccgatattgggacctcacagtgggtgtctg

SEQ ID NO: 31213 - DNA, 2141 bp, Homo sapiens
  source 1..2141: mol_type = unassigned DNA
aggccgggaggtaggaaggcgccggcgggagtcggggatcctgctttggggcccagatgggggaaccccgggctggggccgccctggacgatggcagcggctggacgggcagtgaggaaggcagtgaggagggtaccggcggcagtgagggggctgggggtgacgggggcccggatgcagagggggtgtggagcccagacattgagcagagcttccaggaggccctggccatctatccaccctgcggccgccggaaaataattttgtctgatgaaggcaagatgtatggtcggaatgaactgatcgcccgctacatcaagctgagaacggggaagacccgaactcgaaaacaggtttctagtcacatccaggttttggcccgaaggaaatcaagggaaatccagtccaagttgaaggctctgaacgtggaccaggtttccaaggacaaggctttccagacaatggcaaccatgtcctctgcccagctcatctccgcgccttctctgcaggccaaactgggtcccactggtcctcaggcctctgagcttttccagttttggtctggaggatctgggcccccctggaatgttccagatgtgaagccattctcacagacaccgttcaccttgtcactgactcccccatctactgacctcccagggtacgagcccccccaagccctctcacccctgcccccacctaccccatcgcccccagcctggcaggctcggggcctgggcaccgcccggttgcagctggtagagttctcagccttcgtggaaccgccagatgcagttgattcttaccagaggcacctgttcgtgcacatcagccagcactgccccagccccggagcgccgccgctcgagagtgtggacgtccggcagatctacgacaaattccctgagaaaaagggtggcctccgagagctatatgatcgtggccccccccatgccttcttcctggtcaagttctgggcggacctgaactggggcccaagtggtgaggaggcaggggccggtggcagcatcagcagtggtggcttctacggagtgagcagccagtatgagagcctggaacacatgaccctcacctgttcctccaaggtctgctcttttggcaagcaggtggtggagaaggtggagacggaacgggcccagctggaggacggcagatttgtgtaccgcctgctgcgctcgcccatgtgcgagtacctggtgaatttcttgcacaagttgcggcagctgcctgagcgatacatgatgaacagcgtcctggaaaacttcaccatcctccaggtggtgacaaacagagacacccaggaactgctgctctgcaccgcctatgtcttcgaggtctccaccagcgagcgtggggcccagcatcacatttaccgcctggtcagggactgaagggggaccccaaaactggctcaccccccagaacaccctcctcccagggagggtcctccagctcacctcatgcttcttatttggggagagggctgtgatgtaaaggggttgacctcagaggcctaagcaactggggccatcccccccattagaggggcccccaaaacttggttggagagctgaacaggctgggactgaggaaaggataaaccccgatattgggacctcacagtgggtgtctgaaaggacagatcactccggagtatcagggattgtggggacaggagtgagacaaccccccaggtacagcactggcttttcttttcagcccctgacaggccacccccactcctctgcatgtcttggagagcgctagttacacattggcttgtcccctttactttttcccagccacccctccccctgaaatttctgcccctctctaccaccctcactccatgacctgtgagatcacaaagtgaagatgaaccctttctgtgcaggagcagagccaggtgggccctggacattttttttttttttaatataacgagatatttataagtgggtgctagggtcttgactttatctccgctgcacaagcagtgtgttgaactttctaatctcatccctctcctaagtgagccctgagctagacggtttccttcctcccctctcaaagtttgtttgtttgtgttctgacagaggataaagctattttaccaaaaa

SEQ ID NO: 31214 - DNA, 2191 bp, Homo sapiens
  source 1..2191: mol_type = unassigned DNA
tgatggcagggcgcccctgtcccccagcttgtggttctgtgggtctctcctggtctcggcctcagctgctgccctgagtctctgtccctgccctttctaggcccagatgggggaaccccgggctggggccgccctggacgatggcagcggctggacgggcagtgaggaaggcagtgaggagggtaccggcggcagtgagggggctgggggtgacgggggcccggatgcagagggggtgtggagcccagacattgagcagagcttccaggaggccctggccatctatccaccctgcggccgccggaaaataattttgtctgatgaaggcaagatgtatggtcggaatgaactgatcgcccgctacatcaagctgagaacggggaagacccgaactcgaaaacaggtttctagtcacatccaggttttggcccgaaggaaatcaagggaaatccagtccaagttgaaggctctgaacgtggaccaggtttccaaggacaaggctttccagacaatggcaaccatgtcctctgcccagctcatctccgcgccttctctgcaggccaaactgggtcccactggtcctcaggcctctgagcttttccagttttggtctggaggatctgggcccccctggaatgttccagatgtgaagccattctcacagacaccgttcaccttgtcactgactcccccatctactgacctcccagggtacgagcccccccaagccctctcacccctgcccccacctaccccatcgcccccagcctggcaggctcggggcctgggcaccgcccggttgcagctggtagagttctcagccttcgtggaaccgccagatgcagttgattcttaccagaggcacctgttcgtgcacatcagccagcactgccccagccccggagcgccgccgctcgagagtgtggacgtccggcagatctacgacaaattccctgagaaaaagggtggcctccgagagctatatgatcgtggccccccccatgccttcttcctggtcaagttctgggcggacctgaactggggcccaagtggtgaggaggcaggggccggtggcagcatcagcagtggtggcttctacggagtgagcagccagtatgagagcctggaacacatgaccctcacctgttcctccaaggtctgctcttttggcaagcaggtggtggagaaggtggagacggaacgggcccagctggaggacggcagatttgtgtaccgcctgctgcgctcgcccatgtgcgagtacctggtgaatttcttgcacaagttgcggcagctgcctgagcgatacatgatgaacagcgtcctggaaaacttcaccatcctccaggtggtgacaaacagagacacccaggaactgctgctctgcaccgcctatgtcttcgaggtctccaccagcgagcgtggggcccagcatcacatttaccgcctggtcagggactgaagggggaccccaaaactggctcaccccccagaacaccctcctcccagggagggtcctccagctcacctcatgcttcttatttggggagagggctgtgatgtaaaggggttgacctcagaggcctaagcaactggggccatcccccccattagaggggcccccaaaacttggttggagagctgaacaggctgggactgaggaaaggataaaccccgatattgggacctcacagtgggtgtctgaaaggacagatcactccggagtatcagggattgtggggacaggagtgagacaaccccccaggtacagcactggcttttcttttcagcccctgacaggccacccccactcctctgcatgtcttggagagcgctagttacacattggcttgtcccctttactttttcccagccacccctccccctgaaatttctgcccctctctaccaccctcactccatgacctgtgagatcacaaagtgaagatgaaccctttctgtgcaggagcagagccaggtgggccctggacattttttttttttttaatataacgagatatttataagtgggtgctagggtcttgactttatctccgctgcacaagcagtgtgttgaactttctaatctcatccctctcctaagtgagccctgagctagacggtttccttcctcccctctcaaagtttgtttgtttgtgttctgacagaggataaagctattttaccaaaaa

SEQ ID NO: 31215 - DNA, 2167 bp, Homo sapiens
  source 1..2167: mol_type = unassigned DNA
cgcccgcccgcggctccccagccccaggccgggaggtaggaaggcgccggcgggagtcggggatcctgctttggggtgtgcccagatgggggaaccccgggctggggccgccctggacgatggcagcggctggacgggcagtgaggaaggcagtgaggagggtaccggcggcagtgagggggctgggggtgacgggggcccggatgcagagggggtgtggagcccagacattgagcagagcttccaggaggccctggccatctatccaccctgcggccgccggaaaataattttgtctgatgaaggcaagatgtatggtcggaatgaactgatcgcccgctacatcaagctgagaacggggaagacccgaactcgaaaacaggtttctagtcacatccaggttttggcccgaaggaaatcaagggaaatccagtccaagttgaaggaccaggtttccaaggacaaggctttccagacaatggcaaccatgtcctctgcccagctcatctccgcgccttctctgcaggccaaactgggtcccactggtcctcaggtggtccaggcctctgagcttttccagttttggtctggaggatctgggcccccctggaatgttccagatgtgaagccattctcacagacaccgttcaccttgtcactgactcccccatctactgacctcccagggtacgagcccccccaagccctctcacccctgcccccacctaccccatcgcccccagcctggcaggctcggggcctgggcaccgcccggttgcagctggtagagttctcagccttcgtggaaccgccagatgcagttgattcttaccagaggcacctgttcgtgcacatcagccagcactgccccagccccggagcgccgccgctcgagagtgtggacgtccggcagatctacgacaaattccctgagaaaaagggtggcctccgagagctatatgatcgtggccccccccatgccttcttcctggtcaagttctgggcggacctgaactggggcccaagtggtgaggaggcaggggccggtggcagcatcagcagtggtggcttctacggagtgagcagccagtatgagagcctggaacacatgaccctcacctgttcctccaaggtctgctcttttggcaagcaggtggtggagaaggtggagacggaacgggcccagctggaggacggcagatttgtgtaccgcctgctgcgctcgcccatgtgcgagtacctggtgaatttcttgcacaagttgcggcagctgcctgagcgatacatgatgaacagcgtcctggaaaacttcaccatcctccaggtggtgacaaacagagacacccaggaactgctgctctgcaccgcctatgtcttcgaggtctccaccagcgagcgtggggcccagcatcacatttaccgcctggtcagggactgaagggggaccccaaaactggctcaccccccagaacaccctcctcccagggagggtcctccagctcacctcatgcttcttatttggggagagggctgtgatgtaaaggggttgacctcagaggcctaagcaactggggccatcccccccattagaggggcccccaaaacttggttggagagctgaacaggctgggactgaggaaaggataaaccccgatattgggacctcacagtgggtgtctgaaaggacagatcactccggagtatcagggattgtggggacaggagtgagacaaccccccaggtacagcactggcttttcttttcagcccctgacaggccacccccactcctctgcatgtcttggagagcgctagttacacattggcttgtcccctttactttttcccagccacccctccccctgaaatttctgcccctctctaccaccctcactccatgacctgtgagatcacaaagtgaagatgaaccctttctgtgcaggagcagagccaggtgggccctggacattttttttttttttaatataacgagatatttataagtgggtgctagggtcttgactttatctccgctgcacaagcagtgtgttgaactttctaatctcatccctctcctaagtgagccctgagctagacggtttccttcctcccctctcaaagtttgtttgtttgtgttctgacagaggataaagctattttaccaaaaa

SEQ ID NO: 31216 - DNA, 2983 bp, Homo sapiens
  source 1..2983: mol_type = unassigned DNA
acaaactttccgtcccgctcgctccctcctccgcgctcggcgcctcccgctccagcccggctcattccgcacattccggccagccccctccccacgaccccccttccccggccccccttgcggctccctcgggcccggcggagcggcccggccggagcgcccccgcgagctcggaccaggctcagccgcccagtgggctcaggcccagagcccagagcaaccagcacaatagcgtccaacagctggaacgccagcagcagccccggggaggcccgggaggatgggcccgagggcctggacaaggggctggacaacgatgcggagggcgtgtggagcccggacatcgagcagagcttccaggaggccctggccatctacccgccctgcggccggcggaagatcatcctgtcagacgagggcaagatgtacggccgaaatgagttgattgcacgctatattaaactgaggacggggaagactcggacgagaaaacaggtgtccagccacatacaggttctagctcggaagaaggtgcgggagtaccaggttggcatcaaggccatgaacctggaccaggtctccaaggacaaagcccttcagagcatggcgtccatgtcctctgcccagatcgtctctgccagtgtcctgcagaacaagttcagcccaccttcccctctgccccaggccgtcttctccacttcctcgcggttctggagcagcccccctctcctgggacagcagcctggaccctctcaggacatcaagccctttgcacagccagcctaccccatccagccgcccctgccgccgacgctcagcagttatgagcccctggccccgctcccctcagctgctgcctctgtgcctgtgtggcaggaccgtaccattgcctcctcccggctgcggctcctggagtattcagccttcatggaggtgcagcgagaccctgacacgtacagcaaacacctgtttgtgcacatcggccagacgaaccccgccttctcagacccacccctggaggcagtagatgtgcgccagatctatgacaaattccccgagaaaaagggaggattgaaggagctctatgagaaggggccccctaatgccttcttccttgtcaagttctgggccgacctcaacagcaccatccaggagggcccgggagccttctatggggtcagctctcagtacagctctgctgatagcatgaccatcagcgtctccaccaaggtgtgctcctttggcaaacaggtggtagagaaggtggagactgagtatgccaggctggagaacgggcgctttgtgtaccgtatccaccgctcgcccatgtgcgagtacatgatcaacttcatccacaagctgaagcacctgcccgagaagtacatgatgaacagcgtgctggagaacttcaccatcctgcaggtggtcacgagccgggactcccaggagaccctgcttgtcattgcttttgtcttcgaagtctccaccagtgagcacggggcccagcaccatgtctacaagctcgtcaaagactagggtgccctctgcgcctccttaaggatgcagggtgagcatctcctctccacacctgcctggcacccctgggggggtccaggattgaggattcatctacctgccaggcctcaggcccaggacccaggaggcctccccacctaccccagcacacacactccctgccactgttctgcgctttaattgtgggagaagagaggagaggagggctcagcggtggggcagcctgtccggggcgctgacccaccatcaccctgctctgcccagcctcgcgtgacctcagagaggtggggataggggacaccttcagcctccagcatgtgtggccactgtacccccacccacccttgggggagcatgatgggcaggtgagggcaggatggagaccaagggagtcagtgagcagaggccctgggagtgtccggttggggttggactgaggacagaggggcccacacttccttgcccctttgtgtcccaggcctggtgcccagactccttgcatggcttgtgtggtcctcagactccgcacagcgagcgtaggtctctgggtttcagatgaagtgcccaggctccaggaagttgagggacccacaggagaggtgggcagagctggagttctcatccagggctgcttgtccccagagcccaggtttatactacctccctggggcgggggctggccgcagggtaggggagaggctctgcagtgtggagtggagcctcatcgaggggcgctgggttaggggagcacctgtttcagactgggcatgaagaagggagcacagcagctactagaccccattagcacctcattagcccacaagccagccaggggccccaggaagatggggcaccccccagcaccctccagattgagagcaaggtagaggaaggagtcccagcctctgggcagaccagaggcccagagggagagagtagcagaaggcttttgatttttctcttgcctgaggcttgaatctgacaaacccttggtgggcactgctcccttaggttcttccccacctcaatctacctgcctagagtagcagctcccagacccagttctgggactgaaggttaacccttcacctgctgtcccttcttaacacccaggcccccagagccagctgggcctgtccagcagccacctgtgggtatttatgagtttcatatgaagtactgtgccccttcccttcctcatcccgaccctgcccgagcttcctgaaggtcctcactgtttgcatatcgctcaggccacctccaaaccccacctaggttttataatgtatattatatatttttttgtgtatttttaaaatccagctgtgatgggttatatcataaatgcagcttggggttggagcaggggccctcaaaggcccagctcctgctcaaaaaaaaaaaaaaaaaaaaattaaagttatttgtttgtgggtcagtcatgtaa

SEQ ID NO: 31217 - DNA, 2989 bp, Homo sapiens
  source 1..2989: mol_type = unassigned DNA
tcctcaacacaaactttccgtcccgctcgctccctcctccgcgctcggcgcctcccgctccagcccggctcattccgcacattccggccagccccctccccacgaccccccttccccggccccccttgcggctccctcgggcccggcggagcggcccggccggagcgcccccgcgagctcggaccaggctcagccgcccagtgggctcaggcccagagcccagagcaaccagcacaatagcgtccaacagctggaacgccagcagcagccccggggaggcccgggaggatgggcccgagggcctggacaaggggctggacaacgatgcggagggcgtgtggagcccggacatcgagcagagcttccaggaggccctggccatctacccgccctgcggccggcggaagatcatcctgtcagacgagggcaagatgtacggccgaaatgagttgattgcacgctatattaaactgaggacggggaagactcggacgagaaaacaggtctctagccacttgcaagttctagccaggcggaaatctcgggagattcagtctaagctgaagtcctctccccaggaccaggtctccaaggacaaagcccttcagagcatggcgtccatgtcctctgcccagatcgtctctgccagtgtcctgcagaacaagttcagcccaccttcccctctgccccaggccgtcttctccacttcctcgcggttctggagcagcccccctctcctgggacagcagcctggaccctctcaggacatcaagccctttgcacagccagcctaccccatccagccgcccctgccgccgacgctcagcagttatgagcccctggccccgctcccctcagctgctgcctctgtgcctgtgtggcaggaccgtaccattgcctcctcccggctgcggctcctggagtattcagccttcatggaggtgcagcgagaccctgacacgtacagcaaacacctgtttgtgcacatcggccagacgaaccccgccttctcagacccacccctggaggcagtagatgtgcgccagatctatgacaaattccccgagaaaaagggaggattgaaggagctctatgagaaggggccccctaatgccttcttccttgtcaagttctgggccgacctcaacagcaccatccaggagggcccgggagccttctatggggtcagctctcagtacagctctgctgatagcatgaccatcagcgtctccaccaaggtgtgctcctttggcaaacaggtggtagagaaggtggagactgagtatgccaggctggagaacgggcgctttgtgtaccgtatccaccgctcgcccatgtgcgagtacatgatcaacttcatccacaagctgaagcacctgcccgagaagtacatgatgaacagcgtgctggagaacttcaccatcctgcaggtggtcacgagccgggactcccaggagaccctgcttgtcattgcttttgtcttcgaagtctccaccagtgagcacggggcccagcaccatgtctacaagctcgtcaaagactagggtgccctctgcgcctccttaaggatgcagggtgagcatctcctctccacacctgcctggcacccctgggggggtccaggattgaggattcatctacctgccaggcctcaggcccaggacccaggaggcctccccacctaccccagcacacacactccctgccactgttctgcgctttaattgtgggagaagagaggagaggagggctcagcggtggggcagcctgtccggggcgctgacccaccatcaccctgctctgcccagcctcgcgtgacctcagagaggtggggataggggacaccttcagcctccagcatgtgtggccactgtacccccacccacccttgggggagcatgatgggcaggtgagggcaggatggagaccaagggagtcagtgagcagaggccctgggagtgtccggttggggttggactgaggacagaggggcccacacttccttgcccctttgtgtcccaggcctggtgcccagactccttgcatggcttgtgtggtcctcagactccgcacagcgagcgtaggtctctgggtttcagatgaagtgcccaggctccaggaagttgagggacccacaggagaggtgggcagagctggagttctcatccagggctgcttgtccccagagcccaggtttatactacctccctggggcgggggctggccgcagggtaggggagaggctctgcagtgtggagtggagcctcatcgaggggcgctgggttaggggagcacctgtttcagactgggcatgaagaagggagcacagcagctactagaccccattagcacctcattagcccacaagccagccaggggccccaggaagatggggcaccccccagcaccctccagattgagagcaaggtagaggaaggagtcccagcctctgggcagaccagaggcccagagggagagagtagcagaaggcttttgatttttctcttgcctgaggcttgaatctgacaaacccttggtgggcactgctcccttaggttcttccccacctcaatctacctgcctagagtagcagctcccagacccagttctgggactgaaggttaacccttcacctgctgtcccttcttaacacccaggcccccagagccagctgggcctgtccagcagccacctgtgggtatttatgagtttcatatgaagtactgtgccccttcccttcctcatcccgaccctgcccgagcttcctgaaggtcctcactgtttgcatatcgctcaggccacctccaaaccccacctaggttttataatgtatattatatatttttttgtgtatttttaaaatccagctgtgatgggttatatcataaatgcagcttggggttggagcaggggccctcaaaggcccagctcctgctcaaaaaaaaaaaaaaaaaaaaattaaagttatttgtttgtgggtcagtcatgt

SEQ ID NO: 31218 - DNA, 1637 bp, Homo sapiens
  source 1..1637: mol_type = unassigned DNA
gtggccccgccgccactccctccggctccctccctcccgccgcggcgcgcatctcattccagccctcattccgcgcattccagcgtcctcctcgcacactcgaggccagggggcgggagggccgcagctccggcgccgccgcgtcccgccagaacgatcgccgcggccggaagagttggcgctcggggcggactccttggaactggcttagcgcacccatcccaccttcccgcaccctgggaccggtccaacgagcgctcctccaagcggagccttggagggcacggccggcaccattacctccaacgagtggagctctcccacctcccctgaggggagcaccgcctctgggggcagtcaggcactggacaagcccatcgacaatgacgcagagggcgtgtggagcccggatattgagcagagtttccaggaggccctcgccatctacccgccctgtggcaggcgcaaaatcatcctgtcggacgagggcaagatgtatggtcggaacgagctgattgcccgctacatcaagctccggacagggaagacccgcaccaggaagcaggtctccagccacatccaggtgctggctcgtcgcaaagctcgcgagatccaggccaagctaaagttttggcaaggagctttgccaggccaagccggaacgtcccatgatgtgaagcctttctctcagcaaacctatgctgtccagcctccgctgcctctgccagggtttgagtctcctgcagggcccgccccatcgccctctgcgcccccggcacccccatggcagggccgcagcgtggccagctccaagctctggatgttggagttctctgccttcctggagcagcagcaggacccggacacgtacaacaagcacctgttcgtgcacattggccagtccagcccaagctacagcgacccctacctcgaagccgtggacatccgccaaatctatgacaaattcccggagaaaaagggtggactcaaggatctcttcgaacggggaccctccaatgccttttttcttgtgaagttctgggcagacctcaacaccaacatcgaggatgaaggcagctccttctatggggtctccagccagtatgagagccccgagaacatgatcatcacctgctccacgaaggtctgctctttcggcaagcaggtggtggagaaagttgagacagagtatgctcgctatgagaatggacactactcttaccgcatccaccggtccccgctctgtgagtacatgatcaacttcatccacaagctcaagcacctccctgagaagtacatgatgaacagcgtgctggagaacttcaccatcctgcaggtggtcaccaacagagacacacaggagaccttgctgtgcattgcctatgtctttgaggtgtcagccagtgagcacggggctcagcaccacatctacaggctggtgaaagaatgagagactcggggagcagggaggggggaagagacgtgtgtgcaggaaacggggacgtggggaggggacctgcaggggcagccccctgaagtgccaagagagctgagaggagcagttgtgactctacccaggaacaaactgtgcctgaacctgaggtgcccaaccccaaataaacccaagatgctgtgta

SEQ ID NO: 31219 - DNA, 1690 bp, Homo sapiens
  source 1..1690: mol_type = unassigned DNA
gtcctcctcgcacactcgaggccagggggcgggagggccgcagctccggcgccgccgcgtcccgccagaacgatcgccgcggccggaagagttggcgctcggggcggactccttggaactggcttagcgcacccatcccaccttcccgcaccctgggaccggtccaacgagcgctcctccaagcggagccttggagggcacggccggcaccattacctccaacgagtggagctctcccacctcccctgaggggagcaccgcctctgggggcagtcaggcactggacaagcccatcgacaatgacgcagagggcgtgtggagcccggatattgagcagagtttccaggaggccctcgccatctacccgccctgtggcaggcgcaaaatcatcctgtcggacgagggcaagatgtatggtcggaacgagctgattgcccgctacatcaagctccggacagggaagacccgcaccaggaagcaggtctccagccacatccaggtgctggctcgtcgcaaagctcgcgagatccaggccaagctaaaggaccaggcagctaaggacaaggccctgcagagcatggctgccatgtcgtctgcacagatcatctccgccacggccttccacagtagcatggccctcgcccggggccccggccgcccagcagtctcagggttttggcaaggagctttgccaggccaagccggaacgtcccatgatgtgaagcctttctctcagcaaacctatgctgtccagcctccgctgcctctgccagggtttgagtctcctgcagggcccgccccatcgccctctgcgcccccggcacccccatggcagggccgcagcgtggccagctccaagctctggatgttggagttctctgccttcctggagcagcagcaggacccggacacgtacaacaagcacctgttcgtgcacattggccagtccagcccaagctacagcgacccctacctcgaagccgtggacatccgccaaatctatgacaaattcccggagaaaaagggtggactcaaggatctcttcgaacggggaccctccaatgccttttttcttgtgaagttctgggcagacctcaacaccaacatcgaggatgaaggcagctccttctatggggtctccagccagtatgagagccccgagaacatgatcatcacctgctccacgaaggtctgctctttcggcaagcaggtggtggagaaagttgagacagagtatgctcgctatgagaatggacactactcttaccgcatccaccggtccccgctctgtgagtacatgatcaacttcatccacaagctcaagcacctccctgagaagtacatgatgaacagcgtgctggagaacttcaccatcctgcaggtggtcaccaacagagacacacaggagaccttgctgtgcattgcctatgtctttgaggtgtcagccagtgagcacggggctcagcaccacatctacaggctggtgaaagaatgagagactcggggagcagggaggggggaagagacgtgtgtgcaggaaacggggacgtggggaggggacctgcaggggcagccccctgaagtgccaagagagctgagaggagcagttgtgactctacccaggaacaaactgtgcctgaacctgaggtgcccaaccccaaataaacccaagatgctgtgtattttcaga

SEQ ID NO: 31220 - DNA, 1396 bp, Homo sapiens
  source 1..1396: mol_type = unassigned DNA
tctgcgcgctgacgccctgtcgtccccgcagaacgatcgccgcggccggaagagttggcgctcggggcggactccttggaactggcttagcgcacccatcccaccttcccgcaccctgggaccggtcggaacgagctgattgcccgctacatcaagctccggacagggaagacccgcaccaggaagcaggtctccagccacatccaggtgctggctcgtcgcaaagctcgcgagatccaggccaagctaaaggaccaggcagctaaggacaaggccctgcagagcatggctgccatgtcgtctgcacagatcatctccgccacggccttccacagtagcatggccctcgcccggggccccggccgcccagcagtctcagggttttggcaaggagctttgccaggccaagccggaacgtcccatgatgtgaagcctttctctcagcaaacctatgctgtccagcctccgctgcctctgccagggtttgagtctcctgcagggcccgccccatcgccctctgcgcccccggcacccccatggcagggccgcagcgtggccagctccaagctctggatgttggagttctctgccttcctggagcagcagcaggacccggacacgtacaacaagcacctgttcgtgcacattggccagtccagcccaagctacagcgacccctacctcgaagccgtggacatccgccaaatctatgacaaattcccggagaaaaagggtggactcaaggatctcttcgaacggggaccctccaatgccttttttcttgtgaagttctgggcagacctcaacaccaacatcgaggatgaaggcagctccttctatggggtctccagccagtatgagagccccgagaacatgatcatcacctgctccacgaaggtctgctctttcggcaagcaggtggtggagaaagttgagacagagtatgctcgctatgagaatggacactactcttaccgcatccaccggtccccgctctgtgagtacatgatcaacttcatccacaagctcaagcacctccctgagaagtacatgatgaacagcgtgctggagaacttcaccatcctgcaggtggtcaccaacagagacacacaggagaccttgctgtgcattgcctatgtctttgaggtgtcagccagtgagcacggggctcagcaccacatctacaggctggtgaaagaatgagagactcggggagcagggaggggggaagagacgtgtgtgcaggaaacggggacgtggggaggggacctgcaggggcagccccctgaagtgccaagagagctgagaggagcagttgtgactctacccaggaacaaactgtgcctgaacctgaggtgcccaaccccaaataaacccaagatgctgtgtattttca

SEQ ID NO: 31221 - DNA, 570 bp, Homo sapiens
  source 1..570: mol_type = unassigned DNA
ttccagcgtcctcctcgcacactcgaggccagggggcgggagggccgcagctccggcgccgccgcgtcccgccagaacgatcgccgcggccggaagagttggcgctcggggcggactccttggaactggcttagcgcacccatcccaccttcccgcaccctgggaccggtaaggctggggcgcggggacttggtaggactttgccggagggcaggagtctgcgcggtgcgtgcggagctccctcccgggacgagactgggaagagcgaggcacgtggaggcggcgcgactgaggctgctggaggcgaagcggctccaggggcgggtccaacgagcgctcctccaagcggagccttggagggcacggccggcaccattacctccaacgagtggagctctcccacctcccctgaggggagcaccgcctctgggggcagtcaggcactggacaagcccatcgacaatgacgcagagggcgtgtggagcccggatattgagcagagtttccaggaggccctcgccatctacccgccctgtggcaggcgcaaaatcatcctgtcggacgagggca

SEQ ID NO: 31222 - DNA, 578 bp, Homo sapiens
  source 1..578: mol_type = unassigned DNA
attccagcgtcctcctcgcacactcgaggccagggggcgggagggccgcagctccggcgccgccgcgtcccgccagaacgatcgccgcggccggaagagttggcgctcggggcggactccttggaactggcttagcgcacccatcccaccttcccgcaccctgggaccggtaaggctggggcgcggggacttggtaggactttgccggagggcaggagtctgcgcggtgcgtgcggagctccctcccgggacgagactgggaagagcgaggcacgtggaggcggcgcgactgaggctgctggaggcgaagcggctccaggggcgggtaaggggggtggacactcgggactttgggggaaagggaggccggtgtggaaaggaccggagaggcagaaccgagagcatcggcaacagaagagacccagcacccatgcctcttttctgctgggcccttttcgagcctggaagggagagacctggaggtccaacgagcgctcctccaagcggagccttggagggcacggccggcaccattacctccaacgagtggagctctcccacctcccctgaggggagca

SEQ ID NO: 31223 - DNA, 801 bp, Homo sapiens
  source 1..801: mol_type = unassigned DNA
cctccctccgcgcgctccgctccgctccgctgggcgcaccggggccggtcggcgcggggtgggcttggccccgcggccccgccttcactgcgccgcccgtcggccccggccggagcccggctctgcgcgctgacgccctgtcgtccccgcagaacgatcgccgcggccggaagagttggcgctcggggcggactccttggaactggcttagcgcacccatcccaccttcccgcaccctgggaccggtccaacgagcgctcctccaagcggagccttggagggcacggccggcaccattacctccaacgagtggagctctcccacctcccctgaggggagcaccgcctctgggggcagtcaggcactggacaagcccatcgacaatgacgcagagggcgtgtggagcccggatattgagcagagtttccaggaggccctcgccatctacccgccctgtggcaggcgcaaaatcatcctgtcggacgagggcaagatgtatggtcggaacgagctgattgcccgctacatcaagctccggacagggaagacccgcaccaggaagcaggtctccagccacatccaggtgctggctcgtcgcaaagctcgcgagatccaggccaagctaaaggaccaggcagctaaggacaaggccctgcagagcatggctgccatgtcgtctgcacagatcatctccgccacggccttccacagtagcatggccctcgcccggggccccggccgcccagcagtctcagggttttggcaaggagctttgccaggccaagccggaacgtcccatga

SEQ ID NO: 31224 - DNA, 4992 bp, Homo sapiens
  source 1..4992: mol_type = unassigned DNA
aaaaactgaagcaggaaaagcagctcgatgtgtctgtctatcagttgagactgtctgaaagctctgcgatccgaatgtgtgttatatttcactgaaaagaggagagagcgagagtgcatctccctctctcccaggagtttgagggggggggggacagtccacgctcatctcgcccacccagtgaatgtctgctcttcaccccctttgcacacactctccgggttgttgttgccttttttttttcttggaggggggggtgctttttgtgtatttttcaaatttttttctgttggaagatcaagaccggccaaaaatccatgatcaaaatgtgtttgcattagatttcgcattggaagaagcggcgatcctggcggccaagccccccgggtggaagcgcggggcaccaagtggcgctccggcggggtgacactgtttgatctgtgactgtttggaaggtggagcagcgcctgacatctccccccggcgcatcttatgttcctgaggaagaattgaaggcagcagaaatagatgaagagcacgtggaggatgacgggctgtctttggacattcaggaaagtgagtacatgtgcaatgaagagacggagatcaaagaggcgcagagctaccagaactccccagtcagctctgcgactaaccaggacgccggctacgggtcgcccttcagtgagagcagcgaccagctagcccatttcaaaggctcttcctctcgagaagagaaggaggatccgcagtgtcccgacagcgtctcgtacccccaggacagcctggcacagatcaaagctgtgtatgcaaacttgttctccgagtcctgctggtccagcttagctctggatttaaagaagtcgggttccaccaccagcaccaacgatgccagccagaaggagagctccgcccccacccccacaccccccacctgccccgtcagcaccactggccccaccacgagcacgcccagcaccagctgcagctccagcaccagccacagcagtaccaccagtaccagcagcagctccgggtacgactggcaccaggctgcactggccaagacgctgcagcagacgtcctcgtatgggctgcttcctgagcccagcctgttcagcaccgtgcagctctaccgccagaacaacaagctctacggctccgtcttcacgggcgccagcaagttccggtgcaaagactgcagtgccgcgtacgacacgctggtggaactgacggtgcacatgaacgagacaggccactaccgtgacgacaacagggacaaggactccgagaagaccaagaggtggtccaagcccaggaagcgctccctgatggagatggaggggaaggaggatgcccagaaggtgctgaagtgcatgtactgtggacactcctttgagtccttgcaggacctcagcgtccacatgatcaaaaccaagcattaccagaaagtgcctctgaaggagccagtgccagccatcaccaaactggtcccctccaccaaaaagcgggcgcttcaggacctggcgcccccctgctcccctgagccagcaggaatggccgcagaggtggccctgagtgagtcagccaaggatcagaaagcagcgaacccgtacgtcacgcccaataaccgctatggctaccagaatggcgccagctacacctggcagtttgaggcccgcaaggcgcagatcctcaagtgcatggagtgtggcagctcccacgacacgctgcagcagctcaccgcccacatgatggtcaccgggcacttcctgaaagtgaccacctcggcttctaagaagggcaagcagttggtgctggaccctgtggtggaagagaagatccagtccatcccactaccgcccaccacccacacgcggctgccggcctccagcatcaaaaagcagcccgactctcccgcggggtccacgacttctgaagaaaagaaagagccagagaaggagaagccgcctgtggctggcgacgcggagaagatcaaggaggagagtgaggacagcttggagaaatttgagcccagcaccctgtacccgtacctgcgtgaggaggacctggacgacagccccaagggagggctggacattctcaagtccctggagaataccgtctccacggccattagcaaagctcagaatggtgcgccctcatggggtggctaccccagcatccatgcagcctaccagctcccgggcaccgtgaagccactgccggcggccgtgcagagcgtgcaggtgcagccgtcctatgctggcggcgtgaagtcgctgtcttccgccgagcacaacgccctcctgcactccccagggagcctcacgcccccaccgcacaagagcaacgtgtctgccatggaggagctggtggagaaggtcacgggcaaggtcaacatcaagaaggaggagagaccccctgagaaggagaagagctccctggccaaggctgcgtcccccatagcaaaagagaataaagatttcccgaaaacggaggaagtcagcggcaaaccacagaagaagggccctgaggccgagactgggaaggccaaaaaggagggaccgctggacgttcacaccccaaatggcacagagcctctcaaagcaaaggtcaccaacggctgtaacaacctggggatcatcatggaccactcaccggagccttccttcatcaacccgctgagcgctttgcagtccatcatgaacacccacctgggcaaggtgtccaagcccgtgagtccctcgctggacccgctggcgatgctgtacaagatcagcaacagcatgctggacaagccggtgtaccccgccacccctgtgaagcaggccgatgccatcgaccgctactattatgaaaacagcgaccagcccattgacttaaccaagtccaagaacaagccgctggtgtccagcgtggctgattcggtggcatcacctctgcgggagagcgcactcatggacatctccgacatggtgaaaaacctcacaggccgcctgacgcccaagtcctccacgccctccacagtttcagagaagtccgatgctgatggcagcagctttgaggaggcgttggacgagctgtcaccggtccacaagaggaagggccggcagtccaactggaacccgcagcaccttctcatcctgcaggcccagttcgcctcgagcttgcgggagaccacagagggcaagtacatcatgtcggacttgggcccgcaggagagggtgcacatctcgaagtttactgggctctccatgaccaccatcagccactggctggccaatgtgaagtaccagttgaggaggacagggggaacgaaattcctaaagaacctggacacagggcatcctgttttcttttgcaacgattgtgcctctcagttcagaactgcttctacatacataagtcatttggagacacacttgggcttcagcctgaaggatctctccaagctgccactcaatcagattcaagaacagcagaatgtttcgaaagtcctcaccaacaaaactctgggcccactgggggccaccgaggaagacttgggctccacattccaatgtaagctctgcaaccggacttttgcgagcaagcacgcagtcaaactgcaccttagtaagacccacggcaagtctcccgaggaccacctgatctatgtgactgagttggagaaacagtagcgtccaggtatgcaagagaccgcggaacattgcactaaacgtcgtcgagctgcactaggcctggcctgagcctctgaaatcagtctttcctttgttgctggcccgcctctctggaccttggttttcttacacatattttgtatatttatatgctctctgtccgatctgtgcatgttatttttctttttccgtgagtcaaagtctgacctttattttcaacatctgttcttggtgttaagctatcttttgtaggaaatagtggggcacactactcagagacattatttagcagtaaagaaagacacaaataacaatgataaaaagacatcctaaaatggtgaagttgccatgacaataaaggtcatagaacctggtagtgtcaaatttaaccctttgaggactgtaattgcatttctgtgcctttcacttgaaaaaaaaaaaagaagaaaaaaaggcttaaaggcatttcattcagatcaaaagctgtgtcagacacaaaacttatttaataattaaaaaatgagcttttatatgcagaactggtttgtgaggaaacatgcatgcagctgtgggaagatagaaagctgtctaggactcacggggttcggaagccacacctctacatgtctaaaacaaaaaacaacaacaacagataccccactcgccactatgcccaaaccctctggatgctgaaaaatgccactttcggcaaaaaaaaaagtatgcaagctattatttaaaaatgtgtaaaaatgctatttcttttttcctgtaaaatattgcagtttatagttatttacaaatgtaagctttggtacaagctgacctttctatagcgtgctgcattggtaaatgaaaaaaaatggggcaaacgttggagtcctttccttgtaaattgccagcatcagcttaaaaactcctgtatgttacatatcgtaccattttaatctcttcaactttctttgtaccttctggctgtatgctttctcttttaactttttatattgtcattttatattaaatttctgtgtatataatgtaaaaccacaatttttgaataaaatttagttcctgcagcttgatttaaatagaggacttttactggcacctgcatctctccagatgcatgtactcagagggactgtcagacaaaaataaatacataaaaacaaagcaagcaatgcactattaattatacattttgatgttctatcattaatattgtacagtacattttggttcacacaattaaatccactgttttctcagatgtaaaataaacccacatgcagttcttgatttacacgga

SEQ ID NO: 31225 - DNA, 551 bp, Homo sapiens
  source 1..551: mol_type = unassigned DNA
gaccaggccggctttctccagtgcggttgggccggaaccccgggatggtaaaaaagaaaaatgcatggaggagttgaactccacattggtatttttagaagttggatgcgggaaatagccagtgccacctgaagctgtggaaacaaacaggagcttggactttgcaggcatacctctttttaaagtgaagacattttcaggaacccctggatttttaaggcttatgttcctgaggaagaattgaaggcagcagaaatagatgaagagcacgtggaggatgacgggctgtctttggacattcaggaaagtgagtacatgtgcaatgaagagacggagatcaaagaggcgcagagctaccagaactccccagtcagctctgcgactaaccaggacgccggctacgggtcgcccttcagtgagagcagcgaccagctagcccatttcaaaggctcttcctctcgagaagagaaggaggatccgcagtgtcccgacagcgtctcgtacccccaggacagcctggcacagatcaaagctgtgtatgcaaacttgtt

SEQ ID NO: 31226 - DNA, 512 bp, Homo sapiens
  source 1..512: mol_type = unassigned DNA
agcccgcgttagccatctacatactgaatcggatgtgcacttccaaatttgagatgtaggcatttctgcctcaacttgctagctgcgattttaaaagcttatgttcctgaggaagaattgaaggcagcagaaatagatgaagagcacgtggaggatgacgggctgtctttggacattcaggaaagtgagtacatgtgcaatgaagagacggagatcaaagaggcgcagagctaccagaactccccagtcagctctgcgactaaccaggacgccggctacgggtcgcccttcagtgagagcagcgaccagctagcccatttcaaaggctcttcctctcgagaagagaaggaggatccgcagtgtcccgacagcgtctcgtacccccaggacagcctggcacagatcaaagctgtgtatgcaaacttgttctccgagtcctgctggtccagcttagctctggatttaaagaagtcgggttccaccaccagcaccaacgatgccagccagaagga

SEQ ID NO: 31227 - DNA, 3468 bp, Homo sapiens
  source 1..3468: mol_type = unassigned DNA
atttatttttctagaacacacccgacatgtaggctctattgcaatacatctgaaaacacaaaatctgtttgctccaaaattggtgatagcctctgacttaagatgatggtggccaggcgaggtggttcaagcctgtgattccagcactttgggaggccgaggcaggcagatcagatcatgaggtcaggagttcaagaccagcctggccaacatggtgaaacctcaggaggctgaggcaggagaattccttgaactgggacccaggaggcagaggttgcagtgagctgagatcacgccactgcactccagctggggatacagagcaagactccatctcaaaaaaagaaaaaaaagaaagaaaagatgatggctgctgcgttgctccattatacaggctacgcccaggaggaacagctgaaagaagaggaggaaataaaagaagaggaggaggaggaggacagcggttcagtagctcaactgcagggtggcaatgacacagggacggacgaggagctagaaacgggcccagagcaaaaaggctgcttcagctaccagaactctccaggaagtcatttgtccaatcaggatgccgagaacgagtctctgctgagtgacgccagtgatcaggtgtcggacatcaagagtgtctgcggcagagatgcctcagacaagaaagcacacactcacgtcaggcttccaaacgaagcacacaattgcatggataaaatgaccgctgtctacgccaacatcctgtcggattcctactggtcaggcctgggccttggcttcaagctgtccaatagtgagaggaggaactgtgacacccgaaacggcagcaacaagagtgattttgattggcaccaagacgctctgtccaaaagcctgcagcagaacttgccttctcggtccgtctcgaaacccagcctgttcagctcggtgcagttgtaccgacagagcagcaagatgtgcgggactgtgttcacaggggccagcagattccgatgccgacagtgcagcgcggcctatgacaccctagtcgagctgactgtgcacatgaatgaaacgggccactatcaagatgacaaccgcaaaaaggacaagctcagacccacgagctattcaaagcccaggaaaagggctttccaggatatggacaaagaggatgctcaaaaggttctgaaatgtatgttttgtggcgactcctttgattccctccaagatttgagcgtccacatgattaaaacaaaacattaccaaaaagtgcctttgaaggagccagtcccaaccatttcctcgaaaatggtcaccccggctaagaaacgcgtttttgatgtcaatcggccgtgttcccccgattcaaccacaggatcttttgcagattctttttcttctcagaagaacgccaacttgcagttgtcctccaacaaccgctatggctaccaaaatggagccagctacacctggcagtttgaggcctgcaagtcccagatcttaaagtgcatggagtgtgggagctcccatgacaccttgcagcagctcaccacccacatgatggtcacaggtcactttctcaaggtcaccagctctgcctccaagaaagggaagcagctggtattagacccgttagcagtggagaaaatgcagtcgttgtctgaggccccaaacagtgattctctggctcccaagccatccagtaactcagcatcagattgtacagcctctacaactgagttaaagaaagagagtaaaaaagaaaggccagaggaaaccagcaaggatgagaaagtcgtgaaaagcgaggactatgaagatcctctacaaaaacctttagaccctacaatcaaatatcaatacctaagggaggaagacttggaagatggctcaaagggtggaggggacattttgaaatctttggaaaatactgtcaccacagccatcaacaaagcccaaaacggggcccccagctggagtgcctaccccagcatccacgcagcctaccagctgtctgagggcaccaagccgcctttgcctatgggatcccaggtactgcagatccggcctaatctcaccaacaagctgaggcccattgcaccaaagtggaaagtgatgccactggtttctatgcccacacacctggccccttacactcaagtcaagaaagagtcagaagacaaagatgaagcggtgaaggagtgtgggaaagaaagtccccacgaagaggcctcatctttcagccacagtgagggcgattctttccgcaaaagtgaaacacctccagaagccaaaaagaccgagctgggtcccctgaaggaggaggagaagctgatgaaagagggcagcgagaaggagaaaccccagcccctggagcccacatctgctctgagcaatgggtgcgccctcgccaaccacgccccggccctgccatgcatcaacccactcagcgccctgcagtccgtcctgaacaatcacttgggcaaagccacggagcccttgcgctcaccttcctgctccagcccaagttcaagcacaatttccatgttccacaagtcgaatctcaatgtcatggacaagccggtcttgagtcctgcctccacaaggtcagccagcgtgtccaggcgctacctgtttgagaacagcgatcagcccattgacctgaccaagtccaaaagcaagaaagccgagtcctcgcaagcacaatcttgtatgtccccacctcagaagcacgctctgtctgacatcgccgacatggtcaaagtcctccccaaagccaccaccccaaagccagcctcctcctccagggtcccccccatgaagctggaaatggatgtcaggcgctttgaggatgtctccagtgaagtctcaactttgcataaaagaaaaggccggcagtccaactggaatcctcagcatcttctgattctacaagcccagtttgcctcgagcctcttccagacatcagagggcaaatacctgctgtctgatctgggcccacaagagcgtatgcaaatctctaagtttacgggactctcaatgaccactatcagtcactggctggccaacgtcaagtaccagcttaggaaaacgggcgggacaaaatttctgaaaaacatggacaaaggccaccccatcttttattgcagtgactgtgcctcccagttcagaaccccttctacctacatcagtcacttagaatctcacctgggtttccaaatgaaggacatgacccgcttgtcagtggaccagcaaagcaaggtggagcaagagatctcccgggtatcgtcggctcagaggtctccagaaacaatagctgccgaagaggacacagactctaaattcaagtgtaagttgtgctgtcggacatttgtgagcaaacatgcggtaaaactccacctaagcaaaacgcacagcaagtcacccgaacaccattcacagtttgtaacagacgtggatgaagaatagctctgcagg

SEQ ID NO: 31228 - DNA, 7935 bp, Homo sapiens
  source 1..7935: mol_type = unassigned DNA
gtgtgtgtgtgcgagggtgtgtgtgtgtgtttgtgtgtgtgtgcatatgtggggggtgtgagtgtgtgtgtgcgaggaagcgggggtgcgtgcgcgtgtgagtgcgtgtgtgagtgtctgtgtgtgtgtctgtgtgtgtgtgtgagtgagtgaattccagattttctgtctttccaaaacccgctcctgtcctctcgcatatcactcacagacggggatctgacagcagccacaaacctacagtgagtgatcgctctccccccggcacgaatccgccatagagatcggcgaggaggaggaggaggaggaggaagaaaagaaggaggaggtggaggaggaggtggaggaggaggaggaggagggaaagaggagaaggaagaagaagaaaaagaagaaacccactaccttcccaggattgccttttttttttccttatctttacgcgcgagtgtgcctgtggcgcgtgtgcgcccctcgtcccttccatccgaacccgggcttggatgtttaataaagaaatcaagtgtctcaacagtcaccaaaaaaaaaaaaaaccgcaaaaacaaaaccaaaaaaattccaaaagcaaaaacaaaaaagagagaggaaaaaaaattcaaaataaacaaacaaacaaacaaggcagaaccaacctctacttcaaagcagccggcacaagccacccgtgtctgccacccagagaggggggtctctggcccgtggtggaggagttgcaggggggatcgtcagggggacagaggccgagtgacgtcctaggagccaccgggcaagaggcggaggagacccagagaggccagagagacagcgggccccagcgcgcggctcggggctggggcgccagaagtgggactggagcgaagtagaggatgccgaggagaaaacagcaggcacccaagcgggcggcaggctacgcccaggaggaacagctgaaagaagaggaggaaataaaagaagaggaggaggaggaggacagcggttcagtagctcaactgcagggtggcaatgacacagggacggacgaggagctagaaacgggcccagagcaaaaaggctgcttcagctaccagaactctccaggaagtcatttgtccaatcaggatgccgagaacgagtctctgctgagtgacgccagtgatcaggtgtcggacatcaagagtgtctgcggcagagatgcctcagacaagaaagcacacactcacgtcaggcttccaaacgaagcacacaattgcatggataaaatgaccgctgtctacgccaacatcctgtcggattcctactggtcaggcctgggccttggcttcaagctgtccaatagtgagaggaggaactgtgacacccgaaacggcagcaacaagagtgattttgattggcaccaagacgctctgtccaaaagcctgcagcagaacttgccttctcggtccgtctcgaaacccagcctgttcagctcggtgcagttgtaccgacagagcagcaagatgtgcgggactgtgttcacaggggccagcagattccgatgccgacagtgcagcgcggcctatgacaccctagtcgagctgactgtgcacatgaatgaaacgggccactatcaagatgacaaccgcaaaaaggacaagctcagacccacgagctattcaaagcccaggaaaagggctttccaggatatggacaaagaggatgctcaaaaggttctgaaatgtatgttttgtggcgactcctttgattccctccaagatttgagcgtccacatgattaaaacaaaacattaccaaaaagtgcctttgaaggagccagtcccaaccatttcctcgaaaatggtcaccccggctaagaaacgcgtttttgatgtcaatcggccgtgttcccccgattcaaccacaggatcttttgcagattctttttcttctcagaagaacgccaacttgcagttgtcctccaacaaccgctatggctaccaaaatggagccagctacacctggcagtttgaggcctgcaagtcccagatcttaaagtgcatggagtgtgggagctcccatgacaccttgcagcagctcaccacccacatgatggtcacaggtcactttctcaaggtcaccagctctgcctccaagaaagggaagcagctggtattagacccgttagcagtggagaaaatgcagtcgttgtctgaggccccaaacagtgattctctggctcccaagccatccagtaactcagcatcagattgtacagcctctacaactgagttaaagaaagagagtaaaaaagaaaggccagaggaaaccagcaaggatgagaaagtcgtgaaaagcgaggactatgaagatcctctacaaaaacctttagaccctacaatcaaatatcaatacctaagggaggaagacttggaagatggctcaaagggtggaggggacattttgaaatctttggaaaatactgtcaccacagccatcaacaaagcccaaaacggggcccccagctggagtgcctaccccagcatccacgcagcctaccagctgtctgagggcaccaagccgcctttgcctatgggatcccaggtactgcagatccggcctaatctcaccaacaagctgaggcccattgcaccaaagtggaaagtgatgccactggtttctatgcccacacacctggccccttacactcaagtcaagaaagagtcagaagacaaagatgaagcggtgaaggagtgtgggaaagaaagtccccacgaagaggcctcatctttcagccacagtgagggcgattctttccgcaaaagtgaaacacctccagaagccaaaaagaccgagctgggtcccctgaaggaggaggagaagctgatgaaagagggcagcgagaaggagaaaccccagcccctggagcccacatctgctctgagcaatgggtgcgccctcgccaaccacgccccggccctgccatgcatcaacccactcagcgccctgcagtccgtcctgaacaatcacttgggcaaagccacggagcccttgcgctcaccttcctgctccagcccaagttcaagcacaatttccatgttccacaagtcgaatctcaatgtcatggacaagccggtcttgagtcctgcctccacaaggtcagccagcgtgtccaggcgctacctgtttgagaacagcgatcagcccattgacctgaccaagtccaaaagcaagaaagccgagtcctcgcaagcacaatcttgtatgtccccacctcagaagcacgctctgtctgacatcgccgacatggtcaaagtcctccccaaagccaccaccccaaagccagcctcctcctccagggtcccccccatgaagctggaaatggatgtcaggcgctttgaggatgtctccagtgaagtctcaactttgcataaaagaaaaggccggcagtccaactggaatcctcagcatcttctgattctacaagcccagtttgcctcgagcctcttccagacatcagagggcaaatacctgctgtctgatctgggcccacaagagcgtatgcaaatctctaagtttacgggactctcaatgaccactatcagtcactggctggccaacgtcaagtaccagcttaggaaaacgggcgggacaaaatttctgaaaaacatggacaaaggccaccccatcttttattgcagtgactgtgcctcccagttcagaaccccttctacctacatcagtcacttagaatctcacctgggtttccaaatgaaggacatgacccgcttgtcagtggaccagcaaagcaaggtggagcaagagatctcccgggtatcgtcggctcagaggtctccagaaacaatagctgccgaagaggacacagactctaaattcaagtgtaagttgtgctgtcggacatttgtgagcaaacatgcggtaaaactccacctaagcaaaacgcacagcaagtcacccgaacaccattcacagtttgtaacagacgtggatgaagaatagctctgcaggacgaatgccttagtttccactttccagcctggatcccctcacactgaacccttcttcgttgcaccatcctgcttctgacattgaactcattgaactcctcctgacaccctggctctgagaagactgccaaaaaaaaaaaaaaaaaaaaatcaccccagccatttctcttcatcctcactaacaatttggtaatgaagtattgatttccacttctctgcttatgggcggtattagattttcattgataaattgcaatggggctgtctcgtctccacagtacccttttcactgtcacaagaaaacaaagtgccaccgaagaaaagtaatgactgagagcattgatgtacttattttgtcagtttgtaacaggaaagtgggggggagtctaagtcttcatagtctaatgtccaagtgggttgcactagatgtagacacttggaggcttacttttcatggtaatgtccatttcctatttataacccctctgggaacgtttgtctaaaggaaatgtttctgttcagtgtaacaattacagttgcacctggattgcccagtcctgcccctgcactaggggaccattaatcactgcaaagtagaagaattattaagttaaaccagagtttgagccaagaaaacccctgaacaatgttcatcttctgtgaaacttgctcaaatagttaagcttaaccatgttgctgccaaagacttttcctatgcagtggtggggcaccttgatcatcatcattatcttgattggctgaaaaaaaaatagttttaagcacacaccactgtctatgagaactgcaaattgggagaataggtgaaatgcagaatctgagagaacgcgagaagatgagatcattacagggtggaaagttctgcagcagccttttctggtaatccctttctgcagaacctgatgtttatgggctctaaaacgcagcttagctttagaagcaacagaaagcatgaaatagggtgtccattttaaatgtgttcctgcaacttttttcattaaaactttgagggcccaattttaatttgtggaatattcccgttaataatgagatctaattaagacatccattaaaagcccgttaaagttaatttaacgtaaaaattccaatagaactgtattagattttctccattaaattaacgttatggatttttaacggatgtcttaattatacgttattattaacgggaatactgtattacacagattaaaatcaggtcctaagtcaacttggaagagctaagagcatgttttaatattaaaagtcttgcatacctagtgcacagtttggagacgcaaggatagatctgtttactctagttgaacattttctatacaattgaaagcaacctataatagataaatccatcattgcatttaaacaatgaatttccttattctcaaaggacaaatacgtctggattatgtggtaaattgctactcagctatggtgaaatatttatactattctaggcacaacactaggaactaggtgattctgaaacaaaaggaatattttctgttgttgctttaattaccaaggttatttttttttaatctcaacactgacaaaatgaaaccaaatatctcttcctcaccatttctcaaggaggctgcctgttggaattgttttggaaattttgacatgatccctaaattcaacattgggattaaaaaaaaaaaaaaacttcttatttacctcctagggaaagtgttgcccttatgccacatataatagcaaattgctttttttatggcatgcataacctagatgggaaaaaatatggcgcttcggggaaggagggaaaaagtaaatgaagttccaggaatgtcattctgaagtaatgaggcatggacagaaaatatacccctcacatcatcggattgagatggcagtcgaaatagcttcattgaagtgtcagcactcatccatcaatcaatcacccacaaggaaaaatagcaacagtacaacggggtggcttttatgggatttactcatgggcatagggaatagcggctcaaatgtagttctgacatgaaaagcaaggtgctgatattattttttatgatgggaggatcataaagtgaattgagaacagtgaggtctgtctttgcttaacctattcaaccagaaatgaatggagctcgactggaaaggaacagtcttcagatgggttaagattgaagggtggactggactctactgagcaccgtccttcaacaaggaaattctattaaaggaaaatcaatgcattagtattggggttctcgtagctgttaaaaattgtctgctccaatccagggttattaggccaaagttacataattcagatctcactgcaaccatccaaaagtggattctcgagcccttgctccaatggggggaggagatcaatacaattcccaattccatggaaattgtttcccttctaaggaagaaaaaataaatcatctgcttcaacatataatcgatatggttttgttagcgtaatttctatggtgggtggggtgggaggtgagagaaaaaaatattgataaatttggtaagacaggtgaattgccgcctggcaaccgtgcatgtcactgccgagggatggctgctaaggttcaccttagaaaacaagatctgggctggcactggggcatacatcaccactcagcatattcctagaggccaggcctgtcttcactcagccagccctctgaggcttctagaaacttctttctggaggaaaaaaactaaataacataaactcaggagaatgtctttacccaccttcataccactgctttctttttgctgaataaaacacagttctgataagtaagaactttagaattggaaaggaggctgacatgcaaatataatgcaaattaccctcaagtatcgccattcttccaccacctcttggtaccagtgagagcgagagattgccttttcttccccatccctccttccagctaagaccaccaaccagctgcaaattgagatgtccatttaaaaatttatatgtcaatatttaaatgttacatatttggccctattttgtagttcagcaaatcctccaaatacacagcatgttacaaggcactggtggcacagggcacaacaggaaatgatatttatttagcaaattcatttaacaaatattattgggcacctgttatgtgagacactgtcctaggcactgtgggataacaacagcaaacacttcacacaacagcctggccttcctgtgttttacaacagctcctaaagatagctgatatcaagacatttgagggacacagttcatgtagaatcaaaatattagtatttcagaataaggattttttttctgaaaagcatacagagaggaaacagcttaaaaataggtcaagacctaaaaacagaatataatcacggaataaactggataacccagacagtccccacagaatttctttcaggtcacagatttcttaaaactcacccccaaaatgtgcctgcttggttgtttgaatcttgcataattaatgtcacaggcgcaagccgctgaacttagttgagatgcagaaaacaaacaaatgcaatgacatatctgagaagcatttatgtaactccggttaagtggtgaggaggggtgtgtgaagacagtgtgcatgcatgagtgtgtattcatatatatgtgtatacatatgaatttcactgttattttccagggtctatggacaatgtggcagtaagagtctatgatgttctgaaacttttcacagtaaatccaaagattacagaccttacaaggtgcttgcattctgttgcttttccatctgtcacttctcaggttatttgactgtgttcaaaccttcttttctttttcattgagtttcattttttaagcttgttaaatgcttttgtttaaaaaaaaaaaaaaa

SEQ ID NO: 31229 - DNA, 5176 bp, Homo sapiens
  source 1..5176: mol_type = unassigned DNA
cttcccattccgccggcagcgcggtcctcctcctcctcctccacctcctcctcctctgcctcctcctcccccccgtgctcctccctccccgagcctccctcgcccgccctccttcttccctccgcacgttcggggttcgcggcggagcgcggcgcgggggggacgcggagagcctgggcgcagcagcatcctgcgggcggccgctctccgggggggaggctgagagcaggcccgcctcgcccccccgcgggcccgccgccccctccctccctgtcctcagcccggcagcggcggcggcggcggcagtggcagtcgccggagaagcatcatgccgaggaggaagcagcaggcgccccggcgcgcagcagcctatgtttccgaagagttaaaggctgctgccctggtggacgaaggtttagacccagaggagcatacggcagatggagagccctcggccaagtacatgtgcccggagaaggagctcgccagggcctgccccagctaccagaactccccggccgccgagttttcctgccatgaaatggacagcgagtcacacatcagtgagaccagtgaccgaatggctgactttgaaagcggctccatcaagaacgaagaggagaccaaggaggtcacggtcccactggaagacacgactgtgtcggatagcctggagcagatgaaggccgtgtacaacaacttcctctccaactcctactggtccaacctcaacctcaacctgcaccagccctcctcggagaagaacaacggcagcagcagcagcagcagtagcagcagcagcagctgtggcagcgggagcttcgactggcaccagagcgccatggctaagacgctgcagcaggtgtcacagagccgcatgctcccggagcccagcctcttcagcaccgtgcagctgtaccggcagagcagcaagctctatggctccatcttcacgggggccagcaagttccgctgtaaggactgcagcgctgcctacgacaccctggtggagttgacggtgcacatgaacgagacggggcattaccgcgacgacaaccatgagaccgataacaacaaccccaagcgctggtccaagcctcgcaaacgctccttgctggaaatggaagggaaggaagacgcccagaaggtgctgaagtgcatgtactgtggccactcctttgagtccctgcaggatttgagtgtccatatgatcaaaacaaaacactaccaaaaagtgcctctgaaggaacccgtcactcctgtcgccgccaaaatcatccctgccactcggaagaaagcttccctggagctggagctccccagctccccagattccacaggtggaacccccaaagccaccatctcagacaccaacgatgcacttcagaagaactccaacccttacatcacgccaaataatcggtacggccaccagaatggggccagctatgcatggcactttgaggcccggaagtcgcagatcctgaagtgcatggagtgtgggagctcgcatgacaccctgcaggagctcactgcccacatgatggtcactggccacttcatcaaggtcaccaactctgctatgaaaaaggggaagcccattgtggagacgcctgtcacacctaccatcacaaccctgctggatgagaaggtccagtccgtgcccctggcagccaccaccttcacgtccccctccaatacacctgccagcatctccccaaaactgaatgtggaggtcaagaaggaagtcgacaaggagaaagcggtcactgacgagaaacctaagcaaaaagacaagcctggcgaagaagaggagaagtgtgacatctcttccaaataccattacttgactgaaaatgacttagaagagagtcccaagggggggcttgatatcctcaaatccttggaaaacacagtgacatccgcaatcaacaaggcccagaacggcactcctagctgggggggctatcccagcatccatgccgcctaccaacttcccaacatgatgaagttgtccctgggctcgtcggggaagagcacgcccctgaaacccatgtttggcaacagtgagattgtctccccgacgaaaaaccagaccctggtctctccacccagcagccagacgtcccccatgcccaagacaaactttcatgccatggaggagctggtgaaaaaggtcactgagaaagttgccaaagtggaggagaagatgaaggagccggatgggaagctttccccgcccaagcgggccactccctccccatgtagcagcgaagtcggggaacccatcaagatggaggcatccagcgatgggggcttccgcagccaggagaacagccccagccccccgcgggatgggtgcaaggatgggagccccctcgctgagccggtggagaatggcaaggagctggtgaagcccctagccagcagtttgagtggcagcacggccatcatcaccgaccacccgcctgaacagccttttgttaaccctttgagcgccctgcagtcagtcatgaacattcacctgggcaaggccgccaagccctccctgcctgccctggaccccatgagcatgcttttcaagatgagcaacagcctggcggagaaggctgctgtggccaccccgccgcccctgcagtccaagaaggcagaccacctcgaccgctatttctaccacgtcaacaacgaccagcccatagacttgacaaaagggaagagtgacaaaggctgctccttgggttcagtgcttctgtcacccacgtccacagccccggcaacctcctcatccacggtgacaacggcaaagacatctgccgtcgtatcattcatgtcaaactcgccgctacgcgagaatgccttgtcagatatatccgatatgctgaagaacttgacagagagccacacgtcaaaatcctccactccttccagcatctccgagaagtctgacattgacggggccactctggaggaggctgaggagtcgacgcccgcccagaagaggaagggccgccagtcaaactggaacccccagcacctcctgatcctccaggcccagtttgccgccagcctccggcagacctcagaagggaagtacatcatgtcagacctgagcccccaggagcggatgcatatctccaggttcaccgggctgtccatgaccaccatcagccactggctggccaacgtgaaataccagcttcgaaggacaggtggaacaaagttcctcaaaaacttggacactggccaccccgtcttcttttgtaacgattgtgcgtcccaaatcaggactccttccacgtacatcagtcacctagagtcacacttaggcttccggctacgggacttatccaaactgtccaccgaacagattaacagtcagatagcacaaaccaagtcaccgtcagaaaaaatggtgacgtcctcccccgaggaagacctggggacttcctatcagtgcaaactttgcaatcggacctttgccagcaagcacgctgttaaacttcaccttagcaaaacacacgggaaatctccggaagaccaccttctgtatgtctctgagttagagaagcagtagcatttgcttttgatagaaaggactgcagtttgctttgagggaaactgtggaaggcaccttcaggccccctctgacttgttgttcttggcacatgttcttattttaactgcagagaatcactctgggctggactgttttgtataactgtacagtgtttaatagaggtgcataatcagctgttgttactggtaaaatatgaaggttaaaatgcagtggtaagtgtttggaactttgtgtaaacgggatttagttgtgagcatcctcccgatgcttcaagctgcatgcattaacagacagtttaattaagcatttataacggaatcaggcacaccttttccacgagactcgagtgtgctggcatttctcaccctttcatctttagccctctgagtactttgaagcacttttgcattaatttggttaaaaaataaaataaaataataataatgtatgaagctctgttttttaaactccttaccagcttagttataatgaataatatgaacctccatttatgcaggtctgcaggggtataacacgccttgaaatttaaaagaatattattttcacattgaaacatagatgtatatattgtatagatttcagactctcttatgaaaaaaaatgtgattgtggttaaatgacctttttcttgcatttatagcaacagtgttttatgcacctgctatgctctgggcataagctgtgcctatgtatagtgtatatttctttttttcttttttttaaggtctatgggttttgttttttacatgcaaacattgtaaattatacagaagataccacagatagcatttataaagtatacagaaacattatctgaaagcaaagtatgatagtttgttttgctatacagtacatctatattgatagaggttcatgtttaaattatacatatttattagcatcatattgtcatttgttttgagcagtctgaataaacgagaccgggaaagacatccctggcaggcatcagaactattttgcacatgatttttaaaggtatttattagaaatcaaagaacactcaaaataaactcagtgctcaaagggttaagtctatttgaaaaggttaaaaaaaagaacaaaaaaaaaaaaagaacttgtactgtatttcctaaacattgataaagcctttaaaatgtttgtactgtaatactttgcttaaaagtcatgaggcattctgtgatccaacctctttcacttatttataagccctcttggttgctattccatattgtaggatgcctttctatttcaattggtaactttctgttttgttcttcctaattattctcccaagatcccacactgcagctttatctttaggcttatgaaaggtaacccgtggttaccggctctccaagtgattctgttcttctccatttttggcagttaatttgcagaagtaactgacagctgacaccatatgagaacctttgtataaaatattggcatgtaaacagcacagacaccgtaacacactctgtgccctgtttggttgttgacaatgaagcaccattatgtgactcttcatataacccttttttctacggcagcattaaaattgtctttttgctataa

SEQ ID NO: 31230 - DNA, 3687 bp, Homo sapiens
  source 1..3687: mol_type = unassigned DNA
gggcggggcggggcgctttgctctggactctggggcgctaggctccggactccgcggcgcagactgcacctcgcagtctccccaggtccgcccagcagccgcgcttcagccagaatactgggatcttcagtggcaggaggagtaatcagaagacggagatgaattttaacactattttggaggagattcttattaaaaggtcacagcagaaaaagaagacatcgcccttaaactacaaagagagactttttgtacttacaaagtccatgctaacctactatgagggtcgagcagagaagaaatacagaaaggggtttattgatgtttcaaaaatcaagtgtgtggaaatagtgaagaatgatgatggtgtcattccctgtcaaaataagtatccatttcaggttgttcatgatgctaacacactttacatttttgcacctagtccacaaagcagggacctgtgggtgaagaagttaaaagaagaaataaagaacaacaataatattatgattaaatatcatcctaaattctggacagatggaagttatcagtgttgtagacaaactgaaaaattagcacccggatgtgaaaaatacaatctttttgagagcagtataagaaaagcactacctccagcaccagaaacaaagaagcgaaggcctcccccaccaattccactagaagaagaagataatagtgaagaaatcgttgtagccatgtatgatttccaagcagcagaaggacatgatctcagattagagagaggccaagagtatctcattttagaaaagaatgatgttcattggtggagagcaagagataaatatgggaatgaaggatatatcccaagtaattacgtaacgggaaagaaatcaaacaacttagatcaatatgaatggtattgcagaaatatgaatagaagcaaggcagagcaactcctccgcagtgaagataaagaaggtggttttatggtaagggattccagtcaaccaggcttgtacacagtctccctttataccaagtttggaggagaaggttcatcgggttttaggcattatcatataaaggaaacaacaacatctccaaagaagtattacctagctgaaaaacatgcttttggctccattcctgagattattgaatatcataagcacaatgcagcaggacttgtcaccaggcttcggtacccagttagtgtgaaagggaagaatgcacccaccactgcaggattcagctatgagaaatgggagattaacccttcagaactgacctttatgagggaattgggaagtggactgtttggagtggtgaggcttggcaaatggcgagcccagtacaaagtcgcaatcaaagctattcgggaaggtgcaatgtgcgaggaggactttatagaagaagctaaagtgatgatgaaactgacacacccgaagttagtgcagctttatggtgtgtgcacccagcagaaaccaatatacattgttactgagttcatggaaaggggctgccttctgaatttcctccgacagagacaaggtcatttcagtagagacgtactgctgagcatgtgtcaggatgtgtgtgaagggatggagtatctggagagaaacagcttcatccacagagatctggctgccagaaattgtctagtaagtgaggcgggagttgtaaaagtatctgattttggaatggccaggtatgttctggatgatcagtacacaagttcttctggtgctaagtttcctgtgaagtggtgtccacctgaagtgtttaattacagccgcttcagcagcaaatcagatgtctggtcatttggtgttttaatgtgggaagtattcacggaaggcagaatgccttttgaaaaatacaccaattatgaagtggtaaccatggttactcgaggccaccgactctaccagccgaagttggcgtccaactatgtgtatgaggtgatgctgagatgttggcaggagaaaccagagggaaggccttctttcgaagatctgctgcgcacaatagatgaactagttgaatgtgaagaaacttttggaagataagtgatgtgtgaccagtggctcccagattcccaagcacaaggaaggatgggcattttgtggcttttaatttattgagcacttggacatgtagatcattttacttatacagtggaaacacataaataatttgcttctagaccagcctctgtctagacttgcttctagacagaatctcccagagtgtggaaatgttgccttagaaatggtgattaaaatcactcatttctattcattcctcaggcacttgagtgacagttgtttaccaggcactgtgtgtagccccagggtttggccattcaggggtgcacacatgggaccatgttagctgatgccagttgaaggccagggtatttgggaaggggaagggtattagagtcatgaccaagcaacccttctttttccctttgacttctacagaaatctgggcctgagacattgtctacaattgggttctagatacatcaggaacccatcttggataaataaatacctatcttttgttttgaaaacatctcagttttcaagactgctcttagtattacatgaacaatatttgtatgctgtatatattgtaaatatatataatatataaagttatatatttatgagaaacacgaattgtcttttaattgaaacttttaatcctgtagtataggagttcaccttcttaggactagagactgtgccttatagctgttaattcatttccccctgaacatcaaatatgcctgaagagaagaaagtctagattcttctatgagtaacgccccctcctcactcaggtaaatgtgtctggggatgcctgtccagcttaaccacgtgcatttggcctatgtaatcctgcccatggtggccgcagctaatcagaatcagatggaaaattaaaccgggtaatctacttctaagccttaagaatattccctgggacacagacactataattggaagtgctgagctctggggcagaaggatcaggtgaccttcgcaacaaagtttgcccccacctcacataggacccggaagcagcctgagctgtggcggaggatccaggaagctacggagagaagcagccagcatggtgttccgtgcctcccggacgtttttcaggaggcctggttggacttgggttcctggatggtgggattgttgtacagcctctcaggagaccctgctgtcaagactgtgtgtgtggatttctcacccttagaagctctactaagacatcaacggaattagggccttcctttttgccttgtgagcgccaaggaaaagaaactatctcggtcacgtgagcgccagcgaaaagaaactgtatcagtcatccagagaccgtttattgcccaacacgttattcttgctgttggtggggtaactagccgaggaagacacagcgccttcccttcaggagttgcgtctcctctgcaggccacgatggtctgctctggagcattgggtgaacacacaggctggctgctctgggcagcgccttcactctgaccctggagaaccatttcatttcatcctggtcagtctagagtctgtgcaccaggcagtccatccactgaaggctgtgtttattcttttcctgtgcccctcataatggaagaaagtaaactgcttatcccgagcctta

SEQ ID NO: 31231 - DNA, 2910 bp, Homo sapiens
  source 1..2910: mol_type = unassigned DNA
atagctccgggcgttcgcttgcaagatggcggcggcggggcagtggctgctgcgttttcgtgtctgagtccttcctgggttctaatgagggcgcggttctgctgtgcccggcccgcgaggtctaaggcatgggcttccagcctccggccgctcttcttttgaggcttttccttctgcagggcatcctgaggcttctgtggggggacctggctttcatccctccttttatccgaatgtccggccctgcggtcagcgcgtccctggtcggagacaccgagggtgtgaccgtgtccctggcagtgctgcaggacgaggcgggaatattgccaattccgacgtgtggagtgctgaacaatgagacggaagactggagcgtgactgtgatccccggtgcgaaggtgttggaagtgacagtgaggtggaagagaggtctggactggtgttcctccaatgagacagattccttctcagagtccccctgtatcctccagacccttctggtttcagcatctcataattcatcctgttcagcacatctactcattcaagtggaaatttatgccaactcttctctgacccataatgcctcagagaacgtgactgtcattcctaaccaggtgtatcagccccttggcccttgtccttgtaatttaacagctggagcctgtgatgttcgctgctgctgtgaccaggaatgctcatcaaatttaacaacgctgttcagacggtcctgcttcaccggcgtgtttggaggagacgtcaatcctccttttgatcagctctgctctgctgggacgacgacacgtggtgtccccgattggtttccctttctgtgtgtgcagtccccccttgccaacacacccttccttggttacttctatcatggtgctgtttcccccaaacaggactcttcctttgaagtatatgtggatactgacgcaaaagactttgcagactttggttacaaacaaggagatcccattatgactgtaaagaaggcatattttactattccgcaggtgtccctggctgggcagtgtatgcagaacgccccagtggcatttcttcacaattttgatgttaaatgcgttactaatttggaactataccaagaacgagatggtattatcaatgcgaagataaagaatgttgccttaggaggcatagttacaccaaaagtgatctatgaggaagcaactgacctagacaaattcatcaccaatacagaaactcctttaaataacggatcaacccctagaattgtgaatgtggaagaacattatattttcaaatggaataataataccatcagtgaaataaatgttaaaatttttagggcagagattaatgcccaccagaaagggataatgacacagagatttgtagtaaaatttttaagctataatagtggtaatgaagaagaattatctggaaatccaggttaccaacttggcaagcctgtccgagctctaaatatcaacaggatgaataatgtcacgactttacatctttggcaatcggctggaaggggtctgtgtacatcagcaactttcaaacccattttatttggagaaaatgtactctctggatgcctgttagaagtcgggattaatgaaaattgtactcagctcagggagaatgctgttgaaagacttgattcattaatacaagcgactcacgttgcaatgagaggcaactccgattacgctgatcttagtgatggctggctcgaaataatacgtgtagatgcccctgatccaggtgcagacccgctggctagcagtgtgaacggcatgtgcctggatattcctgctcacctgagcatccgcatcctcatctcggatgctggcgcggtggaagggattactcagcaggagatactcggtgtagagacaaggttctcctcagtgaactggcagtaccagtgtgggcttacctgtgagcacaaggccgaccttctccctatcagtgcatccgtccagtttattaaaattcctgcacagttaccccaccccctgacaagattccagatcaattatacagagtatgactgcaacagaaatgaggtgtgttggccgcagcttctatatccatggactcagtattatcaaggggagctgcattctcagtgtgttgctaagggcttactgttgctgttgttcctcacattggccttgttcctcagcaacccctggaccagaatatgcaaagcctatagttagacaaccacctggcttttatttttttgagatggagttttgctcttgttgcccaggctgaagtgatctcggctcaccacaacctcctcctcttgggttcaagcgattctcctgcctcagcctccggagaactgggattacaggcatgcaccaccacgcccggctaattttgtatttttagtagagacagggttccaccgtattggccaggctgctctcgaactcctgacctcatgatccgcccatcttggcctcccaaagtgctgagattacaggcatgagccaccgcacccggcctttttttttttttttttttttttgaggcggggtctctgtcacccaggctggagtgcagtgcacaatctcggctcactgcaatctctgcctcccaagcaatcctcccacctcagcctctggtgtagctgggaccacagatgctccaccatgcctggctgtatttttggtaaagacggggtttcgccttgttgcccagggtggtctgtaactcctgagctcagatgatctgcccacctcggcctcccaaagtgctgggatcacagacgtgagccactgcgtccggtccatctgacttctcaaagactttagaccttgacttcagtgatttgttgtagtcttgtatgcttctctataaaattttaataaatgaaatgtcttatttttgtagaaaatt

SEQ ID NO: 31232 - DNA, 2513 bp, Homo sapiens
  source 1..2513: mol_type = unassigned DNA
atagctccgggcgttcgcttgcaagatggcggcggcggggcagtggctgctgcgttttcgtgtctgagtccttcctgggttctaatgagggcgcggttctgctgtgcccggcccgcgaggtctaaggcatgggcttccagcctccggccgctcttcttttgaggcttttccttctgcagggcatcctgaggcttctgtggggggacctggctttcatccctccttttatccgaatgtccggccctgcggtcagcgcgtccctggtcggagacaccgagggtgtgaccgtgtccctggcagtgctgcaggacgaggcgggaatattgccaattccgacgtgtggagtgctgaacaatgagacggaagactggagcgtgactgtgatccccggtgcggtgttggaagtgacagtgaggtggaagagaggtctggactggtgttcctccaatgagacagattccttctcagagtccccctgtatcctccagacccttctggtttcagcatctcataattcatcctgttcagcacatctactcattcaagtggaaatttatgccaactcttctctgacccataatgcctcagagaacgtgactgtcattcctaaccaggtgtatcagccccttggcccttgtccttgtaatttaacagctggagcctgtgatgttcgctgctgctgtgaccaggaatgctcatcaaatttaacaacgctgttcagacggtcctgcttcaccggcgtgtttggaggagacgtcaatcctccttttgatcagctctgctctgctgggacgacgacacgtggtgtccccgattggtttccctttctgtgtgtgcagtccccccttgccaacacacccttccttggttacttctatcatggtgctgtttcccccaaacaggactcttcctttgaagtatatgtggatactgacgcaaaagactttgcagactttggttacaaacaaggagatcccattatgactgtaaagaaggcatattttactattccgcaggtgtccctggctgggcagtgtatgcagaacgccccagtggcatttcttcacaattttgatgttaaatgcgttactaatttggaactataccaagaacgagatggtattatcaatgcgaagataaagaatgttgccttaggaggcatagttacaccaaaagtgatctatgaggaagcaactgacctagacaaattcatcaccaatacagaaactcctttaaataacggatcaacccctagaattgtgaatgtggaagaacattatattttcaaatggaataataataccatcagtgaaataaatgttaaaatttttagggcagagattaatgcccaccagaaagggataatgacacagagatttgtagtaaaatttttaagctataatagtggtaatgaagaagaattatctggaaatccaggttaccaacttggcaagcctgtccgagctctaaatatcaacaggatgaataatgtcacgactttacatctttggcaatcggctggaaggggtctgtgtacatcagcaactttcaaacccattttatttggagaaaatgtactctctggatgcctgttagaagtcgggattaatgaaaattgtactcagctcagggagaatgctgttgaaagacttgattcattaatacaagcgactcacgttgcaatgagaggcaactccgattacgctgatcttagtgatggctggctcgaaataatacgtgtagatgcccctgatccaggtgcagacccgctggctagcagtgtgaacggcatgtgcctggatattcctgctcacctgagcatccgcatcctcatctcggatgctggcgcggtggaagggattactcagcaggagatactcggtgtagagacaaggttctcctcagtgaactggcagtaccagtgtgggcttacctgtgagcacaaggccgaccttctccctatcagtgcatccgtccagtttattaaaattcctgcacagttaccccaccccctgacaagattccagatcaattatacagagtatgactgcaacagaaatgaggtgtgttggccgcagcttctatatccatggactcagtattatcaaggggagctgcattctcagtgtgttgctaagggcttactgttgctgttgttcctcacattggccttgttcctcagcaacccctggaccagaatatgcaaagcctatagttagacaaccacctggcttttatttttttgagatggagttttgctcttgttgcccaggctgaagtgatctcggctcaccacaacctcctcctcttgggttcaagcgattctcctgcctcagcctccggagaactgggattacaggcatgcaccaccacgcccggctaattttgtatttttagtagagacagggttccaccgtattggccaggctgctctcgaactcctgacctcatgatccgcccatcttggcctcccaaagtgctgagattacaggcatgagccaccgcacccggcc

SEQ ID NO: 31233 - DNA, 2739 bp, Homo sapiens
  source 1..2739: mol_type = unassigned DNA
ggttgccaggcaacggaggcacggcccggcccgcgttaaggaggagggcgcagaccgaaggacactgaaagagctgtaacaaccccactttcgattggttgaagagctctcagccttctcatgagccaatgagaagaggcacgcggatggcgtcagacgctatgcgactcctcccacccacgctctggcaatgcgattggagaccgcggaggcctacgtcggacccggaggccctgaatgccccatgcgcaccccacagctcgcgctcctgcaagtgttctttctggtgttccccgatggcgtccggcctcagccctcttcctccccatcaggggcagtgcccacgtctttggagctgcagcgagggacggatggcggaaccctccagtccccttcagaggcgactgcaactcgcccggccgtgcctggactccctacagtggtccctactctcgtgactccctcggcccctgggaataggactgtggacctcttcccagtcttaccgatctgtgtctgtgacttgactcctggagcctgcgatataaattgctgctgcgacagggactgctatcttctccatccgaggacagttttctccttctgccttccaggcagcgtaaggtcttcaagctgggtttgtgtagacaactctgttatcttcaggagtaattccccgtttccttcaagagttttcatggattctaatggaatcaggcagttttgtgtccatgtgaacaactcaaacttaaactatttccagaagcttcaaaaggtcaatgcaaccaacttccaggccctggctgcagagtttggaggcgaatcattcacttcaacattccaaactcaatcaccaccatctttttacagggctggggaccccattcttacttacttccccaagtggtctgtaataagcttgctgagacaacctgcaggagttggagctgggggactctgtgctgaaagcaatcctgcaggtttcctagagagtaaaagtacaacttgcactcgttttttcaagaacctggctagtagctgtaccttggattcagccctcaatgctgcctcttactataacttcacagtcttaaaggttccaagaagcatgactgatccacagaatatggagttccaggttcctgtaatacttacctcacaggctaatgctcctctgttggctggaaacacttgtcagaatgtagtttctcaggtcacctatgagatagagaccaatgggacttttggaatccagaaagtttctgtcagtttgggacaaaccaacctgactgttgagccaggcgcttccttacagcaacacttcatccttcgcttcagggcttttcaacagagcacagctgcttctctcaccagtcctagaagtgggaatcctggctatatagttgggaagccactcttggctctgactgatgatataagttactcaatgaccctcttacagagccagggtaatggaagttgctctgttaaaagacatgaagtgcagtttggagtgaatgcaatatctggatgcaagctcaggttgaagaaggcagactgcagccacttgcagcaggagatttatcagactcttcatggaaggcccagaccagagtatgttgccatctttggtaatgctgacccagcccagaaaggagggtggaccaggatcctcaacaggcactgcagcatttcagctataaactgtacttcctgctgtctcataccagtttccctggagatccaggtattgtgggcatatgtaggtctcctgtccaacccgcaagctcatgtatcaggagttcgattcctataccagtgccagtctatacaggattctcagcaagttacagaagtatctttgacaactcttgtgaactttgtggacattacccagaagccacagcctccaaggggccaacccaaaatggactggaaatggccattcgacttctttcccttcaaagtggcattcagcagaggagtattctctcaaaaatgctcagtctctcccatccttatcctgtgcctcttactacttggagttctcaacctagagactatgtgaagaaaagaaaataatcagatttcagttttccctatgagaaactctgaggcagccacttatcttggctaaatagaacctcacctgctcatgaccagagagcatttaggataatagaggacctaactgaaggaatccttgtatatgaaaggagttattttagaaaagcaataaaaatattttattcatcatagctctctgctttgggctctgcaggccaccagatacacatgaggcccctacttctcaagctgggaaggccaagagccttccttcagcctttctggttatgttacacctagctgaatgtttacaaggtctggatccatcagccctcaggcacagttgggccaagcagaaagagagaaacacttctgctgtcaccttgaatgaactcaggaatagcttccctctggactgtagaggagctaactgtttggaacagaaaactgctggctgttgattttgtctggttcctttgccaacatctgggcacaccctttgcccagacacgagtggggaaagcagttctttctcctcagtttccaaagtaaatggggaatcccagctttcttttctactagcaaatgaccctaccatttatttctgcctttttcttccgttcattgtgaggaaaaataaaactggttgagagctttgttgtactaattcca

SEQ ID NO: 31234 - DNA, 2436 bp, Homo sapiens
  source 1..2436: mol_type = unassigned DNA
acgtcggacccggaggccctgaatgccccatgcgcaccccacagctcgcgctcctgcaagtgttctttctggtgttccccgatggcgtccggcctcagccctcttcctccccatcaggggcagtgcccacgtctttggagctgcagcgagggacggatggcggaaccctccagtccccttcagaggcgactgcaactcgcccggccgtgcctggactccctacagtggtccctactctcgtgactccctcggcccctgggaataggactgtggacctcttcccagtcttaccgatctgtgtctgtgacttgactcctggagcctgcgatataaattgctgctgcgacagggactgctatcttctccatccgaggacagttttctccttctgccttccaggcagcgtaaggtcttcaagctgggtttgtgtagacaactctgttatcttcaggagtaattccccgtttccttcaagagttttcatggattctaatggaatcaggcagttttgtgtccatgtgaacaactcaaacttaaactatttccagaagcttcaaaaggtcaatgcaaccaacttccaggccctggctgcagagtttggaggcgaatcattcacttcaacattccaaactcaatcaccaccatctttttacagggctggggaccccattcttacttacttccccaagtggtctgtaataagcttgctgagacaacctgcaggagttggagctgggggactctgtgctgaaagcaatcctgcaggtttcctagagagtaaaagtacaacttgcactcgttttttcaagaacctggctagtagctgtaccttggattcagccctcaatgctgcctcttactataacttcacagtcttaaaggttccaagaagcatgactgatccacagaatatggaggtcacctatgagatagagaccaatgggacttttggaatccagaaagtttctgtcagtttgggacaaaccaacctgactgttgagccaggcgcttccttacagcaacacttcatccttcgcttcagggcttttcaacagagcacagctgcttctctcaccagtcctagaagtgggaatcctggctatatagttgggaagccactcttggctctgactgatgatataagttactcaatgaccctcttacagagccagggtaatggaagttgctctgttaaaagacatgaagtgcagtttggagtgaatgcaatatctggatgcaagctcaggttgaagaaggcagactgcagccacttgcagcaggagatttatcagactcttcatggaaggcccagaccagagtatgttgccatctttggtaatgctgacccagcccagaaaggagggtggaccaggatcctcaacaggcactgcagcatttcagctataaactgtacttcctgctgtctcataccagtttccctggagatccaggtattgtgggcatatgtaggtctcctgtccaacccgcaagctcatgtatcaggagttcgattcctataccagtgccagtctatacaggattctcagcaagttacagaagtatctttgacaactcttgtgaactttgtggacattacccagaagccacagcctccaaggggccaacccaaaatggactggaaatggccattcgacttctttcccttcaaagtggcattcagcagaggagtattctctcaaaaatgctcagtctctcccatccttatcctgtgcctcttactacttggagttctcaacctagagactatgtgaagaaaagaaaataatcagatttcagttttccctatgagaaactctgaggcagccacttatcttggctaaatagaacctcacctgctcatgaccagagagcatttaggataatagaggacctaactgaaggaatccttgtatatgaaaggagttattttagaaaagcaataaaaatattttattcatcatagctctctgctttgggctctgcaggccaccagatacacatgaggcccctacttctcaagctgggaaggccaagagccttccttcagcctttctggttatgttacacctagctgaatgtttacaaggtctggatccatcagccctcaggcacagttgggccaagcagaaagagagaaacacttctgctgtcaccttgaatgaactcaggaatagcttccctctggactgtagaggagctaactgtttggaacagaaaactgctggctgttgattttgtctggttcctttgccaacatctgggcacaccctttgcccagacacgagtggggaaagcagttctttctcctcagtttccaaagtaaatggggaatcccagctttcttttctactagcaaatgaccctaccatttatttctgcctttttcttccgttcattgtgaggaaaaataaaactggttgagagctttgttgtact

SEQ ID NO: 31235 - DNA, 1464 bp, Homo sapiens
  source 1..1464: mol_type = unassigned DNA
atgcgcaccccacagctcgcgctcctgcaagtgttctttctggtgttccccgatggcgtccggcctcagccctcttcctccccatcaggggcagtgcccacgtctttggagctgcagcgagggacggatggcggaaccctccagtccccttcagaggcgactgcaactcgcccggccgtgcctggactccctacagtggtccctactctcgtgactccctcggcccctgggaataggactgtggacctcttcccagtcttaccgatctgtgtctgtgacttgactcctggagcctgcgatataaattgctgctgcgacagggactgctatcttctccatccgaggacagttttctccttctgccttccaggcagcgtaaggtcttcaagctgggtttgtgtagacaactctgttatcttcaggagtaattccccgtttccttcaagagttttcatggattctaatggaatcaggcagttttgtgtccatgtgaacaactcaaacttaaactatttccagaagcttcaaaaggtcaatgcaaccaacttccaggccctggctgcagagtttggaggcgaatcattcacttcaacattccaaactcaatcaccaccatctttttacagggctggggaccccattcttacttacttccccaagtggtctgtaataagcttgctgagacaacctgcaggagttggagctgggggactctgtgctgaaagcaatcctgcaggtttcctagagagtaaaagtacaacttgcactcgttttttcaagaacctggctagtagctgtaccttggattcagccctcaatgctgcctcttactataacttcacagtcttaaaggttccaagaagcatgactgatccacagaatatggagttccaggttcctgtaatacttacctcacaggctaatgctcctctgttggctggaaacacttgtcagaatgtagtttctcaggtcacctatgagatagagaccaatgggacttttggaatccagaaagtttctgtcagtttgggacaaaccaacctgactgttgagccaggcgcttccttacagcaacacttcatccttcgcttcagggcttttcaacagagcacagctgcttctctcaccagtcctagaagtgggaatcctggctatatagttgggaagccactcttggctctgactgatgatataagttactcagtatcctttttagagctgggtggcctgttgcagcctaatgagaaaagctgcaaaggctttcaaacttatgttagactagccaaaggtgaggaattttttgttcattataatgaggtacttatatactaatatatggttaatcatttttggaatctagttgtctctctgtggttttctgaggaaaaaaatcacaaatttgtgactcgaacattatgatagtaatacaaaataaatagcattaaaggagaatgagaacataaa

SEQ ID NO: 31236 - DNA, 2734 bp, Homo sapiens
  source 1..2734: mol_type = unassigned DNA
ggttgccaggcaacggaggcacggcccggcccgcgttaaggaggagggcgcagaccgaaggacactgaaagagctgtaacaaccccactttcgattggttgaagagctctcagccttctcatgagccaatgagaagaggcacgcggatggcgtcagacgctatgcgactcctcccacccacgctctggcaatgcgattggagaccgcggaggcctacgtcggacccggaggccctgaatgccccatgcgcaccccacagctcgcgctcctgcaagtgttctttctggtgttccccgatggcgtccggcctcagccctcttcctccccatcaggggcagtgcccacgtctttggagctgcagcgagggacggatggcggaaccctccagtccccttcagaggcgactgcaactcgcccggccgtgcctggactccctacagtggtccctactctcgtgactccctcggcccctgggaataggactgtggacctcttcccagtcttaccgatctgtgtctgtgacttgactcctggagcctgcgatataaattgctgctgcgacagggactgctatcttctccatccgaggacagttttctccttctgccttccaggcagcgtaaggtcttcaagctgggtttgtgtagacaactctgttatcttcaggagtaattccccgtttccttcaagagttttcatggattctaatggaatcaggcagttttgtgtccatgtgaacaactcaaacttaaactatttccagaagcttcaaaaggtcaatgcaaccaacttccaggccctggctgcagagtttggaggcgaatcattcacttcaacattccaaactcaatcaccaccatctttttacagggctggggaccccattcttacttacttccccaagtggtctgtaataagcttgctgagacaacctgcaggagttggagctgggggactctgtgctgaaagcaatcctgcaggtttcctagagagtaaaagtacaacttgcactcgttttttcaagaacctggctagtagctgtaccttggattcagccctcaatgctgcctcttactataacttcacagtcttaaaggttccaagaagcatgactgatccacagaatatggagttccaggttcctgtaatacttacctcacaggctaatgctcctctgttggctggaaacacttgtcagaatgtagtttctcaggtcacctatgagatagagaccaatgggacttttggaatccagaaagtttctgtcagtttgggacaaaccaacctgactgttgagccaggcgcttccttacagcaacacttcatccttcgcttcagggcttttcaacagagcacagctgcttctctcaccagtcctagaagtgggaatcctggctatatagttgggaagccactcttggctctgactgatgatataagttactcaatgaccctcttacagagccagggtaatggaagttgctctgttaaaagacatgaagtgcagtttggagtgaatgcaatatctggatgcaagctcaggttgaagaaggcagactgcagccacttgcagcaggagatttatcagactcttcatggaaggcccagaccagagtatgttgccatctttggtaatgctgacccagcccagaaaggagggtggaccaggatcctcaacaggcactgcagcatttcagctataaactgtacttcctgctgtctcataccagtttccctggagatccaggtattgtgggcatatgtaggtctcctgtccaacccgcaagctcatgtatcaggagttcgattcctataccagtgccagtctatacaggattctcagcaagttacagaagtatctttgacaactcttgtgaactttgtggacattacccagaagccacagcctccaaggggccaacccaaaatggactggaaatggccattcgacttctttcccttcaaagtggcattcagcagaggagtattctctcaaaaatgctcagtctctcccatccttatcctgtgcctcttactacttggagttctcaacctagagactatgtgaagaaaagaaaataatcagatttcagttttccctatgagaaactctgaggcagccacttatcttggctaaatagaacctcacctgctcatgaccagagagcatttaggataatagaggacctaactgaaggaatccttgtatatgaaaggagttattttagaaaagcaataaaaatattttattcatcatagctctctgctttgggctctgcaggccaccagatacacatgaggcccctacttctcaagctgggaaggccaagagccttccttcagcctttctggttatgttacacctagctgaatgtttacaaggtctggatccatcagccctcaggcacagttgggccaagcagaaagagagaaacacttctgctgtcaccttgaatgaactcaggaatagcttccctctggactgtagaggagctaactgtttggaacagaaaactgctggctgttgattttgtctggttcctttgccaacatctgggcacaccctttgcccagacacgagtggggaaagcagttctttctcctcagtttccaaagtaaatggggaatcccagctttcttttctactagcaaatgaccctaccatttatttctgcctttttcttccgttcattgtgaggaaaaataaaactggttgagagctttgttgtactaa

SEQ ID NO: 31237 - DNA, 2295 bp, Homo sapiens
  source 1..2295: mol_type = unassigned DNA
ggttgccaggcaacggaggcacggcccggcccgcgttaaggaggagggcgcagaccgaaggacactgaaagagctgtaacaaccccactttcgattggttgaagagctctcagccttctcatgagccaatgagaagaggcacgcggatggcgtcagacgctatgcgactcctcccacccacgctctggcaatgcgattggagaccgcggaggcctacgtcggacccggaggccctgaatgccccatgcgcaccccacagctcgcgctcctgcaagtgttctttctggtgttccccgatggcgtccggcctcagccctcttcctccccatcaggggcagtgcccacgtctttggagctgcagcgagggacggatggcggaaccctccagtccccttcagaggcgactgcaactcgcccggccgtgcctggactccctacagtggtccctactctcgtgactccctcggcccctgggaataggactgtggacctcttcccagtcttaccgatctgtgtctgtgacttgactcctggagcctgcgatataaattgctgctgcgacagggactgctatcttctccatccgaggacagttttctccttctgccttccaggcagcgtaaggtcttcaagctgggtttgtgtagacaactctgttatcttcaggagtaattccccgtttccttcaagagttttcatggattctaatggaatcaggcagttttgtgtccatgtgaacaactgtttcctagagagtaaaagtacaacttgcactcgttttttcaagaacctggctagtagctgtaccttggattcagccctcaatgctgcctcttactataacttcacagtcttaaaggttccaagaagcatgactgatccacagaatatggaggcttttcaacagagcacagctgcttctctcaccagtcctagaagtgggaatcctggctatatagttgggaagccactcttggctctgactgatgatataagttactcaatgaccctcttacagagccagggtaatggaagttgctctgttaaaagacatgaagtgcagtttggagtgaatgcaatatctggatgcaagctcaggttgaagaaggcagactgcagccacttgcagcaggagatttatcagactcttcatggaaggcccagaccagagtatgttgccatctttggtaatgctgacccagcccagaaaggagggtggaccaggatcctcaacaggcactgcagcatttcagctataaactgtacttcctgctgtctcataccagtttccctggagatccaggtattgtgggcatatgtaggtctcctgtccaacccgcaagctcatgtatcaggagttcgattcctataccagtgccagtctatacaggattctcagcaagttacagaagtatctttgacaactcttgtgaactttgtggacattacccagaagccacagcctccaaggggccaacccaaaatggactggaaatggccattcgacttctttcccttcaaagtggcattcagcagaggagtattctctcaaaaatgctcagtctctcccatccttatcctgtgcctcttactacttggagttctcaacctagagactatgtgaagaaaagaaaataatcagatttcagttttccctatgagaaactctgaggcagccacttatcttggctaaatagaacctcacctgctcatgaccagagagcatttaggataatagaggacctaactgaaggaatccttgtatatgaaaggagttattttagaaaagcaataaaaatattttattcatcatagctctctgctttgggctctgcaggccaccagatacacatgaggcccctacttctcaagctgggaaggccaagagccttccttcagcctttctggttatgttacacctagctgaatgtttacaaggtctggatccatcagccctcaggcacagttgggccaagcagaaagagagaaacacttctgctgtcaccttgaatgaactcaggaatagcttccctctggactgtagaggagctaactgtttggaacagaaaactgctggctgttgattttgtctggttcctttgccaacatctgggcacaccctttgcccagacacgagtggggaaagcagttctttctcctcagtttccaaagtaaatggggaatcccagctttcttttctactagcaaatgaccctaccatttatttctgcctttttcttccgttcattgtgaggaaaaataaaactggttgagagctttgttgtactaattcca

SEQ ID NO: 31238 - DNA, 6468 bp, Homo sapiens
  source 1..6468: mol_type = unassigned DNA
atgaattattcatcattccttagaatttgggtctctttcatcttcgcacttgtacagcaccaagctcagcccagggagctcatgtatccattttggcagaatgacaccaaaacccctaaagtagatgatggaagctcatctgagattaagttggccatcccagttttcttctttggcgttccttaccgcactgtctatgtcaataacaacggagttgtttccttcaatgtgctagtgagccagttcacgccagaatcctttcccctgacagatgggagagccttcgtcgccccattttgggcagatgtgcacaatggaattcgaggcgagatctattacagagagaccatggagcctgccatcttgaaaagagccaccaaggacatcaggaagtacttcaaagacatggcaaccttctctgccacttgggttttcattgtgacatgggaggaagtcacgttttatggaggcagcagcaccacacctgtgaacaccttccaggccgtcctagtgtccgatggctcctatacattcaccctcttcaattattacgaaatcaactggaccacggggacggcgagtggcggcgaccccctgacaggtcttggtggagtgatggcacaggcaggatttaatggtggaaacctcaccaatttcttcagcctcccggggtcaagaacccccgagatcgtgaatatccaggagaccacaaacgtcaatgttccaggccgctgggcatttaaagttgatggaaaggaaattgacccagccaatggctgcacctcaaggggacaattccttcggcgaggggaggtgttttgggatgacttgaactgcaccgtcaagtgccgctgtctggatttcaacaatgagatctactgccaggaggcttcctgtagcccctacgaggtgtgcgaacccaaaggcaaattcttctactgcagcgctgtggagaccagcacatgcgtggtgtttggggagccacactaccacacttttgacggcttcctcttccacttccaaggctcctgtgcctacttgctggcccgacagtgtttgcagacttccagcctccctttcttcagtgtggaggccaagaatgaacaccgcagaggttcagccgtctcctgggtgaaggagctctcagtggaggtgaatggctacaagattctcatccccaaaggaagctatggaagagtcaaggttaatgacctagtgacttctttgcctgtcaccttagacttggggacagtgaaaatctaccagagtggcatatctactgccgtggaaacagattttgggctcttagtgacttttgatggccagcactacgcctccatttccgtcccaggctcctatataaactccacctgtggactctgtggaaactataataaaaacccactggatgacttcctccgcccggatggcaggccggccatgtctgtcctggatctgggagagagctggcgtgtgtaccacgcagactggaagtgcgactccggctgcgtcgacaactgcacccagtgcgacgctgccactgaagccctctactttggctctgactactgcggcttcctcaacaagacagacggccctctgtgggagtgtggcactgtcgtggaccccactgcttttgtgcacagctgcgtgtatgacctgtgcagtgtgagggacaatggcacgctcctctgccaagccatccaggcctatgctcttgtgtgccaagcccttggcattccaattggagactggcgaacccagactgggtgtgtgtccacagtgcagtgcccgagcttcagccactactccgtgtgcacaagcagctgccccgacacatgctccgacctgacggcctcgcggaactgcgccacgccgtgcacagagggctgcgagtgcaaccagggcttcgtcctcagcaccagccagtgcgtccctctgcacaagtgcggctgcgacttcgacggccactactacaccatgggggagttcttctgggccacggccaactgcactgtgcaatgcctgtgcgaggagggcggggacgtctactgcttcaacaagacctgcggcagcggggaggtgtgcgccgtggaggacggctaccagggctgcttccccaagcgggagaccgtgtgcctgctcagccagaaccaggtgctgcacacctttgacggcgcctcctacgccttcccctccgagttctcctacaccctcctgaagacctgccctgagcgcccagagtacttggaaatcgacatcaacaagaagaagcccgatgcaggacctgcttggctgcggggacttcggatcctggtggccgaccaggaggtcaagataggaggcatcggggcttcggaagtcaagttgaatggtcaggaagtggaattgccttttttccatccttcggggaagctggaaatttatcgaaacaaaaacagtacgacagtggagtccaagggcgtggtgactgtccagtactcagacataggtctattgtacatccggctgtccaccacatacttcaattgcacagggggcttgtgcggcttctacaatgccaacgccagtgacgagttctgtctccccaacggcaagtgcacggacaacctggcagtgttcctggaaagctggacaactttcgaggagatctgcaatggagagtgtggggacctgctgaaggcctgcaacaatgactcggagctgctcaagttttatcgaagccgctccaggtgcggcatcatcaacgacccctccaacagctccttcctggagtgccatggggtggtgaacgtcactgcctattaccgcacctgccttttccgcctgtgccagagtgggggcaatgagtcagagctctgtgactctgtggcccggtatgcaagcgcctgcaagaatgcggacgtggaggtggggccctggcggacctatgacttctgcccactggagtgcccagagaacagccactttgaggagtgcatcacatgtacagagacctgtgagacccttaccctgggccccatctgcgtggatagctgctctgagggatgtcagtgtgatgagggctatgctctactgggcagccagtgtgtcacgcggagtgagtgtggctgcaactttgaggggcaccaacttgccaccaatgagaccttctgggtggacctggactgccagatcttctgctattgcagtggcacagacaacagggtccactgcgagaccattccctgcaaggatgatgagtactgcatggaggaaggtggcctgtactactgccaagcccgcaccgacgcctcctgcatcgtctcaggctacggccactacctcacctttgatggcttcccctttgacttccagaccagctgcccactcatcctgtgcaccacaggaagcaggccaagctcagactctttccccaagtttgttgtcacagccaagaatgaggaccgggacccgtcactggccttgtgggttaagcaggtggacgtgaccgtgtttggctacagcatcgtgatccaccgagcttacaagcacactgtgctggtcaacagtgaacggctctatctgcccctgaagctggggcaagggaagataaatatcttttcctttggcttccacgtggtggtggaaactgattttggcctgaaggttgtatatgactggaagaccttcctgtccatcacagtccctcggagcatgcagaacagcacctatggtctgtgtggccgctacaacggcaaccctgatgatgacctggagatgcccatgggtctgcttgcatcgagtgtcaatgagtttgggcagagctgggtgaagagggacaccttctgccaggtgggctgtggggaccgctgtccgtcctgtgccaaggtggaaggtttctccaaagtgcagcagctgtgcagcctgatccccaaccagaacgctgccttctccaagtgtcacagcaaagttaaccccaccttcttctataagaactgcctgtttgactcttgcatcgatgggggcgcggtgcagaccgcctgcagctggctgcagaactacgccagcacctgccagactcaggggattacggtgactggctggaggaattacacgtcctgcactgtcacctgccctccaaacagccattacgagagctgcgtgagtgtctgccagccccgctgcgccgccatccgcctgaagagtgactgcagccactactgcgtggagggctgtcactgcgacgctggctacgtcctcaacggcaagagctgcatcctgccccacagctgcggctgctactccgatggcaaatattacgagcccaagcagctattttggaacagcgactgcacgcggcgctgccgctgtttccgtcgcaacgtgattcagtgcgacccgcgccaatgcaagtcagacgaggagtgtgcgctgcgcaacggggtgcgcggctgcttcagcaccaagacctcctactgcctggcggccggcggcggcgtcttccgcaccttcgacggcgccttcctgcgcttcccagccaactgcgccttcgtgctgtccaccatctgccagaaactgcccgacatctccttccagcttatcatcaacttcgacaagtggtcggcccccaacctcaccatcatttcgcccgtctacttctacattaacgaagagcagattctcatcaacgaccggaacacggtcaaggtgaatggcacacaagtgaatgttccatttataactggtttggcaaccaaaatctacagcagtgaggggtttctggtgattgacaccagcccagacatccagatatactacaatggtttcaacgtcattaaaatcagcatcagcgagaggctgcagaacaaagtgtgcggtctctgtggcaacttcaacggggacctaacagatgattatgtgaccttgcgagggaagccggtggtaagcagcgtggtgctggcccagagctggaaaaccaatggcatgcagaagagacctcttgcccccagctgcaacgagctgcagttctcacagtatgcagccatgtgtgacaatgtgcacatccagaagatgcagggtgatggctactgcctgaagctcaccgacatgaagggcttcttccagccctgctatgggcttctcgatcccctcccattctacgagtcctgctacctggacggctgctacagccacaagaagttccagctgtgcggctccctggccgcctacggggaggcctgccgctccttcgggatccttagcaccgagtggattgagaaggagaattgctcaggagtggttgaagatccctgtgtgggggcggactgtcccaaccgaacttgcgagctgggcaatggcagggagctgtgtggctgcatcgagccacccccctatggaaataactcacatgacattatcgatgcagaggtgacctgcaaagcagcccaaatggaagtgtccatatctaagtgcaagctcttccagctcggttttgagagggagggcgtgaggatcaatgacagacagtgcaccggcatcgagggggaagattttatctcctttcagatcaacaacaccaaagggaattgtggaaacattgtgcagtccaatggcacgcatatcatgtataaaaacacactctggatcgaaagcgccaacaacactggcaacatcatcaccagggaccgcacgatcaatgtggaattttcatgtgcttatgagctggatatcaagatctccttggattctgttgtgaagcctatgctaagtgtaattaacctgacagttccaacccaagaaggcagcttcatcaccaagatggctctctacaaaaacgcctcctacaaacatccttaccgccagggtgaagtagtgttgacgactcgagatgtgctgtatgtaggggtttttgtggttggagctgacgccacacatttaatcctaacactcaacaaatgctatgccacacccacccgagatagcaatgataagctccgatatttcatcattgaaggagggtgtcagaacctcaaagataacaccattggcatcgaggagaatgcagtctccctgacctgtcgctttcacgtcaccgtctttaaattcataggggattacgacgaagttcaccttcactgtgcagtgtcactctgcgactcagaaaagtactcctgtaaaatcacttgcccacacaattccaggattgccacagattacacaaaagagcccaaagaacagatcatttcagtgggacctattaggagaaaaaggctggactggtgtgaggacaatggagggtgtgagcagatttgcacgagccgggtggatgggcctctctgcagctgtgtaacaggaaccctgcaggaggacggcaagagctgcagagcctctaattcttcaatggaacttcaagtctggacgcttcttctcatcatgatccagatttcattatggcattttgtctataaatcaggcacgacctcataa

SEQ ID NO: 31239 - DNA, 7426 bp, Homo sapiens
  source 1..7426: mol_type = unassigned DNA
cgcaatcctgaaactgatctttagatttacttttccttaatcaatagaaaaaaacttgattgcagctcaacacttacctgtctctagtgcaggactaacttaatttttggttttaagagtacgagattcagacattatttcaggaatcagaaattattggcaacaagttgaggagaactgacatgaattcttgttttacctaattttttctggcttaccaagatttggcttaatatttctgactcagttcctccagcctctacagaacaggatgaattattcatcattccttagaatttgggtctctttcatcttcgcacttgtacagcaccaagctcagcccagggagctcatgtatccattttggcagaatgacaccaaaacccctaaagtagatgatggaagctcatctgagattaagttggccatcccagttttcttctttggcgttccttaccgcactgtctatgtcaataacaacggagttgtttccttcaatgtgctagtgagccagttcacgccagaatcctttcccctgacagatgggagagccttcgtcgccccattttgggcagatgtgcacaatggaattcgaggcgagatctattacagagagaccatggagcctgccatcttgaaaagagccaccaaggacatcaggaagtacttcaaagacatggcaaccttctctgccacttgggttttcattgtgacatgggaggaagtcacgttttatggaggcagcagcaccacacctgtgaacaccttccaggccgtcctagtgtccgatggctcctatacattcaccctcttcaattattacgaaatcaactggaccacggggacggcgagtggcggcgaccccctgacaggtcttggtggagtgatggcacaggcaggatttaatggtggaaacctcaccaatttcttcagcctcccggggtcaagaacccccgagatcgtgaatatccaggagaccacaaacgtcaatgttccaggccgctgggcatttaaagttgatggaaaggaaattgacccagccaatggctgcacctcaaggggacaattccttcggcgaggggaggtgttttgggatgacttgaactgcaccgtcaagtgccgctgtctggatttcaacaatgagatctactgccaggaggcttcctgtagcccctacgaggtgtgcgaacccaaaggcaaattcttctactgcagcgctgtggagaccagcacatgcgtggtgtttggggagccacactaccacacttttgacggcttcctcttccacttccaaggctcctgtgcctacttgctggcccgacagtgtttgcagacttccagcctccctttcttcagtgtggaggccaagaatgaacaccgcagaggttcagccgtctcctgggtgaaggagctctcagtggaggtgaatggctacaagattctcatccccaaaggaagctatggaagagtcaaggttaatgacctagtgacttctttgcctgtcaccttagacttggggacagtgaaaatctaccagagtggcatatctactgccgtggaaacagattttgggctcttagtgacttttgatggccagcactacgcctccatttccgtcccaggctcctatataaactccacctgtggactctgtggaaactataataaaaacccactggatgacttcctccgcccggatggcaggccggccatgtctgtcctggatctgggagagagctggcgtgtgtaccacgcagactggaagtgcgactccggctgcgtcgacaactgcacccagtgcgacgctgccactgaagccctctactttggctctgactactgcggcttcctcaacaagacagacggccctctgtgggagtgtggcactgtcgtggaccccactgcttttgtgcacagctgcgtgtatgacctgtgcagtgtgagggacaatggcacgctcctctgccaagccatccaggcctatgctcttgtgtgccaagcccttggcattccaattggagactggcgaacccagactgggtgtgtgtccacagtgcagtgcccgagcttcagccactactccgtgtgcacaagcagctgccccgacacatgctccgacctgacggcctcgcggaactgcgccacgccgtgcacagagggctgcgagtgcaaccagggcttcgtcctcagcaccagccagtgcgtccctctgcacaagtgcggctgcgacttcgacggccactactacaccatgggggagttcttctgggccacggccaactgcactgtgcaatgcctgtgcgaggagggcggggacgtctactgcttcaacaagacctgcggcagcggggaggtgtgcgccgtggaggacggctaccagggctgcttccccaagcgggagaccgtgtgcctgctcagccagaaccaggtgctgcacacctttgacggcgcctcctacgccttcccctccgagttctcctacaccctcctgaagacctgccctgagcgcccagagtacttggaaatcgacatcaacaagaagaagcccgatgcaggacctgcttggctgcggggacttcggatcctggtggccgaccaggaggtcaagataggaggcatcggggcttcggaagtcaagttgaatggtcaggaagtggaattgccttttttccatccttcggggaagctggaaatttatcgaaacaaaaacagtacgacagtggagtccaagggcgtggtgactgtccagtactcagacataggtctattgtacatccggctgtccaccacatacttcaattgcacagggggcttgtgcggcttctacaatgccaacgccagtgacgagttctgtctccccaacggcaagtgcacggacaacctggcagtgttcctggaaagctggacaactttcgaggagatctgcaatggagagtgtggggacctgctgaaggcctgcaacaatgactcggagctgctcaagttttatcgaagccgctccaggtgcggcatcatcaacgacccctccaacagctccttcctggagtgccatggggtggtgaacgtcactgcctattaccgcacctgccttttccgcctgtgccagagtgggggcaatgagtcagagctctgtgactctgtggcccggtatgcaagcgcctgcaagaatgcggacgtggaggtggggccctggcggacctatgacttctgcccactggagtgcccagagaacagccactttgaggagtgcatcacatgtacagagacctgtgagacccttaccctgggccccatctgcgtggatagctgctctgagggatgtcagtgtgatgagggctatgctctactgggcagccagtgtgtcacgcggagtgagtgtggctgcaactttgaggggcaccaacttgccaccaatgagaccttctgggtggacctggactgccagatcttctgctattgcagtggcacagacaacagggtccactgcgagaccattccctgcaaggatgatgagtactgcatggaggaaggtggcctgtactactgccaagcccgcaccgacgcctcctgcatcgtctcaggctacggccactacctcacctttgatggcttcccctttgacttccagaccagctgcccactcatcctgtgcaccacaggaagcaggccaagctcagactctttccccaagtttgttgtcacagccaagaatgaggaccgggacccgtcactggccttgtgggttaagcaggtggacgtgaccgtgtttggctacagcatcgtgatccaccgagcttacaagcacactgtgctggtcaacagtgaacggctctatctgcccctgaagctggggcaagggaagataaatatcttttcctttggcttccacgtggtggtggaaactgattttggcctgaaggttgtatatgactggaagaccttcctgtccatcacagtccctcggagcatgcagaacagcacctatggtctgtgtggccgctacaacggcaaccctgatgatgacctggagatgcccatgggtctgcttgcatcgagtgtcaatgagtttgggcagagctgggtgaagagggacaccttctgccaggtgggctgtggggaccgctgtccgtcctgtgccaaggtggaaggtttctccaaagtgcagcagctgtgcagcctgatccccaaccagaacgctgccttctccaagtgtcacagcaaagttaaccccaccttcttctataagaactgcctgtttgactcttgcatcgatgggggcgcggtgcagaccgcctgcagctggctgcagaactacgccagcacctgccagactcaggggattacggtgactggctggaggaattacacgtcctgcactgtcacctgccctccaaacagccattacgagagctgcgtgagtgtctgccagccccgctgcgccgccatccgcctgaagagtgactgcagccactactgcgtggagggctgtcactgcgacgctggctacgtcctcaacggcaagagctgcatcctgccccacagctgcggctgctactccgatggcaaatattacgagcccaagcagctattttggaacagcgactgcacgcggcgctgccgctgtttccgtcgcaacgtgattcagtgcgacccgcgccaatgcaagtcagacgaggagtgtgcgctgcgcaacggggtgcgcggctgcttcagcaccaagacctcctactgcctggcggccggcggcggcgtcttccgcaccttcgacggcgccttcctgcgcttcccagccaactgcgccttcgtgctgtccaccatctgccagaaactgcccgacatctccttccagcttatcatcaacttcgacaagtggtcggcccccaacctcaccatcatttcgcccgtctacttctacattaacgaagagcagattctcatcaacgaccggaacacggtcaaggtgaatggcacacaagtgaatgttccatttataactggtttggcaaccaaaatctacagcagtgaggggtttctggtgattgacaccagcccagacatccagatatactacaatggtttcaacgtcattaaaatcagcatcagcgagaggctgcagaacaaagtgtgcggtctctgtggcaacttcaacggggacctaacagatgattatgtgaccttgcgagggaagccggtggtaagcagcgtggtgctggcccagagctggaaaaccaatggcatgcagaagagacctcttgcccccagctgcaacgagctgcagttctcacagtatgcagccatgtgtgacaatgtgcacatccagaagatgcagggtgatggctactgcctgaagctcaccgacatgaagggcttcttccagccctgctatgggcttctcgatcccctcccattctacgagtcctgctacctggacggctgctacagccacaagaagttccagctgtgcggctccctggccgcctacggggaggcctgccgctccttcgggatccttagcaccgagtggattgagaaggagaattgctcaggagtggttgaagatccctgtgtgggggcggactgtcccaaccgaacttgcgagctgggcaatggcagggagctgtgtggctgcatcgagccacccccctatggaaataactcacatgacattatcgatgcagaggtgacctgcaaagcagcccaaatggaagtgtccatatctaagtgcaagctcttccagctcggttttgagagggagggcgtgaggatcaatgacagacagtgcaccggcatcgagggggaagattttatctcctttcagatcaacaacaccaaagggaattgtggaaacattgtgcagtccaatggcacgcatatcatgtataaaaacacactctggatcgaaagcgccaacaacactggcaacatcatcaccagggaccgcacgatcaatgtggaattttcatgtgcttatgagctggatatcaagatctccttggattctgttgtgaagcctatgctaagtgtaattaacctgacagttccaacccaagaaggcagcttcatcaccaagatggctctctacaaaaacgcctcctacaaacatccttaccgccagggtgaagtagtgttgacgactcgagatgtgctgtatgtaggggtttttgtggttggagctgacgccacacatttaatcctaacactcaacaaatgctatgccacacccacccgagatagcaatgataagctccgatatttcatcattgaaggagggtgtcagaacctcaaagataacaccattggcatcgaggagaatgcagtctccctgacctgtcgctttcacgtcaccgtctttaaattcataggggattacgacgaagttcaccttcactgtgcagtgtcactctgcgactcagaaaagtactcctgtaaaatcacttgcccacacaattccaggattgccacagattacacaaaagagcccaaagaacagatcatttcagtgggacctattaggagaaaaaggctggactggtgtgaggacaatggagggtgtgagcagatttgcacgagccgggtggatgggcctctctgcagctgtgtaacaggaaccctgcaggaggacggcaagagctgcagagcctctaattcttcaatggaacttcaagtctggacgcttcttctcatcatgatccagatttcattatggcattttgtctataaatcaggcacgacctcataattaactcaaggttgctatataaagtactgtaatttacttacttcaacaccctgtaggataaaaagtgtgtgcccttaagtcaaaacctatttgaaagtgtccagcatctcaaaatgatgccacctgcctccaatggtccaaggtccagaaaccagcgaccatccaagctcctctttcagagtatgaaacggggcttctacaagccagttatggaaagtatctctcttgtgtaaaattcccaaacagttgtcactagagactttggttcacatgaaaaaccagtaaaggaaaaaaattctggttagagaaatctgactggaaatctgaccagagaaatctgtcaagccagtgctatttctggatcacagttttttacagagagagggcctgttggaacgattttgaagtgatgactggaaggtttgactccctctaaggaatcttgctggtgtttggaagtgtccgatctacgttatgcacgtgttctgtctatgaggcgcttctccacccactgtgtccttcaaccttgccatggcagctttggccactggggatattgttgacctggggaaccccacccactctcctaccccctcgaacccaatcccttctctttttacaaatcaaccaaatactttttaatgtgttttatccttaaataaactttgtgttcaagtattctcatta

SEQ ID NO: 31240 - DNA, 3421 bp, Homo sapiens
  source 1..3421: mol_type = unassigned DNA
gttgtcatggagaccgcgttgtttacctctctgttctgcaagagctggaagctccagttggggtaaggaggctcccatcccgagcttgcgtagtggttctgtgtggcgctgaggaatttggaaacctcaaatggctaaactattacaacctccacccaagttcctgccctcagagtggcacattgctaacaagaaccagtaccacagagcagacgctcaaaggtcccgatcagaacgcctggtcgcagaaagccagaggcttgtggatgaaattgaaaagaccacaagaaaatctcaaagcgatgtgaacaagaaactagaacagagactcgaggaagtccagttctggaagaaggagttagatgacaaacttgagcagcttgtgaatgtaactgatgatctactcatatataagatcagattggaaaaagccctggagaccttgaaagagcccttgcacatcactgagacatgcctggcatacagggagaagcgcattggcattgacctggtgcacgacacagtggagcatgagctgataaaggaggctgagatcatccagggcattatggctctgctgacccgtaccttggaggaggcttccgagcagattcggatgaaccgctctgccaagtacaatcttgagaaggatttgaaggacaagtttgtggccctgaccatagatgatatctgcttctcgctcaacaacaactcaccaaacatcagatattctgagaacgccgtgaggattgagccaaactccgtgagtctggaagactggttggacttctccagcaccaatgtggagaaggctgacaagcagcggaacaactccctgatgctgaaagccctggtggatcgaatcctgtcccagacagccaatgatctgcgcaagcagtgtgatgtggtggacacggcattcaagaatgggctgaaggatacaaaggatgccagggacaagctggctgatcatctggccaaggtcatggaagagattgcttcccaggagaaaaatattacagctcttgaaaaggccatccttgaccaagaagggccagccaaggtggctcatacgcgcttggagaccaggacacaccggccgaacgtggagctgtgtcgtgatgtcgcacaatataggctaatgaaggaggttcaagagatcacccacaatgtcgcaagattgaaggaaactttagcccaagctcaggcagagctgaaagggctgcatcgcagacagcttgccctgcaggaggagatccaggtcaaagagaacaccatttatatcgacgaagtgctgtgtatgcagatgaggaaatccatcccacttcgggatggggaagaccatggggtctgggctgggggcctccgccctgatgctgtctgctaatagtagggctagttccaattctcattaaaccacattgtaaacagtagttacagtagtacagagctctcatttcaggctggcggggcctctagccagcctgctgcaacctcttggctggcattccaagcctgctcagggggctgattttggggcgagtttcttctcttatgctggtgtggtgtttgcctaacaattcaactccatattttagcacaggccactcttacaatatcacaggacttggggccccaggacagggtttcaagacatttcagttcagattcaattcaataaagtagttgggctggatcacctgtgtagaccatgcccctcttgctcatgagatgggatgctaacctttctcttggctctcaaaatttcttttctctagaaaataatgtgttttttttctcttaaatactcaaataacataaagaaaaagaacaaaattccattcattcaagtcaatgggttcaagtcaatggttaagactgtaggttccggagtctgccatctgagtataggacctccaatagtccccactcacagggctataggggcgttgaatgagatcacctccgtaaagggcttcatactgagcctgtatcatggggcagtgagtgtttaatgaatgtgagccattgtgagcagtcccaccctataccaacataatttctgcacaattgtactcatggcataaactcaatttcaggattatttttttccttcactgctaattattgcaagcctttgttcatgttgctaaattgtctttataattattttaatggttacgtacctctttacaagttttcagcaagactgttttatatacttactgtttcttttccaaaaagagttcaacttgtgggaggctgccttccgctgagctgcagcaggtcagagatctatgtgggtgactgtcaaaggaagacatttgctgtgggaaactgctcatttgttccttattccgctaacattgaaggaacactttccatggacgaggcttaccatctcagcaccctcccatgtgtgaagctgctgctacactctgctaacatttggttccccggtgctcatggacagctgacggtgtggggctcaggagacctagcttctagttgcaacactgccaggaaagtttctctccttctttaggaccacctgtaaagtaaggaaaggactatatcgtctggaactcttcctgtccttgctgttccctgaatctggctgtctagctgcacatacggtgtcatagggcacaatgataatgcagagtgtgggcctaattcctgggagctttgcaatctaggtgctccttggtccagagactctttgccatcagaaagggatgttcccaatctgggatggagaaaccccctttgaggccaaaagcactggcttaattctgttaattctgatctatgccaccccagtgctgaacgtctcctctcagagtgctcagcaaatacacagcccttcccatgcctcaatcaaggagggaggcccctctctgctcactgggaagcctctgggtgcttttctgctctggctcggaagagtccaaataagccttcccagctcactgggcagacctcagagtttctgctaacttagcagggttttgaggtctgtcccagaggatgtggctggcagggtgtgaagacactgggcaaaatccttccttgtgaatacagctctcagaggcagccagcctcagtggtggattcagatcccaggctctgcagggagatgtgattcagatcagctggtggatcagctccacgctctacctgtgatgtgatccccgccaagttactcaacttccccgagcttcagttgcctaatctgtaaataagactaataaagcctagattggcgagataacgtgtggaagactctcaacacagtgtctggaacatgctgcttttaagggaaatgtgattttgattatggttgaggccatttctcaacatgtagacataaaatgcggaaacatctaagatttcaataaagcaatgttttgttagtaaa

SEQ ID NO: 31241 - DNA, 1532 bp, Homo sapiens
  source 1..1532: mol_type = unassigned DNA
agttggggtaaggaggctcccatcccgagcttgcgtagtggttctgtgtggcgctgaggaatttggaaacctcaaatggctaaactattacaacctccacccaagttcctgccctcagagtggcacattgctaacaagaaccagtaccacagagcagacgctcaaaggtcccgatcagaacgcctggtcgcagaaagccagaggcttgtggatgaaattgaaaagaccacaagaaaatctcaaagcgatgtgaacaagaaactagggagaagcgcattggcattgacctggtgcacgacacagtggagcatgagctgataaaggaggctgagatcatccagggcattatggctctgctgacccgtaccttggaggaggcttccgagcagattcggatgaaccgctctgccaagtacaatcttgagaaggatttgaaggacaagtttgtggccctgaccatagatgatatctgcttctcgctcaacaacaactcaccaaacatcagatattctgagaacgccgtgaggattgagccaaactccgtgagtctggaagactggttggacttctccagcaccaatgtggagaaggctgacaagcagcggaacaactccctgatgctgaaagccctggtggatcgaatcctgtcccagacagccaatgatctgcgcaagcagtgtgatgtggtggacacggcattcaagaatgggctgaaggatacaaaggatgccagggacaagctggctgatcatctggccaaggtcatggaagagattgcttcccaggagaaaaatattacagctcttgaaaaggccatccttgaccaagaagggccagccaaggtggctcatacgcgcttggagaccaggacacaccggccgaacgtggagctgtgtcgtgatgtcgcacaatataggctaatgaaggaggttcaagagatcacccacaatgtcgcaagattgaaggaaactttagcccaagctcaggcagagctgaaagggctgcatcgcagacagcttgccctgcaggaggagatccaggtcaaagagaacaccatttatatcgacgaagtgctgtgtatgcagatgaggaaatccatcccacttcgggatggggaagaccatggggtctgggctgggggcctccgccctgatgctgtctgctaatagtagggctagttccaattctcattaaaccacattgtaaacagtagttacagtagtacagagctctcatttcaggctggcggggcctctagccagcctgctgcaacctcttggctggcattccaagcctgctcagggggctgattttggggcgagtttcttctcttatgctggtgtggtgtttgcctaacaattcaactccatattttagcacaggccactcttacaatatcacaggacttggggccccaggacagggtttcaagacatttcagttcagattcaattcaataaagtagttgggctggatcacctgtgtagaccatgcccctcttgctcatgagatgggatgctaacctttctctt

SEQ ID NO: 31242 - DNA, 1694 bp, Homo sapiens
  source 1..1694: mol_type = unassigned DNA
gtggtaggctgcgaccccttcctcccacagccccttcccgcccctcgccgggcatccgccgacagaacaggagagatttacaaatagtgttttggcatcatggaacgtgtaggttgtactttaacgacaacttacgcccaccctagaccaacaccaaccaactttctaccagccatcagtaccatggcctcaagctacagggaccgctttccccactccaatttgacccatagcctgagccttccttggagacccagcacatactacaaagtcgcctccaattccccaagcgtggccccgtactgcaccagatcacagagggtgtccgagaataccatgcttccctttgtttccaacagaaccactttcttcacaagatacacaccggatgactggtacaggtccaatttaaccaactatcaagagtccaacacttcccgacataattcggagaaactaagagtggatacatctcgcctgattcaagacaaatatcaacaaacaagaaaaactcaggcagacacaacccaaaatctgggagaacgtgtcaatgacatagggttttggaaatctgaaatcattcatgagttggatgaaatgattggagagacaaatgcacttactgatgtgaagaaaagactggagcgggctttgatggagactgaagcccctcttcaggtagcccgagaatgtctatttcatcgagaaaagagaatgggaatcgacctagttcacgatgaagttgaagcacaactgctgacggaagttgatactattctgtgttgtcaagaaagaatgaagctacatttggataaggctattgcccaacttgcagccaacagagcgtcccagcatgagctggaaaaggacctgagtgacaaacagacggcttaccggatcgacgacaaatgccaccacctgcgcaacacatcagacggtgtcggctacttccgcggagtggagagggtcgatgcaactgtctcagtgcctgagtcctgggccaaatttacagatgacaatattctccgctcccagagtgaacgggcagcttccgctaagctaagagacgacattgaaaacctcttggttgtgactgccaatgagatgtggaatcaattcaacaaagtgaacttgtctttcaccaatcgcattgctgagactgcagatgctaagaataagattcagacgcacttagcaaagaccctgcaggagattttccagactgaaatgaccatagaatccatcaagaaggccatcaaggacaagactgccttcctgaaggtggctcagaccagactggatgagcgcacaagacggccgaacattgagttgtgccgagacatggctcagctacgccttgttaacgaggtacacgaggttgacgacaccatccagaccctgcagcagcgcctgagggatgcagaggacaccctgcagtcgctggtccacatcaaagccacactcgagtatgacctggctgtcaaagccaattccctgtacatcgaccaggaaaaatgcatgagcatgcgcaagagctaccccaacaccctccggctggtcggcttctgctagggaccccaccgggtgtggttttgatacccctaagttaaggctgagccagagcactgtctcagcatttgaaccgaatgctaatatagtcacttattaaaggattatgctgatggaaatgtacc

SEQ ID NO: 31243 - DNA, 1785 bp, Homo sapiens
  source 1..1785: mol_type = unassigned DNA
acagataggaaaggcggggccagggccagactggtctgggccccagtcgagggctgcaggtggtaggctgcgaccccttcctcccacagccccttcccgcccctcgccgggcatccgccgacaggtacataccaagaaattgaattgctgagtcacaggagagatttacaaatagtgttttggcatcatggaacgtgtaggttgtactttaacgacaacttacgcccaccctagaccaacaccaaccaactttctaccagccatcagtaccatggcctcaagctacagggaccgctttccccactccaatttgacccatagcctgagccttccttggagacccagcacatactacaaagtcgcctccaattccccaagcgtggccccgtactgcaccagatcacagagggtgtccgagaataccatgcttccctttgtttccaacagaaccactttcttcacaagatacacaccggatgactggtacaggtccaatttaaccaactatcaagagtccaacacttcccgacataattcggagaaactaagagtggatacatctcgcctgattcaagacaaatatcaacaaacaagaaaaactcaggcagacacaacccaaaatctgggagaacgtgtcaatgacatagggttttggaaatctgaaatcattcatgagttggatgaaatgattggagagacaaatgcacttactgatgtgaagaaaagactggagcgggctttgatggagactgaagcccctcttcaggtagcccgagaatgtctatttcatcgagaaaagagaatgggaatcgacctagttcacgatgaagttgaagcacaactgctgacggaagttgatactattctgtgttgtcaagaaagaatgaagctacatttggataaggctattgcccaacttgcagccaacagagcgtcccagcatgagctggaaaaggacctgagtgacaaacagacggcttaccggatcgacgacaaatgccaccacctgcgcaacacatcagacggtgtcggctacttccgcggagtggagagggtcgatgcaactgtctcagtgcctgagtcctgggccaaatttacagatgacaatattctccgctcccagagtgaacgggcagcttccgctaagctaagagacgacattgaaaacctcttggttgtgactgccaatgagatgtggaatcaattcaacaaagtgaacttgtctttcaccaatcgcattgctgagactgcagatgctaagaataagattcagacgcacttagcaaagaccctgcaggagattttccagactgaaatgaccatagaatccatcaagaaggccatcaaggacaagactgccttcctgaaggtggctcagaccagactggatgagcgcacaagacggccgaacattgagttgtgccgagacatggctcagctacgccttgttaacgaggtacacgaggttgacgacaccatccagaccctgcagcagcgcctgagggatgcagaggacaccctgcagtcgctggtccacatcaaagccacactcgagtatgacctggctgtcaaagccaattccctgtacatcgaccaggaaaaatgcatgagcatgcgcaagagctaccccaacaccctccggctggtcggcttctgctagggaccccaccgggtgtggttttgatacccctaagttaaggctgagccagagcactgtctcagcatttgaaccgaatgctaatatagtcacttattaaaggattatgctgatggaaatgtaccaac

SEQ ID NO: 31244 - DNA, 583 bp, Homo sapiens
  source 1..583: mol_type = unassigned DNA
actccagcctgggggacagagcgagactccatctcaaaaaaaaaaaaaagaattgactgagttagaatttagagagtaagttaatcattgtgaaagatgcgcaccaccaaagagagatttacaaatagtgttttggcatcatggaacgtgtaggttgtactttaacgacaacttacgcccaccctagaccaacaccaaccaactttctaccagccatcagtaccatggcctcaagctacagggaccgctttccccactccaatttgacccatagcctgagccttccttggagacccagcacatactacaaagtcgcctccaattccccaagcgtggccccgtactgcaccagatcacagagggtgtccgagaataccatgcttccctttgtttccaacagaaccactttcttcacaagatacacaccggatgactggtacaggtccaatttaaccaactatcaagagtccaacacttcccgacataattcggagaaactaagagtggatacatctcgcctgattcaagacaaatatcaacaaacaagaaaaactcaggcagacacaacccaaaatctgggaga

SEQ ID NO: 31245 - DNA, 564 bp, Homo sapiens
  source 1..564: mol_type = unassigned DNA
aaaggcggggccagggccagactggtctgggccccagtcgagggctgcaggtggtaggctgcgaccccttcctcccacagccccttcccgcccctcgccgggcatccgccgacaggagagatttacaaatagtgttttggcatcatggaacgtgtaggttgtactttaacgacaacttacgcccaccctagaccaacaccaaccaactttctaccagccatcagtaccatggcctcaagctacagggaccgctttccccactccaatttgacccatagcctgagccttccttggagacccagcacatactacaaagtcgcctccaattccccaagcgtggccccgtactgcaccagatcacagagggtgtccgagaataccatgcttccctttgtttccaacagaaccactttcttcacaagatacacaccggatgactggtacaggtccaatttaaccaactatcaagagtccaacacttcccgacataattcggagaaactaagagtggatacatctcgcctgattcaagacaaatatcaacaaacaagaaaaactcaggca

SEQ ID NO: 31246 - DNA, 483 bp, Homo sapiens
  source 1..483: mol_type = unassigned DNA
gagggctgcaggtggtaggctgcgaccccttcctcccacagccccttcccgcccctcgccgggcatccgccgacaggctggagtgcaatggcatgatctcagctcaccggaacctccgcctcccagattcaagcgattctcctgcctcagccccctgagtagctgggattacaggtacataccaagaaattgaattgctgagtcacaggagagatttacaaatagtgttttggcatcatggaacgtgtaggttgtactttaacgacaacttacgcccaccctagaccaacaccaaccaactttctaccagccatcagtaccatggcctcaagctacagggaccgctttccccactccaatttgacccatagcctgagccttccttggagacccagcacatactacaaagtcgcctccaattccccaagcgtggccccgtactgcaccagatcacagagggtgtccgagaataccatgcttccc

SEQ ID NO: 31247 - DNA, 3253 bp, Homo sapiens
  source 1..3253: mol_type = unassigned DNA
cgccccagaggctcaagaaaacccgcgggagcctcgcccggacccaggaactcgtgctcggggccaaccggctgggccgcgatcgcgtttcgtccggggccgcggcggccgtggggaatcggctgcagcgaatcggtggcgcgcggcgcctgagcgcgctgcagtcacccgggagccgggtccaggtcgtcttcccgtgacgcccagatctgtcctgcaggatggagccagcaccctcagaggttcgactcgccgtccgggaagccattcatgccctctcgtcttcggaggatggcggccacatcttctgcaccctggagtccctgaagcggtatctcggtgagatggagcctccagcgctcccgagggagaaggaggagtttgcctcggcccacttctcgcctgtcctcagatgtcttgccagcaggctgagcccagcctggctggagctgctgccccatggccgcctggaggagctgtgggccagcttcttcctggagggcccggcggaccaagccttcctggtgttgatggagaccatcgagggtgctgcgggccccagcttccggctgatgaagatggcgcggctgctggccagattcctgcgcgagggccggctggcagtgctgatggaggcgcagtgtcggcagcagacgcagcccggcttcatcctgctccgggagacgctgctgggcaaggtggtggccctgcccgatcacctgggcaaccgcctgcagcaggagaacttggccgagttcttcccccagaactacttccgcctgctcggcgaggaggtcgtccgggtgctgcaggcggttgtggactctctccaaggtggcctggattcctccgtgtccttcgtgtctcaggtccttgggaaagcctgtgtccacgggaggcagcaggagatcctgggcgtgctggtaccccggctggcagcgctcacccagggcagctacctgcaccagcgcgtctgctggcgcctggtggagcaagtgccggaccgggccatggaggctgtgctgaccgggctggtggaggccgcactggggcctgaggtcctttcgagactgctggggaacctggtggtgaagaacaagaaggcccagtttgtgatgacccagaagcttctgttcttacagtcccggctcacgacgcccatgctgcagagcctgctgggccatctggccatggacagccagcggcgcccgctcctgctgcaggtgctgaaggagctgttggagacgtggggcagcagcagtgccatccgccacactcccctgccgcagcagcgccacgtcagcaaggctgtcctcatctgcctggcgcaactcggggagccggaactgcgggacagccgggatgaactgctggccagcatgatggcgggcgtgaagtgccgcctggacagtagcctgccccccgtgcgacgcctgggcatgatcgtggcagaggtcgttagtgcccggatccaccccgaggggcctcccctgaaattccagtacgaagaggatgaactgagcctcgagctgctggccttggcctccccccagcctgcgggtgacggcgcctcggaggcgggcacgtccctcgttccagccacggcagagccccctgcagagacccccgcagagatcgtggatggcggcgtcccccaagcacagctggcgggctctgactcggacctggacagcgatgatgagtttgtcccctacgacatgtcgggggacagagagctgaagagcagcaaggctcctgcctacgtccgggactgcgtggaagccctgaccacgtctgaggacatagagcgctgggaggcagccctgcgggcccttgagggcctggtctacaggagccccacagccactcgggaggtgagcgtggagctggccaaggtgcttctgcatctggaggagaagacctgtgtggtgggatttgcagggctgcgccagagagccctggtggccgtcacggtcacagacccggccccggtggccgactatctgacctcacagttctatgccctcaactacagcctccggcagcgcatggacatcctggatgtgctgactctggctgcccaggagctgtctaggcctgggtgcctcgggaggactccccaacctggctccccaagtcccaacaccccgtgcctgccagaggcagccgtctctcagcctggcagtgccgtggcgtctgactggcgggtggtggtggaggagcggatcagaagcaagacccagcggctctccaagggtggcccgaggcagggcccggcaggcagccccagcagattcaactccgtggccggccacttcttcttccccctccttcagcgctttgacaggcctctggtgaccttcgacctcttgggagaagaccagctggttctcggaaggctggcgcacaccttaggggccctgatgtgcctggctgttaacaccacggtggctgtggccatgggcaaggccctgctggaattcgtgtgggcccttcgcttccacatcgatgcctacgtgcgccaggggctgttgtcggccgtctcctccgtcctgctcagcctgcctgctgcgcgcctgctggaggacctgatggacgagctgctggaagcccggtcctggctggcggacgtggctgagaaagacccggacgaggactgcaggacgctggcactgagggccctgctgcttctgcagagactcaagaacaggctcctcccacccgcgtctccctagtccctggaggcctccccaggaccaccctcgccgacagcaaggcaggcggctgagcagcggcctggagcagcagagccaggctttgtagcgaggccaggtcttcggccgcatccggtacggagagtgcagatgcaggaaggcccggcctgccgctatttatagtgcagccagtccgctaaaaatacactgggcctgggcactgcccgccgggacatggcagcctggacgtggggctggggctgtgggcgctgctggcggggttgactcttccagtgagggcagaaccaggctggcaggaggggaggacggtgtacctgctgctcagagcccccaaggctctcctctgagagccaccaagcaggacagagcagctcttgtcccaggtccctcgggctgagcgccgtgtcaccaggagaatagtgctcacagcccaggcagggtgtgtggctcctggatgggctcgtggggcgggatgggacagggcacgggctctcagaaaataaactgctttattggaa

SEQ ID NO: 31248 - DNA, 3036 bp, Homo sapiens
  source 1..3036: mol_type = unassigned DNA
gatgcgccctcccgcctggcgtcctccgcagattcgcgctgagaggcccgcggagacccgccccagaggctcaagaaaacccgcgggagcctcgcccggacccaggaactcgtgctcggggccaaccggctgggccgcgatcgcgtttcgtccggggccgcggcggccgtggggaatcggctgcagcgaatcggtggcgcgcggcgcctgagcgcgctgcagtcacccgggagccgggtccaggtcgtcttcccgtgacgcccagatctgtcctgcaggatggagccagcaccctcagaggttcgactcgccgtccgggaagccattcatgccctctcgtcttcggaggatggcggccacatcttctgcaccctggagtccctgaagcggtatctcggtgagatggagcctccagcgctcccgagggagaaggaggagtttgcctcggcccacttctcgcctgtcctcagatgtcttgccagcaggctgagcccagcctggctggagctgctgccccatggccgcctggaggagctgtgggccagcttcttcctggagggcccggcggaccaagccttcctggtgttgatggagaccatcgagggtgctgcgggccccagcttccggctgatgaagatggcgcggctgctggccagattcctgcgcgagggccggctggcagtgctgatggaggcgcagtgtcggcagcagacgcagcccggcttcatcctgctccgggagacgctgctgggcaaggtggtggccctgcccgatcacctgggcaaccgcctgcagcaggagaacttggccgagttcttcccccagaactacttccgcctgctcggcgaggaggtcgtccgggtgctgcaggcggttgtggactctctccaaggtggcctggattcctccgtgtccttcgtgtctcaggtccttgggaaagcctgtgtccacgggaggcagcaggagatcctgggcgtgctggtaccccggctggcagcgctcacccagggcagctacctgcaccagcgcgtctgctggcgcctggtggagcaagtgccggaccgggccatggaggctgtgctgaccgggctggtggaggccgcactggggcctgaggtcctttcgagactgctggggaacctggtggtgaagaacaagaaggcccagtttgtgatgacccagaagcttctgttcttacagtcccggctcacgacgcccatgctgcagagcctgctgggccatctggccatggacagccagcggcgcccgctcctgctgcaggtgctgaaggagctgttggagacgtggggcagcagcagtgccatccgccacactcccctgccgcagcagcgccacgtcagcaaggctgtcctcatctgcctggcgcaactcggggagccggaactgcgggacagccgggatgaactgctggccagcatgatggcgggcgtgaagtgccgcctggacagtagcctgccccccgtgcgacgcctgggcatgatcgtggcagaggtcgttagtgcccggatccaccccgaggggcctcccctgaaattccagtacgaagaggatgaactgagcctcgagctgctggccttggcctccccccagcctgcgggtgacggcgcctcggaggcgggcacgtccctcgttccagccacggcagagccccctgcagagacccccgcagagatcgtggatggcggcgtcccccaagcacagctggcgggctctgactcggacctggacagcgatgatgagtttgtcccctacgacatgtcgggggacagagagctgaagagcagcaaggctcctgcctacgtccgggactgcgtggaagtcctggatgtgctgactctggctgcccaggagctgtctaggcctgggtgcctcgggaggactccccaacctggctccccaagtcccaacaccccgtgcctgccagaggcagccgtctctcagcctggcagtgccgtggcgtctgactggcgggtggtggtggaggagcggatcagaagcaagacccagcggctctccaagggtggcccgaggcagggcccggcaggcagccccagcagattcaactccgtggccggccacttcttcttccccctccttcagcgctttgacaggcctctggtgaccttcgacctcttgggagaagaccagctggttctcggaaggctggcgcacaccttaggggccctgatgtgcctggctgttaacaccacggtggctgtggccatgggcaaggccctgctggaattcgtgtgggcccttcgcttccacatcgatgcctacgtgcgccaggggctgttgtcggccgtctcctccgtcctgctcagcctgcctgctgcgcgcctgctggaggacctgatggacgagctgctggaagcccggtcctggctggcggacgtggctgagaaagacccggacgaggactgcaggacgctggcactgagggccctgctgcttctgcagagactcaagaacaggctcctcccacccgcgtctccctagtccctggaggcctccccaggaccaccctcgccgacagcaaggcaggcggctgagcagcggcctggagcagcagagccaggctttgtagcgaggccaggtcttcggccgcatccggtacggagagtgcagatgcaggaaggcccggcctgccgctatttatagtgcagccagtccgctaaaaatacactgggcctgggcactgcccgccgggacatggcagcctggacgtggggctggggctgtgggcgctgctggcggggttgactcttccagtgagggcagaaccaggctggcaggaggggaggacggtgtacctgctgctcagagcccccaaggctctcctctgagagccaccaagcaggacagagcagctcttgtcccaggtccctcgggctgagcgccgtgtcaccaggagaatagtgctcacagcccaggcagggtgtgtggctcctggatgggctcgtggggcgggatgggacagggcacgggctctcagaaaataaactgctttattgg

SEQ ID NO: 31249 - DNA, 3825 bp, Homo sapiens
  source 1..3825: mol_type = unassigned DNA
acttagcgcgtcacttccggcgaggcagaggaggcgggagagtgagagaaaggctggaagacgagcctgcaggatgtttcctcaatgaggggaaggctgctgcacaatggcagtttttgatactcctgaggaggcctttggtgtcttacgtccagtctgtgttcagctcacaaagacccagacagtggagaatgtggagcatctgcagacacgactacaagctgtgagtgacagtgcccttcaggaacttcagcagtacatcctcttccctctgcgatttaccctgaagaccccaggtcccaaaagagagcgtttgatccaaagtgtggtggaatgcctcacatttgtcctttcttcaacatgtgtgaaagaacaggagcttctccaggaactcttttcagaactctctgcttgtctgtattcacccagctcccaaaaacctgcggctgtgtccgaggagttgaaattggctgtgatccagggacttagcacattaatgcactcagcttatggggacatcattctgactttttatgagccctccattctgccacgtttaggatttgctgtatctttactgttaggccttgcagaacaggagaaatcaaagcaaattaaaattgctgccttaaaatgtttacaggttctactcttgcagtgtgattgtcaggaccatccaaggtcattggatgaacttgaacaaaagcagctgggggatttgtttgcctcttttttacctggaatctcaactgcactgaccaggcttatcacaggagactttaaacaaggtcacagcattgtcgtatcttccctaaagatcttttacaagacagtgagcttcattatggctgatgaacagctcaaaagaatctcaaaggtccaagcaaaacctgcagttgagcacagagtagcagagctgatggtttacagggaagcagattgggtaaaaaagactggcgacaagttgactatccttattaaaaagataattgagtgtgtttctgttcacccacactggaaggtgagactggaactggtagaacttgtggaggaccttcttttgaagtgcagtcaatcattggtcgaatgtgctggtccccttctgaaggccttagtgggactagtaaatgatgagagtcctgaaatccaagcccagtgcaataaagttctgagacattttgcagatcaaaaagtagtggtgggcaacaaagccctcgctgacatcttgtcagaaagcctgcattcccttgccacatctcttcctcgcctaatgaactcccaagatgaccagggcaaattctctactctttccttgttacttggttatctgaaactcttgggcccaaaaataaactttgtcctcaactctgtggcccatctccagcggctttccaaagcactcatccaagttctagagctagacgtggctgacatcaagattgttgaggaacggcgttggaactctgatgatctgaatgcttctccaaagacctcagccacacagccttggaaccgcatccagaggagatatttccgcttcttcactgatgagagaatcttcatgctcttgaggcaggtttgtcagctacttggttattatgggaatctttatttgcttgtggatcactttatggaactttaccatcaatctgtggtttaccggaagcaagctgccatgatccttaatgaactggttacaggggctgctgggctggaggttgaggatcttcacgaaaaacatattaaaacaaacccagaagaactgagagagattgtgacatctatacttgaagaatacacaagtcaagaaaattggtatttggttacctgtcttgaaactgaggaaatgggagaggagctgatgatggagcacccaggcctccaagccatcacgtctggtgaacacacctgccaagttacatcttttctagccttctcaaagccaagtcccactatttgctccatgaacagtaacatctggcaaatatgcattcagttggaaggaattggccagtttgcatatgcactaggaaaagacttctgtttgctcttgatgtcagccctttatccagtactggagaaggctggagaccaaaccctactcattagtcaggtggctaccagcaccatgatggacgtttgccgtgcttgtggctacgactccctgcagcacctgatcaatcaaaattcagactatttagtgaatgggatctctttaaatctgcgtcatctggctctgcatcctcataccccaaaggtcctggaagtcatgctgcggaactcagatgctaacctgcttcctttggtggcagatgtggttcaagatgtcttggccaccctggaccaattttacgataagagagctgcttcctttgtcagcgttctgcatgctctgatggcagcattagcccagtggttcccagacacaggtaatcttgggcacctccaagagcaaagtttaggagaagagggaagtcatttgaaccaaagaccagcagctcttgagaagagcaccaccacagctgaagacatcgaacagtttttgctgaactacctcaaagagaaggatgtggcagatggaaatgtctcggattttgataatgaagaagaggaacagtcagtccctcccaaagtggatgagaatgacacccgtccagatgtggagccaccactgccattgcagatccaaatagccatggacgtgatggaacgctgcatccacttgttgtcagataaaaatctgcaaatccgcctgaaggtcttggatgtgctggatctgtgtgtggttgttcttcagtcccacaaaaaccagctgcttcccttggctcatcaggcctggccctcgctcgttcaccgactcacacgggacgcccccctggcagtgcttagagccttcaaggttttacgtaccctgggaagcaagtgtggtgactttcttcgcagccggttctgcaaagatgtcctgccaaagctggctggctccctagtcacccaggcccccatcagtgccagggctggaccagtttactcgcacacgctggccttcaagttgcagctggctgtcttacagggcctgggccccctctgtgagagactggacctaggtgagggtgacctgaataaagtggctgatgcctgcttgatttacctcagtgtcaaacagcccgtgaaattacaagaggctgccaggagcgtcttcctccacttgatgaaggtggacccagactccacctggttcctcctgaacgagctttactgccccgtgcagttcacacctccccaccccagcctccaccctgtgcagctgcacggggccagcgggcagcagaacccctacacgaccaacgtgctccagctgctcaaggagctgcagtgaccctgctcccccaccacagaggccaccgatccctcccctactgccagccagaagctgggctgaccccaccccggccataggcggtggcagcggcagcagagaaggtgaattagttagccaatcgatttataaattgatcgatcacacaactgcttagaaatggattgaaggaaagtagctgactattatttatgtttcataccttgtgttgtcaagtgacattgtctggtggctctaagggtttaaccccttagcctaccatctctatagccccagctccctcacaggccacacacacacacacacaagaggtcagttcccctccatctgcatacacctccctgtcttcaaataatgagatggaactaatttgttttacctaacctgatctttgggaaacaaacggaaataaagacacttcttggatgaaaagtatgatcaaaagctca

SEQ ID NO: 31250 - DNA, 3958 bp, Homo sapiens
  source 1..3958: mol_type = unassigned DNA
gcgtcacttccggcgaggcagaggaggcgggagagtgagagaaaggctggaagacgagacctgctcactctgtcaccgaggctagagtacagtggcacaatcacagctcattgcagcctcaacctcccaggctcaatcgatccttccaactgagcctccctagcagctgggactattagtgcacaccaccacacctagcctgcaggatgtttcctcaatgaggggaaggctgctgcacaatggcagtttttgatactcctgaggaggcctttggtgtcttacgtccagtctgtgttcagctcacaaagacccagacagtggagaatgtggagcatctgcagacacgactacaagctgtgagtgacagtgcccttcaggaacttcagcagtacatcctcttccctctgcgatttaccctgaagaccccaggtcccaaaagagagcgtttgatccaaagtgtggtggaatgcctcacatttgtcctttcttcaacatgtgtgaaagaacaggagcttctccaggaactcttttcagaactctctgcttgtctgtattcacccagctcccaaaaacctgcggctgtgtccgaggagttgaaattggctgtgatccagggacttagcacattaatgcactcagcttatggggacatcattctgactttttatgagccctccattctgccacgtttaggatttgctgtatctttactgttaggccttgcagaacaggagaaatcaaagcaaattaaaattgctgccttaaaatgtttacaggttctactcttgcagtgtgattgtcaggaccatccaaggtcattggatgaacttgaacaaaagcagctgggggatttgtttgcctcttttttacctggaatctcaactgcactgaccaggcttatcacaggagactttaaacaaggtcacagcattgtcgtatcttccctaaagatcttttacaagacagtgagcttcattatggctgatgaacagctcaaaagaatctcaaaggtccaagcaaaacctgcagttgagcacagagtagcagagctgatggtttacagggaagcagattgggtaaaaaagactggcgacaagttgactatccttattaaaaagataattgagtgtgtttctgttcacccacactggaaggtgagactggaactggtagaacttgtggaggaccttcttttgaagtgcagtcaatcattggtcgaatgtgctggtccccttctgaaggccttagtgggactagtaaatgatgagagtcctgaaatccaagcccagtgcaataaagttctgagacattttgcagatcaaaaagtagtggtgggcaacaaagccctcgctgacatcttgtcagaaagcctgcattcccttgccacatctcttcctcgcctaatgaactcccaagatgaccagggcaaattctctactctttccttgttacttggttatctgaaactcttgggcccaaaaataaactttgtcctcaactctgtggcccatctccagcggctttccaaagcactcatccaagttctagagctagacgtggctgacatcaagattgttgaggaacggcgttggaactctgatgatctgaatgcttctccaaagacctcagccacacagccttggaaccgcatccagaggagatatttccgcttcttcactgatgagagaatcttcatgctcttgaggcaggtttgtcagctacttggttattatgggaatctttatttgcttgtggatcactttatggaactttaccatcaatctgtggtttaccggaagcaagctgccatgatccttaatgaactggttacaggggctgctgggctggaggttgaggatcttcacgaaaaacatattaaaacaaacccagaagaactgagagagattgtgacatctatacttgaagaatacacaagtcaagaaaattggtatttggttacctgtcttgaaactgaggaaatgggagaggagctgatgatggagcacccaggcctccaagccatcacgtctggtgaacacacctgccaagttacatcttttctagccttctcaaagccaagtcccactatttgctccatgaacagtaacatctggcaaatatgcattcagttggaaggaattggccagtttgcatatgcactaggaaaagacttctgtttgctcttgatgtcagccctttatccagtactggagaaggctggagaccaaaccctactcattagtcaggtggctaccagcaccatgatggacgtttgccgtgcttgtggctacgactccctgcagcacctgatcaatcaaaattcagactatttagtgaatgggatctctttaaatctgcgtcatctggctctgcatcctcataccccaaaggtcctggaagtcatgctgcggaactcagatgctaacctgcttcctttggtggcagatgtggttcaagatgtcttggccaccctggaccaattttacgataagagagctgcttcctttgtcagcgttctgcatgctctgatggcagcattagcccagtggttcccagacacaggtaatcttgggcacctccaagagcaaagtttaggagaagagggaagtcatttgaaccaaagaccagcagctcttgagaagagcaccaccacagctgaagacatcgaacagtttttgctgaactacctcaaagagaaggatgtggcagatggaaatgtctcggattttgataatgaagaagaggaacagtcagtccctcccaaagtggatgagaatgacacccgtccagatgtggagccaccactgccattgcagatccaaatagccatggacgtgatggaacgctgcatccacttgttgtcagataaaaatctgcaaatccgcctgaaggtcttggatgtgctggatctgtgtgtggttgttcttcagtcccacaaaaaccagctgcttcccttggctcatcaggcctggccctcgctcgttcaccgactcacacgggacgcccccctggcagtgcttagagccttcaaggttttacgtaccctgggaagcaagtgtggtgactttcttcgcagccggttctgcaaagatgtcctgccaaagctggctggctccctagtcacccaggcccccatcagtgccagggctggaccagtttactcgcacacgctggccttcaagttgcagctggctgtcttacagggcctgggccccctctgtgagagactggacctaggtgagggtgacctgaataaagtggctgatgcctgcttgatttacctcagtgtcaaacagcccgtgaaattacaagaggctgccaggagcgtcttcctccacttgatgaaggtggacccagactccacctggttcctcctgaacgagctttactgccccgtgcagttcacacctccccaccccagcctccaccctgtgcagctgcacggggccagcgggcagcagaacccctacacgaccaacgtgctccagctgctcaaggagctgcagtgaccctgctcccccaccacagaggccaccgatccctcccctactgccagccagaagctgggctgaccccaccccggccataggcggtggcagcggcagcagagaaggtgaattagttagccaatcgatttataaattgatcgatcacacaactgcttagaaatggattgaaggaaagtagctgactattatttatgtttcataccttgtgttgtcaagtgacattgtctggtggctctaagggtttaaccccttagcctaccatctctatagccccagctccctcacaggccacacacacacacacacaagaggtcagttcccctccatctgcatacacctccctgtcttcaaataatgagatggaactaatttgttttacctaacctgatctttgggaaacaaacggaaataaagacacttcttggatgaaaagtatgatcaaaagctca

SEQ ID NO: 31251 - DNA, 3791 bp, Homo sapiens
  source 1..3791: mol_type = unassigned DNA
cttgctttgaacttgacatttttactgaacagtttccttcctccagcctgcaggatgtttcctcaatgaggggaaggctgctgcacaatggcagtttttgatactcctgaggaggcctttggtgtcttacgtccagtctgtgttcagctcacaaagacccagacagtggagaatgtggagcatctgcagacacgactacaagctgtgagtgacagtgcccttcaggaacttcagcagtacatcctcttccctctgcgatttaccctgaagaccccaggtcccaaaagagagcgtttgatccaaagtgtggtggaatgcctcacatttgtcctttcttcaacatgtgtgaaagaacaggagcttctccaggaactcttttcagaactctctgcttgtctgtattcacccagctcccaaaaacctgcggctgtgtccgaggagttgaaattggctgtgatccagggacttagcacattaatgcactcagcttatggggacatcattctgactttttatgagccctccattctgccacgtttaggatttgctgtatctttactgttaggccttgcagaacaggagaaatcaaagcaaattaaaattgctgccttaaaatgtttacaggttctactcttgcagtgtgattgtcaggaccatccaaggtcattggatgaacttgaacaaaagcagctgggggatttgtttgcctcttttttacctggaatctcaactgcactgaccaggcttatcacaggagactttaaacaaggtcacagcattgtcgtatcttccctaaagatcttttacaagacagtgagcttcattatggctgatgaacagctcaaaagaatctcaaaggtccaagcaaaacctgcagttgagcacagagtagcagagctgatggtttacagggaagcagattgggtaaaaaagactggcgacaagttgactatccttattaaaaagataattgagtgtgtttctgttcacccacactggaaggtgagactggaactggtagaacttgtggaggaccttcttttgaagtgcagtcaatcattggtcgaatgtgctggtccccttctgaaggccttagtgggactagtaaatgatgagagtcctgaaatccaagcccagtgcaataaagttctgagacattttgcagatcaaaaagtagtggtgggcaacaaagccctcgctgacatcttgtcagaaagcctgcattcccttgccacatctcttcctcgcctaatgaactcccaagatgaccagggcaaattctctactctttccttgttacttggttatctgaaactcttgggcccaaaaataaactttgtcctcaactctgtggcccatctccagcggctttccaaagcactcatccaagttctagagctagacgtggctgacatcaagattgttgaggaacggcgttggaactctgatgatctgaatgcttctccaaagacctcagccacacagccttggaaccgcatccagaggagatatttccgcttcttcactgatgagagaatcttcatgctcttgaggcaggtttgtcagctacttggttattatgggaatctttatttgcttgtggatcactttatggaactttaccatcaatctgtggtttaccggaagcaagctgccatgatccttaatgaactggttacaggggctgctgggctggaggttgaggatcttcacgaaaaacatattaaaacaaacccagaagaactgagagagattgtgacatctatacttgaagaatacacaagtcaagaaaattggtatttggttacctgtcttgaaactgaggaaatgggagaggagctgatgatggagcacccaggcctccaagccatcacgtctggtgaacacacctgccaagttacatcttttctagccttctcaaagccaagtcccactatttgctccatgaacagtaacatctggcaaatatgcattcagttggaaggaattggccagtttgcatatgcactaggaaaagacttctgtttgctcttgatgtcagccctttatccagtactggagaaggctggagaccaaaccctactcattagtcaggtggctaccagcaccatgatggacgtttgccgtgcttgtggctacgactccctgcagcacctgatcaatcaaaattcagactatttagtgaatgggatctctttaaatctgcgtcatctggctctgcatcctcataccccaaaggtcctggaagtcatgctgcggaactcagatgctaacctgcttcctttggtggcagatgtggttcaagatgtcttggccaccctggaccaattttacgataagagagctgcttcctttgtcagcgttctgcatgctctgatggcagcattagcccagtggttcccagacacaggtaatcttgggcacctccaagagcaaagtttaggagaagagggaagtcatttgaaccaaagaccagcagctcttgagaagagcaccaccacagctgaagacatcgaacagtttttgctgaactacctcaaagagaaggatgtggcagatggaaatgtctcggattttgataatgaagaagaggaacagtcagtccctcccaaagtggatgagaatgacacccgtccagatgtggagccaccactgccattgcagatccaaatagccatggacgtgatggaacgctgcatccacttgttgtcagataaaaatctgcaaatccgcctgaaggtcttggatgtgctggatctgtgtgtggttgttcttcagtcccacaaaaaccagctgcttcccttggctcatcaggcctggccctcgctcgttcaccgactcacacgggacgcccccctggcagtgcttagagccttcaaggttttacgtaccctgggaagcaagtgtggtgactttcttcgcagccggttctgcaaagatgtcctgccaaagctggctggctccctagtcacccaggcccccatcagtgccagggctggaccagtttactcgcacacgctggccttcaagttgcagctggctgtcttacagggcctgggccccctctgtgagagactggacctaggtgagggtgacctgaataaagtggctgatgcctgcttgatttacctcagtgtcaaacagcccgtgaaattacaagaggctgccaggagcgtcttcctccacttgatgaaggtggacccagactccacctggttcctcctgaacgagctttactgccccgtgcagttcacacctccccaccccagcctccaccctgtgcagctgcacggggccagcgggcagcagaacccctacacgaccaacgtgctccagctgctcaaggagctgcagtgaccctgctcccccaccacagaggccaccgatccctcccctactgccagccagaagctgggctgaccccaccccggccataggcggtggcagcggcagcagagaaggtgaattagttagccaatcgatttataaattgatcgatcacacaactgcttagaaatggattgaaggaaagtagctgactattatttatgtttcataccttgtgttgtcaagtgacattgtctggtggctctaagggtttaaccccttagcctaccatctctatagccccagctccctcacaggccacacacacacacacacaagaggtcagttcccctccatctgcatacacctccctgtcttcaaataatgagatggaactaatttgttttacctaacctgatctttgggaaacaaacggaaataaagacacttcttggatgaaaagt

SEQ ID NO: 31252 - DNA, 2242 bp, Homo sapiens
  source 1..2242: mol_type = unassigned DNA
agacaccggcgggcgcgagccgttgcaggtacctgggggtggttaagttggtgacatggctcagaagtttatttctttaaatttttaagttttttttctttttagtcttcagaaaggcaacagtagtcttttaacgtcactgttaaaagtgtaagactcttttactccctgagagtcccctttccctttcttgcgtcctttcctctttattcttttttttttttttttttttactgagacggagtctcactctgtcgcccaggctggagtgcagtggcgcgatctcggctcactgcaaactccgcctcccgggttcaccctttctctttattcttatcccggtcagactcgccccctcctccaagacatctctctgttttattttatttgattttagttctctttgggtgatcgctccttccctcttcaacggatccctccccgcctccatcctcgttctgtgggagagaccagccttctggtgctgcagtcaggaatggagcttgacagcgctctggaagccccatcgcaggaagactctaatttgtccgaggagttgtctcactccgcctttggacaggccttctccaagattttacactgtcttgcccgcccggaggcacgacgaggcaatgtaaaagatgcagttcttaaagacctcggtgatctaatagaagccacagaatttgataggttatttgaggggactggtgcacggctccgcggaatgccggagacactggggcaggtagcaaaagccctggagaagtatgcagccccctccaaggaggaggaaggtggaggtgatgggcactccgaagcggccgagaaagcagcccaagttgggttactgtttcttaaactgttagggaaagttgagactgctaagaattccctggtcggccctgcatggcagacgggcctgcatcacttggcaggacccgtttatatttttgccatcacacacagcttggagcaaccatggaccactccgagatctcgggaagttgctagggaggtgctcacctcactgcttcaagttactgaatgcggttctgtggcaggattcctacatggagaaaatgaagatgagaaagggagactttcggtgatactagggcttctcaaacccgacttgtataaggaatcctggaagaataaccctgccatcaaacatgttttctcatggactctgcaacaggtcactcggccctggctgagccagcatctggaaagggtacttcccgcatcattggtcatttcagatgactatcagactgagaacaaaatcctgggtgtacactgtctccatcacattgtgcttaatgtgccagctgctgatttgctccagtataacagagcccaggtcctataccatgccatttccaaccacctgtacacaccagagcaccacctcattcaggctgtgctcctgtgtctgctggatttattccccatcctggagaaaaccctgcactggaaaggagatggagctcgacccaccacccattgtgatgaggtcctgcggctgatcctgacccacatggagccagagcaccgccttcttttacgcaggacctacgcaagaaacctgccggctttcgtgaacaggttggggatcctaactgtccggcacttaaagaggctggagagagtcatcattggttatctggaggtttatgatggacctgaggaggaagctagactgaagatattggaaaccctaaaacttctcatgcaacatacttggcccagagtttcctgcagacttgtggtcttactgaaggccctcttgaaactgatttgtgatgtagcaagggatccaaaccttacacctgagtctgttaagagcgccctgctacaggaggccacagactgcctgattctcctggaccgctgttctcaaggacgggtaaagggtctcctggccaaaattccccaaagctgtgaagacagaaaagtggtgaactatatcagaaaagtgcagcaggtttctgaaggcgcaccctacaatggaacttaagacttgtattactttcccaagaggaaaggattttcttcccatcccaatttgtatgaatggagttatttaagaaaaaaagatatttttacacgaaactttgtaagtgaaagctgctttttccttccttcctttccttttacctccataagaatagggaaagtagaacaagaaaaaattgaactccttccatttctaaataaagtttgggagaaaaaagga

SEQ ID NO: 31253 - DNA, 2363 bp, Homo sapiens
  source 1..2363: mol_type = unassigned DNA
gttaaatcgatccttgaagttcaggtcagacgggtaatgtgcccacgtcgtaacaaggttcaagggtggcacatctcacacaagcgtatgaacacccaatcatcacgctcatgaactacaaaaggatcatcttatagttgacattaaggagtgccaagtatgtgccactaatttacacatagggtgactaccgtaatgcgatacatccattcttcacgtataaaatcctggatattttcaaagtcccactgagattctgtgattattcttttgtttctaccttagcaaaggaaaacagaaacacaattagcgagcggattattatatatgcaaatttattctctatagttccacctctccgtcattttcccgagcctggatctttattgctttacgaccatacgtcgtgaaataagaaggtgttgcggcagtactggcggaagctagccttgcgttttgcggcagcaatatgagctaggtccggatcctgttagacaccggcgggcgcgagccgttgcagttctctttgggtgatcgctccttccctcttcaacggatccctccccgcctccatcctcgttctgtgggagagaccagccttctggtgctgcagtcaggaatggagcttgacagcgctctggaagccccatcgcaggaagactctaatttgtccgaggagttgtctcactccgcctttggacaggccttctccaagattttacactgtcttgcccgcccggaggcacgacgaggcaatgtaaaagatgcagttcttaaagacctcggtgatctaatagaagccacagaatttgataggttatttgaggggactggtgcacggctccgcggaatgccggagacactggggcaggtagcaaaagccctggagaagtatgcagccccctccaaggaggaggaaggtggaggtgatgggcactccgaagcggccgagaaagcagcccaagttgggttactgtttcttaaactgttagggaaagttgagactgctaagaattccctggtcggccctgcatggcagacgggcctgcatcacttggcaggacccgtttatatttttgccatcacacacagcttggagcaaccatggaccactccgagatctcgggaagttgctagggaggtgctcacctcactgcttcaagttactgaatgcggttctgtggcaggattcctacatggagaaaatgaagatgagaaagggagactttcggtgatactagggcttctcaaacccgacttgtataaggaatcctggaagaataaccctgccatcaaacatgttttctcatggactctgcaacaggtcactcggccctggctgagccagcatctggaaagggtacttcccgcatcattggtcatttcagatgactatcagactgagaacaaaatcctgggtgtacactgtctccatcacattgtgcttaatgtgccagctgctgatttgctccagtataacagagcccaggtcctataccatgccatttccaaccacctgtacacaccagagcaccacctcattcaggctgtgctcctgtgtctgctggatttattccccatcctggagaaaaccctgcactggaaaggagatggagctcgacccaccacccattgtgatgaggtcctgcggctgatcctgacccacatggagccagagcaccgccttcttttacgcaggacctacgcaagaaacctgccggctttcgtgaacaggttggggatcctaactgtccggcacttaaagaggctggagagagtcatcattggttatctggaggtttatgatggacctgaggaggaagctagactgaagatattggaaaccctaaaacttctcatgcaacatacttggcccagagtttcctgcagacttgtggtcttactgaaggccctcttgaaactgatttgtgatgtagcaagggatccaaaccttacacctgagtctgttaagagcgccctgctacaggaggccacagactgcctgattctcctggaccgctgttctcaaggacgggtaaagggtctcctggccaaaattccccaaagctgtgaagacagaaaagtggtgaactatatcagaaaagtgcagcaggtttctgaaggcgcaccctacaatggaacttaagacttgtattactttcccaagaggaaaggattttcttcccatcccaatttgtatgaatggagttatttaagaaaaaaagatatttttacacgaaactttgtaagtgaaagctgctttttccttccttcctttccttttacctccataagaatagggaaagtagaacaagaaaaaattgaactccttccatttctaaataaagtttgggagaaaaaag

SEQ ID NO: 31254 - DNA, 1828 bp, Homo sapiens
  source 1..1828: mol_type = unassigned DNA
gggcgcgagccgttgcaggtacctgggggtggttaagttggtgacatggctcagaagtttatttctttaaatttttaagttttttttctttttagtcttcagaaaggcaacagtagtcttttaacgtcactgttaaaagtttctctttgggtgatcgctccttccctcttcaacggatccctccccgcctccatcctcgttctgtgggagagaccagccttctggtgctgcagtcaggaatggagcttgacagcgctctggaagccccatcgcaggaagactctaatttgtccgaggagttgtctcactccgcctttggacaggccttctccaagattttacactgtcttgcccgcccggaggcacgacgaggcaatgtaaaagatgcagttcttaaagacctcggtgatctaatagaagccacagaatttgataggttatttgaggggactggtgcacggctccgcggaatgccggagacactggggcaggtagcaaaagccctggagaagtatgcagccccctccaaggaggaggaaggtggaggtgatgggcactccgaagcggccgagaaagcagcccaagttgggttactgtttcttaaactgttagggaaagttgagactgctaagaattccctggtcggccctgcatggcagacgggcctgcatcacttggcaggacccgtttatatttttgccatcacacacagcttggagcaaccatggaccactccgagatctcgggaagttgctagggaggtgctcacctcactgcttcaagttactgaatgcggttctgtggcaggattcctacatggagaaaatgaagatgagaaagggagactttcggtgatactagggcttctcaaacccgacttgtataaggaatcctggaagaataaccctgccatcaaacatgttttctcatggactctgcaacaggtcactcggccctggctgagccagcatctggaaagggtacttcccgcatcattggtcatttcagatgactatcagactgagaacaaaatcctgggtgtacactgtctccatcacattgtgcttaatgtgccagctgctgatttgctccagtataacagagcccaggtcctataccatgccatttccaaccacctgtacacaccagagcaccacctcattcaggctgtgctcctgtgtctgctggatttattccccatcctggagaaaaccctgcactggaaaggagatggagctcgacccaccacccattgtgatgaggtcctgcggctgatcctgacccacatggagccagagcaccgccttcttttacgcaggacctacgcaagaaacctgccggctttcgtgaacaggctggagagagtcatcattggttatctggaggtttatgatggacctgaggaggaagctagactgaagatattggaaaccctaaaacttctcatgcaacatacttggcccagagtttcctgcagacttgtggtcttactgaaggccctcttgaaactgatttgtgatgtagcaagggatccaaaccttacacctgagtctgttaagagcgccctgctacaggaggccacagactgcctgattctcctggaccgctgttctcaaggacgggtaaagggtctcctggccaaaattccccaaagctgtgaagacagaaaagtggtgaactatatcagaaaagtgcagcaggtttctgaaggcgcaccctacaatggaacttaagacttgtattactttcccaagaggaaaggattttcttcccatcccaatttgtatgaatggagttatttaagaaaaaaagatatttttacacgaaa

SEQ ID NO: 31255 - DNA, 485 bp, Homo sapiens
  source 1..485: mol_type = unassigned DNA
ggatcctgttagacaccggcgggcgcgagccgttgcagtcttcagaaaggcaacagtagtcttttaacgtcactgttaaaagtttctctttgggtgatcgctccttccctcttcaacggatccctccccgcctccatcctcgttctgtgggagagaccagccttctggtgctgcagtcaggaatggagcttgacagcgctctggaagccccatcgcaggaagactctaatttgtccgaggagttgtctcactccgcctttggacaggccttctccaagattttacactgtcttgcccgcccggaggcacgacgaggcaatgtaaaagatgcagttcttaaagacctcggtgatctaatagaagccacagaatttgataggttatttgaggggactggtgcacggctccgcggaatgccggagacactggggcaggtagcaaaagccctggagaagtatgcagccccctccaaggaggaggaaggt

SEQ ID NO: 31256 - DNA, 3829 bp, Homo sapiens
  source 1..3829: mol_type = unassigned DNA
caggcagcgctgcgtcctgctgcgcacgtgggaagccctggccccggccacccccgcgatgccgcgcgctccccgctgccgagccgtgcgctccctgctgcgcagccactaccgcgaggtgctgccgctggccacgttcgtgcggcgcctggggccccagggctggcggctggtgcagcgcggggacccggcggctttccgcgcgctggtggcccagtgcctggtgtgcgtgccctgggacgcacggccgccccccgccgccccctccttccgccaggtgtcctgcctgaaggagctggtggcccgagtgctgcagaggctgtgcgagcgcggcgcgaagaacgtgctggccttcggcttcgcgctgctggacggggcccgcgggggcccccccgaggccttcaccaccagcgtgcgcagctacctgcccaacacggtgaccgacgcactgcgggggagcggggcgtgggggctgctgctgcgccgcgtgggcgacgacgtgctggttcacctgctggcacgctgcgcgctctttgtgctggtggctcccagctgcgcctaccaggtgtgcgggccgccgctgtaccagctcggcgctgccactcaggcccggcccccgccacacgctagtggaccccgaaggcgtctgggatgcgaacgggcctggaaccatagcgtcagggaggccggggtccccctgggcctgccagccccgggtgcgaggaggcgcgggggcagtgccagccgaagtctgccgttgcccaagaggcccaggcgtggcgctgcccctgagccggagcggacgcccgttgggcaggggtcctgggcccacccgggcaggacgcgtggaccgagtgaccgtggtttctgtgtggtgtcacctgccagacccgccgaagaagccacctctttggagggtgcgctctctggcacgcgccactcccacccatccgtgggccgccagcaccacgcgggccccccatccacatcgcggccaccacgtccctgggacacgccttgtcccccggtgtacgccgagaccaagcacttcctctactcctcaggcgacaaggagcagctgcggccctccttcctactcagctctctgaggcccagcctgactggcgctcggaggctcgtggagaccatctttctgggttccaggccctggatgccagggactccccgcaggttgccccgcctgccccagcgctactggcaaatgcggcccctgtttctggagctgcttgggaaccacgcgcagtgcccctacggggtgctcctcaagacgcactgcccgctgcgagctgcggtcaccccagcagccggtgtctgtgcccgggagaagccccagggctctgtggcggcccccgaggaggaggacacagacccccgtcgcctggtgcagctgctccgccagcacagcagcccctggcaggtgtacggcttcgtgcgggcctgcctgcgccggctggtgcccccaggcctctggggctccaggcacaacgaacgccgcttcctcaggaacaccaagaagttcatctccctggggaagcatgccaagctctcgctgcaggagctgacgtggaagatgagcgtgcgggactgcgcttggctgcgcaggagcccaggggttggctgtgttccggccgcagagcaccgtctgcgtgaggagatcctggccaagttcctgcactggctgatgagtgtgtacgtcgtcgagctgctcaggtctttcttttatgtcacggagaccacgtttcaaaagaacaggctctttttctaccggaagagtgtctggagcaagttgcaaagcattggaatcagacagcacttgaagagggtgcagctgcgggagctgtcggaagcagaggtcaggcagcatcgggaagccaggcccgccctgctgacgtccagactccgcttcatccccaagcctgacgggctgcggccgattgtgaacatggactacgtcgtgggagccagaacgttccgcagagaaaagagggccgagcgtctcacctcgagggtgaaggcactgttcagcgtgctcaactacgagcgggcgcggcgccccggcctcctgggcgcctctgtgctgggcctggacgatatccacagggcctggcgcaccttcgtgctgcgtgtgcgggcccaggacccgccgcctgagctgtactttgtcaaggtggatgtgacgggcgcgtacgacaccatcccccaggacaggctcacggaggtcatcgccagcatcatcaaaccccagaacacgtactgcgtgcgtcggtatgccgtggtccagaaggccgcccatgggcacgtccgcaaggccttcaagagccacgtcctacgtccagtgccaggggatcccgcagggctccatcctctccacgctgctctgcagcctgtgctacggcgacatggagaacaagctgtttgcggggattcggcgggacgggctgctcctgcgtttggtggatgatttcttgttggtgacacctcacctcacccacgcgaaaaccttcctcaggaccctggtccgaggtgtccctgagtatggctgcgtggtgaacttgcggaagacagtggtgaacttccctgtagaagacgaggccctgggtggcacggcttttgttcagatgccggcccacggcctattcccctggtgcggcctgctgctggatacccggaccctggaggtgcagagcgactactccagctatgcccggacctccatcagagccagtctcaccttcaaccgcggcttcaaggctgggaggaacatgcgtcgcaaactctttggggtcttgcggctgaagtgtcacagcctgtttctggatttgcaggtgaacagcctccagacggtgtgcaccaacatctacaagatcctcctgctgcaggcgtacaggtttcacgcatgtgtgctgcagctcccatttcatcagcaagtttggaagaaccccacatttttcctgcgcgtcatctctgacacggcctccctctgctactccatcctgaaagccaagaacgcagggatgtcgctgggggccaagggcgccgccggccctctgccctccgaggccgtgcagtggctgtgccaccaagcattcctgctcaagctgactcgacaccgtgtcacctacgtgccactcctggggtcactcaggacagcccagacgcagctgagtcggaagctcccggggacgacgctgactgccctggaggccgcagccaacccggcactgccctcagacttcaagaccatcctggactgatggccacccgcccacagccaggccgagagcagacaccagcagccctgtcacgccgggctctacgtcccagggagggaggggcggcccacacccaggcccgcaccgctgggagtctgaggcctgagtgagtgtttggccgaggcctgcatgtccggctgaaggctgagtgtccggctgaggcctgagcgagtgtccagccaagggctgagtgtccagcacacctgccgtcttcacttccccacaggctggcgctcggctccaccccagggccagcttttcctcaccaggagcccggcttccactccccacataggaatagtccatccccagattcgccattgttcacccctcgccctgccctcctttgccttccacccccaccatccaggtggagaccctgagaaggaccctgggagctctgggaatttggagtgaccaaaggtgtgccctgtacacaggcgaggaccctgcacctggatgggggtccctgtgggtcaaattggggggaggtgctgtgggagtaaaatactgaatatatgagtttttcagttttg

SEQ ID NO: 31257 - DNA, 4018 bp, Homo sapiens
  source 1..4018: mol_type = unassigned DNA
caggcagcgctgcgtcctgctgcgcacgtgggaagccctggccccggccacccccgcgatgccgcgcgctccccgctgccgagccgtgcgctccctgctgcgcagccactaccgcgaggtgctgccgctggccacgttcgtgcggcgcctggggccccagggctggcggctggtgcagcgcggggacccggcggctttccgcgcgctggtggcccagtgcctggtgtgcgtgccctgggacgcacggccgccccccgccgccccctccttccgccaggtgtcctgcctgaaggagctggtggcccgagtgctgcagaggctgtgcgagcgcggcgcgaagaacgtgctggccttcggcttcgcgctgctggacggggcccgcgggggcccccccgaggccttcaccaccagcgtgcgcagctacctgcccaacacggtgaccgacgcactgcgggggagcggggcgtgggggctgctgctgcgccgcgtgggcgacgacgtgctggttcacctgctggcacgctgcgcgctctttgtgctggtggctcccagctgcgcctaccaggtgtgcgggccgccgctgtaccagctcggcgctgccactcaggcccggcccccgccacacgctagtggaccccgaaggcgtctgggatgcgaacgggcctggaaccatagcgtcagggaggccggggtccccctgggcctgccagccccgggtgcgaggaggcgcgggggcagtgccagccgaagtctgccgttgcccaagaggcccaggcgtggcgctgcccctgagccggagcggacgcccgttgggcaggggtcctgggcccacccgggcaggacgcgtggaccgagtgaccgtggtttctgtgtggtgtcacctgccagacccgccgaagaagccacctctttggagggtgcgctctctggcacgcgccactcccacccatccgtgggccgccagcaccacgcgggccccccatccacatcgcggccaccacgtccctgggacacgccttgtcccccggtgtacgccgagaccaagcacttcctctactcctcaggcgacaaggagcagctgcggccctccttcctactcagctctctgaggcccagcctgactggcgctcggaggctcgtggagaccatctttctgggttccaggccctggatgccagggactccccgcaggttgccccgcctgccccagcgctactggcaaatgcggcccctgtttctggagctgcttgggaaccacgcgcagtgcccctacggggtgctcctcaagacgcactgcccgctgcgagctgcggtcaccccagcagccggtgtctgtgcccgggagaagccccagggctctgtggcggcccccgaggaggaggacacagacccccgtcgcctggtgcagctgctccgccagcacagcagcccctggcaggtgtacggcttcgtgcgggcctgcctgcgccggctggtgcccccaggcctctggggctccaggcacaacgaacgccgcttcctcaggaacaccaagaagttcatctccctggggaagcatgccaagctctcgctgcaggagctgacgtggaagatgagcgtgcgggactgcgcttggctgcgcaggagcccaggggttggctgtgttccggccgcagagcaccgtctgcgtgaggagatcctggccaagttcctgcactggctgatgagtgtgtacgtcgtcgagctgctcaggtctttcttttatgtcacggagaccacgtttcaaaagaacaggctctttttctaccggaagagtgtctggagcaagttgcaaagcattggaatcagacagcacttgaagagggtgcagctgcgggagctgtcggaagcagaggtcaggcagcatcgggaagccaggcccgccctgctgacgtccagactccgcttcatccccaagcctgacgggctgcggccgattgtgaacatggactacgtcgtgggagccagaacgttccgcagagaaaagagggccgagcgtctcacctcgagggtgaaggcactgttcagcgtgctcaactacgagcgggcgcggcgccccggcctcctgggcgcctctgtgctgggcctggacgatatccacagggcctggcgcaccttcgtgctgcgtgtgcgggcccaggacccgccgcctgagctgtactttgtcaaggtggatgtgacgggcgcgtacgacaccatcccccaggacaggctcacggaggtcatcgccagcatcatcaaaccccagaacacgtactgcgtgcgtcggtatgccgtggtccagaaggccgcccatgggcacgtccgcaaggccttcaagagccacgtctctaccttgacagacctccagccgtacatgcgacagttcgtggctcacctgcaggagaccagcccgctgagggatgccgtcgtcatcgagcagagctcctccctgaatgaggccagcagtggcctcttcgacgtcttcctacgcttcatgtgccaccacgccgtgcgcatcaggggcaagtcctacgtccagtgccaggggatcccgcagggctccatcctctccacgctgctctgcagcctgtgctacggcgacatggagaacaagctgtttgcggggattcggcgggacgggctgctcctgcgtttggtggatgatttcttgttggtgacacctcacctcacccacgcgaaaaccttcctcaggaccctggtccgaggtgtccctgagtatggctgcgtggtgaacttgcggaagacagtggtgaacttccctgtagaagacgaggccctgggtggcacggcttttgttcagatgccggcccacggcctattcccctggtgcggcctgctgctggatacccggaccctggaggtgcagagcgactactccagctatgcccggacctccatcagagccagtctcaccttcaaccgcggcttcaaggctgggaggaacatgcgtcgcaaactctttggggtcttgcggctgaagtgtcacagcctgtttctggatttgcaggtgaacagcctccagacggtgtgcaccaacatctacaagatcctcctgctgcaggcgtacaggtttcacgcatgtgtgctgcagctcccatttcatcagcaagtttggaagaaccccacatttttcctgcgcgtcatctctgacacggcctccctctgctactccatcctgaaagccaagaacgcagggatgtcgctgggggccaagggcgccgccggccctctgccctccgaggccgtgcagtggctgtgccaccaagcattcctgctcaagctgactcgacaccgtgtcacctacgtgccactcctggggtcactcaggacagcccagacgcagctgagtcggaagctcccggggacgacgctgactgccctggaggccgcagccaacccggcactgccctcagacttcaagaccatcctggactgatggccacccgcccacagccaggccgagagcagacaccagcagccctgtcacgccgggctctacgtcccagggagggaggggcggcccacacccaggcccgcaccgctgggagtctgaggcctgagtgagtgtttggccgaggcctgcatgtccggctgaaggctgagtgtccggctgaggcctgagcgagtgtccagccaagggctgagtgtccagcacacctgccgtcttcacttccccacaggctggcgctcggctccaccccagggccagcttttcctcaccaggagcccggcttccactccccacataggaatagtccatccccagattcgccattgttcacccctcgccctgccctcctttgccttccacccccaccatccaggtggagaccctgagaaggaccctgggagctctgggaatttggagtgaccaaaggtgtgccctgtacacaggcgaggaccctgcacctggatgggggtccctgtgggtcaaattggggggaggtgctgtgggagtaaaatactgaatatatgagtttttcagttttgaaaaaaa

SEQ ID NO: 31258 - DNA, 3210 bp, Homo sapiens
  source 1..3210: mol_type = unassigned DNA
atgccgcgcgctccccgctgccgagccgtgcgctccctgctgcgcagccactaccgcgaggtgctgccgctggccacgttcgtgcggcgcctggggccccagggctggcggctggtgcagcgcggggacccggcggctttccgcgcgctggtggcccagtgcctggtgtgcgtgccctgggacgcacggccgccccccgccgccccctccttccgccaggtgtcctgcctgaaggagctggtggcccgagtgctgcagaggctgtgcgagcgcggcgcgaagaacgtgctggccttcggcttcgcgctgctggacggggcccgcgggggcccccccgaggccttcaccaccagcgtgcgcagctacctgcccaacacggtgaccgacgcactgcgggggagcggggcgtgggggctgctgctgcgccgcgtgggcgacgacgtgctggttcacctgctggcacgctgcgcgctctttgtgctggtggctcccagctgcgcctaccaggtgtgcgggccgccgctgtaccagctcggcgctgccactcaggcccggcccccgccacacgctagtggaccccgaaggcgtctgggatgcgaacgggcctggaaccatagcgtcagggaggccggggtccccctgggcctgccagccccgggtgcgaggaggcgcgggggcagtgccagccgaagtctgccgttgcccaagaggcccaggcgtggcgctgcccctgagccggagcggacgcccgttgggcaggggtcctgggcccacccgggcaggacgcgtggaccgagtgaccgtggtttctgtgtggtgtcacctgccagacccgccgaagaagccacctctttggagggtgcgctctctggcacgcgccactcccacccatccgtgggccgccagcaccacgcgggccccccatccacatcgcggccaccacgtccctgggacacgccttgtcccccggtgtacgccgagaccaagcacttcctctactcctcaggcgacaaggagcagctgcggccctccttcctactcagctctctgaggcccagcctgactggcgctcggaggctcgtggagaccatctttctgggttccaggccctggatgccagggactccccgcaggttgccccgcctgccccagcgctactggcaaatgcggcccctgtttctggagctgcttgggaaccacgcgcagtgcccctacggggtgctcctcaagacgcactgcccgctgcgagctgcggtcaccccagcagccggtgtctgtgcccgggagaagccccagggctctgtggcggcccccgaggaggaggacacagacccccgtcgcctggtgcagctgctccgccagcacagcagcccctggcaggtgtacggcttcgtgcgggcctgcctgcgccggctggtgcccccaggcctctggggctccaggcacaacgaacgccgcttcctcaggaacaccaagaagttcatctccctggggaagcatgccaagctctcgctgcaggagctgacgtggaagatgagcgtgcgggactgcgcttggctgcgcaggagcccaggggttggctgtgttccggccgcagagcaccgtctgcgtgaggagatcctggccaagttcctgcactggctgatgagtgtgtacgtcgtcgagctgctcaggtctttcttttatgtcacggagaccacgtttcaaaagaacaggctctttttctaccggaagagtgtctggagcaagttgcaaagcattggaatcagacagcacttgaagagggtgcagctgcgggagctgtcggaagcagaggtcaggcagcatcgggaagccaggcccgccctgctgacgtccagactccgcttcatccccaagcctgacgggctgcggccgattgtgaacatggactacgtcgtgggagccagaacgttccgcagagaaaagagggccgagcgtctcacctcgagggtgaaggcactgttcagcgtgctcaactacgagcgggcgcggcgccccggcctcctgggcgcctctgtgctgggcctggacgatatccacagggcctggcgcaccttcgtgctgcgtgtgcgggcccaggacccgccgcctgagctgtactttgtcaaggtggatgtgacgggcgcgtacgacaccatcccccaggacaggctcacggaggtcatcgccagcatcatcaaaccccagaacacgtactgcgtgcgtcggtatgccgtggtccagaaggccgcccatgggcacgtccgcaaggccttcaagagccacgtctctaccttgacagacctccagccgtacatgcgacagttcgtggctcacctgcaggagaccagcccgctgagggatgccgtcgtcatcgagcagagctcctccctgaatgaggccagcagtggcctcttcgacgtcttcctacgcttcatgtgccaccacgccgtgcgcatcaggggcaagtcctacgtccagtgccaggggatcccgcagggctccatcctctccacgctgctctgcagcctgtgctacggcgacatggagaacaagctgtttgcggggattcggcgggacgggctgctcctgcgtttggtggatgatttcttgttggtgacacctcacctcacccacgcgaaaaccttcctcagctatgcccggacctccatcagagccagtctcaccttcaaccgcggcttcaaggctgggaggaacatgcgtcgcaaactctttggggtcttgcggctgaagtgtcacagcctgtttctggatttgcaggtgaacagcctccagacggtgtgcaccaacatctacaagatcctcctgctgcaggcgtacaggtttcacgcatgtgtgctgcagctcccatttcatcagcaagtttggaagaaccccacatttttcctgcgcgtcatctctgacacggcctccctctgctactccatcctgaaagccaagaacgcagggatgtcgctgggggccaagggcgccgccggccctctgccctccgaggccgtgcagtggctgtgccaccaagcattcctgctcaagctgactcgacaccgtgtcacctacgtgccactcctggggtcactcaggacagcccagacgcagctgagtcggaagctcccggggacgacgctgactgccctggaggccgcagccaacccggcactgccctcagacttcaagaccatcctggactga

SEQ ID NO: 31259 - DNA, 2486 bp, Homo sapiens
  source 1..2486: mol_type = unassigned DNA
atgccgcgcgctccccgctgccgagccgtgcgctccctgctgcgcagccactaccgcgaggtgctgccgctggccacgttcgtgcggcgcctggggccccagggctggcggctggtgcagcgcggggacccggcggctttccgcgcgctggtggcccagtgcctggtgtgcgtgccctgggacgcacggccgccccccgccgccccctccttccgccaggtgtcctgcctgaaggagctggtggcccgagtgctgcagaggctgtgcgagcgcggcgcgaagaacgtgctggccttcggcttcgcgctgctggacggggcccgcgggggcccccccgaggccttcaccaccagcgtgcgcagctacctgcccaacacggtgaccgacgcactgcgggggagcggggcgtgggggctgctgctgcgccgcgtgggcgacgacgtgctggttcacctgctggcacgctgcgcgctctttgtgctggtggctcccagctgcgcctaccaggtgtgcgggccgccgctgtaccagctcggcgctgccactcaggcccggcccccgccacacgctagtggaccccgaaggcgtctgggatgcgaacgggcctggaaccatagcgtcagggaggccggggtccccctgggcctgccagccccgggtgcgaggaggcgcgggggcagtgccagccgaagtctgccgttgcccaagaggcccaggcgtggcgctgcccctgagccggagcggacgcccgttgggcaggggtcctgggcccacccgggcaggacgcgtggaccgagtgaccgtggtttctgtgtggtgtcacctgccagacccgccgaagaagccacctctttggagggtgcgctctctggcacgcgccactcccacccatccgtgggccgccagcaccacgcgggccccccatccacatcgcggccaccacgtccctgggacacgccttgtcccccggtgtacgccgagaccaagcacttcctctactcctcaggcgacaaggagcagctgcggccctccttcctactcagctctctgaggcccagcctgactggcgctcggaggctcgtggagaccatctttctgggttccaggccctggatgccagggactccccgcaggttgccccgcctgccccagcgctactggcaaatgcggcccctgtttctggagctgcttgggaaccacgcgcagtgcccctacggggtgctcctcaagacgcactgcccgctgcgagctgcggtcaccccagcagccggtgtctgtgcccgggagaagccccagggctctgtggcggcccccgaggaggaggacacagacccccgtcgcctggtgcagctgctccgccagcacagcagcccctggcaggtgtacggcttcgtgcgggcctgcctgcgccggctggtgcccccaggcctctggggctccaggcacaacgaacgccgcttcctcaggaacaccaagaagttcatctccctggggaagcatgccaagctctcgctgcaggagctgacgtggaagatgagcgtgcgggactgcgcttggctgcgcaggagcccaggggttggctgtgttccggccgcagagcaccgtctgcgtgaggagatcctggccaagttcctgcactggctgatgagtgtgtacgtcgtcgagctgctcaggtctttcttttatgtcacggagaccacgtttcaaaagaacaggctctttttctaccggaagagtgtctggagcaagttgcaaagcattggaatcagacagcacttgaagagggtgcagctgcgggagctgtcggaagcagaggtcaggcagcatcgggaagccaggcccgccctgctgacgtccagactccgcttcatccccaagcctgacgggctgcggccgattgtgaacatggactacgtcgtgggagccagaacgttccgcagagaaaagagggccgagcgtctcacctcgagggtgaaggcactgttcagcgtgctcaactacgagcgggcgcggcgccccggcctcctgggcgcctctgtgctgggcctggacgatatccacagggcctggcgcaccttcgtgctgcgtgtgcgggcccaggacccgccgcctgagctgtactttgtcaaggtggatgtgacgggcgcgtacgacaccatcccccaggacaggctcacggaggtcatcgccagcatcatcaaaccccagaacacgtactgcgtgcgtcggtatgccgtggtccagaaggccgcccatgggcacgtccgcaaggccttcaagagccacgtcctacgtccagtgccaggggatcccgcagggctccatcctctccacgctgctctgcagcctgtgctacggcgacatggagaacaagctgtttgcggggattcggcgggacgggctgctcctgcgtttggtggatgatttcttgttggtgacacctcacctcacccacgcgaaaaccttcctcaggtgaggcccgtgcc

SEQ ID NO: 31260 - DNA, 994 bp, Homo sapiens
  source 1..994: mol_type = unassigned DNA
gccccttctttctccgtggccctttggcgcgtgagtgacagcggcccagacagagggggcgatgtccgcgtcgtggctggggccggtcgcggggcagactaatcccctgctcctggccaggggaggctcccgagcggatcctcgggaaaggggctccgaaggtcaagaaactgccctgctgggcgtccggggagtgggaaaataaagcactttttgtatcccgcccctcccccgtcacgtgaccacgcgaggcggaaagaagaaatccgaggaccggcgacgcctagaacaggagcccatgatgctgcccaaacctgggacctattacctcccctgggaggttagtgcaggccaagttcctgatgggagcacgctgagaacatttggcaggttgtgcctctatgacatgattcagtccagagtaacactgatggctcagcacggatccgatcagcaccaggttcttgtctgtaccaagttggtggagcccttccacgcccaggtgggctccctgtacatcgtcctcggggagctccagcatcagcaggacagaggctccgtggtgaaggcgcgcgtgctgacctgtgtggaggggatgaacctgcccttgttggaacaagccatccgggagcagagactgtacaagcaggagcggggcggcagccagtaggaaacagcagcctagcaacaccctcacctgcttcagagcccgaaccctctggagctgcaggagcccgggagagcacagacgcctccccagcgacggccttgtctggagctcgaaagccgaggggcgggtgatgaatccagccccttcccctactttgggattggctcagcaatgagaacccagaaagcatgccataaatccgacagccccaccccaggagactgcaggtggccgagcttgggcgccggggccgtgcttggtgtggggccatggagggttccagaaggtcctggtgaataaaggcccagggggcgtgctcttgaa

SEQ ID NO: 31261 - DNA, 992 bp, Homo sapiens
  source 1..992: mol_type = unassigned DNA
gccccttctttctccgtggccctttggcgcgtgagtgacagcggcccagacagagggggcgatgtccgcgtcgtggctggggccggtcgcggggcagactaatcccctgctcctggccaggggaggctcccgagcggatcctcgggaaaggggctccgaaggtcaagaaactgccctgctgggcgtccggggagtgggaaaataaagcactttttgtatcccgcccctcccccgtcacgtgaccacgcgaggcggaaagaagaaatccgaggaccggcgacgcctagaacaggagcccatgatgctgcccaaacctgggacctattacctcccctgggaggttagtgcaggccaagttcctgatgggagcacgctgagaacatttggcaggttgtgcctctatgacatgattcagtccagagtaacactgatggctcagcacggatccgatcagcaccaggttcttgtctgtaccaagttggtggagcccttccacgcccaggtgggctccctgtacatcgtcctcggggagctccagcatcagcaggacagaggctccgtggtgaaggcgcgcgtgctgacctgtgtggaggggatgaacctgcccttgttggaacaagccatccgggagcagagactgtacaagcaggagcggggcggcagccagtaggaaacagcagcctagcaacaccctcacctgcttcagagcccgaaccctctggagctgcaggagcccgggagagcacagacgcctccccagcgacggccttgtctggagctcgaaagccgaggggcgggtgatgaatccagccccttcccctactttgggattggctcagcaatgagaacccagaaagcatgccataaatccgacagccccaccccaggagactgcaggtggccgagcttgggcgccggggccgtgcttggtgtggggccatggagggttccagaaggtcctggtgaataaaggcccagggggcgtgctcttg

SEQ ID NO: 31262 - DNA, 6506 bp, Homo sapiens
  source 1..6506: mol_type = unassigned DNA
attacagaggaaggagctcgctatataagccagccaaagttggctgcaccggccacagcctgcctactgtcacccgcctctcccgcgcgcagatacacgcccccgcctccgtgggcacaaaggcagcgctgctggggaactcgggggaacgcgcacgtgggaaccgccgcagctccacactccaggtacttcttccaaggacctaggtctctcgcccatcggaaagaaaataattctttcaagaagatcagggacaactgatttgaagtctactctgtgcttctaaatccccaattctgctgaaagtgagataccctagagccctagagccccagcagcacccagccaaacccacctccaccatgggggccatgactcagctgttggcaggtgtctttcttgctttccttgccctcgctaccgaaggtggggtcctcaagaaagtcatccggcacaagcgacagagtggggtgaacgccaccctgccagaagagaaccagccagtggtgtttaaccacgtttacaacatcaagctgccagtgggatcccagtgttcggtggatctggagtcagccagtggggagaaagacctggcaccgccttcagagcccagcgaaagctttcaggagcacacagtggatggggaaaaccagattgtcttcacacatcgcatcaacatcccccgccgggcctgtggctgtgccgcagcccctgatgttaaggagctgctgagcagactggaggagctggagaacctggtgtcttccctgagggagcaatgtactgcaggagcaggctgctgtctccagcctgccacaggccgcttggacaccaggcccttctgtagcggtcggggcaacttcagcactgaaggatgtggctgtgtctgcgaacctggctggaaaggccccaactgctctgagcccgaatgtccaggcaactgtcaccttcgaggccggtgcattgatgggcagtgcatctgtgacgacggcttcacgggcgaggactgcagccagctggcttgccccagcgactgcaatgaccagggcaagtgcgtaaatggagtctgcatctgtttcgaaggctacgccggggctgactgcagccgtgaaatctgcccagtgccctgcagtgaggagcacggcacatgtgtagatggcttgtgtgtgtgccacgatggctttgcaggcgatgactgcaacaagcctctgtgtctcaacaattgctacaaccgtggacgatgcgtggagaatgagtgcgtgtgtgatgagggtttcacgggcgaagactgcagtgagctcatctgccccaatgactgcttcgaccggggccgctgcatcaatggcacctgctactgcgaagaaggcttcacaggtgaagactgcgggaaacccacctgcccacatgcctgccacacccagggccggtgtgaggaggggcagtgtgtatgtgatgagggctttgccggtgtggactgcagcgagaagaggtgtcctgctgactgtcacaatcgtggccgctgtgtagacgggcggtgtgagtgtgatgatggtttcactggagctgactgtggggagctcaagtgtcccaatggctgcagtggccatggccgctgtgtcaatgggcagtgtgtgtgtgatgagggctatactggggaggactgcagccagctacggtgccccaatgactgtcacagtcggggccgctgtgtcgagggcaaatgtgtatgtgagcaaggcttcaagggctatgactgcagtgacatgagctgccctaatgactgtcaccagcacggccgctgtgtgaatggcatgtgtgtttgtgatgacggctacacaggggaagactgccgggatcgccaatgccccagggactgcagcaacaggggcctctgtgtggacggacagtgcgtctgtgaggacggcttcaccggccctgactgtgcagaactctcctgtccaaatgactgccatggccagggtcgctgtgtgaatgggcagtgcgtgtgccatgaaggatttatgggcaaagactgcaaggagcaaagatgtcccagtgactgtcatggccagggccgctgcgtggacggccagtgcatctgccacgagggcttcacaggcctggactgtggccagcactcctgccccagtgactgcaacaacttaggacaatgcgtctcgggccgctgcatctgcaacgagggctacagcggagaagactgctcagaggtgtctcctcccaaagacctcgttgtgacagaagtgacggaagagacggtcaacctggcctgggacaatgagatgcgggtcacagagtaccttgtcgtgtacacgcccacccacgagggtggtctggaaatgcagttccgtgtgcctggggaccagacgtccaccatcatccaggagctggagcctggtgtggagtactttatccgtgtatttgccatcctggagaacaagaagagcattcctgtcagcgccagggtggccacgtacttacctgcacctgaaggcctgaaattcaagtccatcaaggagacatctgtggaagtggagtgggatcctctagacattgcttttgaaacctgggagatcatcttccggaatatgaataaagaagatgagggagagatcaccaaaagcctgaggaggccagagacctcttaccggcaaactggtctagctcctgggcaagagtatgagatatctctgcacatagtgaaaaacaatacccggggccctggcctgaagagggtgaccaccacacgcttggatgcccccagccagatcgaggtgaaagatgtcacagacaccactgccttgatcacctggttcaagcccctggctgagatcgatggcattgagctgacctacggcatcaaagacgtgccaggagaccgtaccaccatcgatctcacagaggacgagaaccagtactccatcgggaacctgaagcctgacactgagtacgaggtgtccctcatctcccgcagaggtgacatgtcaagcaacccagccaaagagaccttcacaacaggcctcgatgctcccaggaatcttcgacgtgtttcccagacagataacagcatcaccctggaatggaggaatggcaaggcagctattgacagttacagaattaagtatgcccccatctctggaggggaccacgctgaggttgatgttccaaagagccaacaagccacaaccaaaaccacactcacaggtctgaggccgggaactgaatatgggattggagtttctgctgtgaaggaagacaaggagagcaatccagcgaccatcaacgcagccacagagttggacacgcccaaggaccttcaggtttctgaaactgcagagaccagcctgaccctgctctggaagacaccgttggccaaatttgaccgctaccgcctcaattacagtctccccacaggccagtgggtgggagtgcagcttccaagaaacaccacttcctatgtcctgagaggcctggaaccaggacaggagtacaatgtcctcctgacagccgagaaaggcagacacaagagcaagcccgcacgtgtgaaggcatccactgccaaagaacctgaaattggaaacttaaatgtttctgacataactcccgagagcttcaatctctcctggatggctaccgatgggatcttcgagacctttaccattgaaattattgattccaataggttgctggagactgtggaatataatatctctggtgctgaacgaactgcccatatctcagggctaccccctagtactgattttattgtctacctctctggacttgctcccagcatccggaccaaaaccatcagtgccacagccacgacagaggccctgccccttctggaaaacctaaccatttccgacattaatccctacgggttcacagtttcctggatggcatcggagaatgcctttgacagctttctagtaacggtggtggattctgggaagctgctggacccccaggaattcacactttcaggaacccagaggaagctggagcttagaggcctcataactggcattggctatgaggttatggtctctggcttcacccaagggcatcaaaccaagcccttgagggctgagattgttacagaagccgaaccggaagttgacaaccttctggtttcagatgccaccccagacggtttccgtctgtcctggacagctgatgaaggggtcttcgacaattttgttctcaaaatcagagataccaaaaagcagtctgagccactggaaataaccctacttgcccccgaacgtaccagggacataacaggtctcagagaggctactgaatacgaaattgaactctatggaataagcaaaggaaggcgatcccagacagtcagtgctatagcaacaacagccatgggctccccaaaggaagtcattttctcagacatcactgaaaattcggctactgtcagctggagggcacccacagcccaagtggagagcttccggattacctatgtgcccattacaggaggtacaccctccatggtaactgtggacggaaccaagactcagaccaggctggtgaaactcatacctggcgtggagtaccttgtcagcatcatcgccatgaagggctttgaggaaagtgaacctgtctcagggtcattcaccacagctctggatggcccatctggcctggtgacagccaacatcactgactcagaagccttggccaggtggcagccagccattgccactgtggacagttatgtcatctcctacacaggcgagaaagtgccagaaattacacgcacggtgtccgggaacacagtggagtatgctctgaccgacctcgagcctgccacggaatacacactgagaatctttgcagagaaagggccccagaagagctcaaccatcactgccaagttcacaacagacctcgattctccaagagacttgactgctactgaggttcagtcggaaactgccctccttacctggcgacccccccgggcatcagtcaccggttacctgctggtctatgaatcagtggatggcacagtcaaggaagtcattgtgggtccagataccacctcctacagcctggcagacctgagcccatccacccactacacagccaagatccaggcactcaatgggcccctgaggagcaatatgatccagaccatcttcaccacaattggactcctgtaccccttccccaaggactgctcccaagcaatgctgaatggagacacgacctctggcctctacaccatttatctgaatggtgataaggctgaggcgctggaagtcttctgtgacatgacctctgatgggggtggatggattgtgttcctgagacgcaaaaacggacgcgagaacttctaccaaaactggaaggcatatgctgctggatttggggaccgcagagaagaattctggcttgggctggacaacctgaacaaaatcacagcccaggggcagtacgagctccgggtggacctgcgggaccatggggagacagcctttgctgtctatgacaagttcagcgtgggagatgccaagactcgctacaagctgaaggtggaggggtacagtgggacagcaggtgactccatggcctaccacaatggcagatccttctccacctttgacaaggacacagattcagccatcaccaactgtgctctgtcctacaaaggggctttctggtacaggaactgtcaccgtgtcaacctgatggggagatatggggacaataaccacagtcagggcgttaactggttccactggaagggccacgaacactcaatccagtttgctgagatgaagctgagaccaagcaacttcagaaatcttgaaggcaggcgcaaacgggcataaattccagggaccactgggtgagagaggaataaggcccagagcgaggaaaggattttaccaaagcatcaatacaaccagcccaaccatcggtccacacctgggcatttggtgagagtcaaagctgaccatggatccctggggccaacggcaacagcatgggcctcacctcctctgtgatttctttctttgcaccaaagacatcagtctccaacatgtttctgttttgttgtttgattcagcaaaaatctcccagtgacaacatcgcaatagttttttacttctcttaggtggctctgggaatgggagaggggtaggatgtacaggggtagtttgttttagaaccagccgtattttacatgaagctgtataattaattgtcattatttttgttagcaaagattaaatgtgtcattggaagccatccctttttttacatttcatacaacagaaaccagaaaagcaatactgtttccattttaaggatatgattaatattattaatataataatgatgatgatgatgatgaaaactaaggatttttcaagagatctttctttccaaaacatttctggacagtacctgattgtattttttttttaaataaaagcacaagtacttttgagtttgtt

SEQ ID NO: 31263 - DNA, 5687 bp, Homo sapiens
  source 1..5687: mol_type = unassigned DNA
attacagaggaaggagctcgctatataagccagccaaagttggctgcaccggccacagcctgcctactgtcacccgcctctcccgcgcgcagatacacgcccccgcctccgtgggcacaaaggcagcgctgctggggaactcgggggaacgcgcacgtgggaaccgccgcagctccacactccaggtacttcttccaaggacctaggtctctcgcccatcggaaagaaaataattctttcaagaagatcagggacaactgatttgaagtctactctgtgcttctaaatccccaattctgctgaaagtgagataccctagagccctagagccccagcagcacccagccaaacccacctccaccatgggggccatgactcagctgttggcaggtgtctttcttgctttccttgccctcgctaccgaaggtggggtcctcaagaaagtcatccggcacaagcgacagagtggggtgaacgccaccctgccagaagagaaccagccagtggtgtttaaccacgtttacaacatcaagctgccagtgggatcccagtgttcggtggatctggagtcagccagtggggagaaagacctggcaccgccttcagagcccagcgaaagctttcaggagcacacagtggatggggaaaaccagattgtcttcacacatcgcatcaacatcccccgccgggcctgtggctgtgccgcagcccctgatgttaaggagctgctgagcagactggaggagctggagaacctggtgtcttccctgagggagcaatgtactgcaggagcaggctgctgtctccagcctgccacaggccgcttggacaccaggcccttctgtagcggtcggggcaacttcagcactgaaggatgtggctgtgtctgcgaacctggctggaaaggccccaactgctctgagcccgaatgtccaggcaactgtcaccttcgaggccggtgcattgatgggcagtgcatctgtgacgacggcttcacgggcgaggactgcagccagctggcttgccccagcgactgcaatgaccagggcaagtgcgtaaatggagtctgcatctgtttcgaaggctacgccggggctgactgcagccgtgaaatctgcccagtgccctgcagtgaggagcacggcacatgtgtagatggcttgtgtgtgtgccacgatggctttgcaggcgatgactgcaacaagcctctgtgtctcaacaattgctacaaccgtggacgatgcgtggagaatgagtgcgtgtgtgatgagggtttcacgggcgaagactgcagtgagctcatctgccccaatgactgcttcgaccggggccgctgcatcaatggcacctgctactgcgaagaaggcttcacaggtgaagactgcgggaaacccacctgcccacatgcctgccacacccagggccggtgtgaggaggggcagtgtgtatgtgatgagggctttgccggtgtggactgcagcgagaagaggtgtcctgctgactgtcacaatcgtggccgctgtgtagacgggcggtgtgagtgtgatgatggtttcactggagctgactgtggggagctcaagtgtcccaatggctgcagtggccatggccgctgtgtcaatgggcagtgtgtgtgtgatgagggctatactggggaggactgcagccagctacggtgccccaatgactgtcacagtcggggccgctgtgtcgagggcaaatgtgtatgtgagcaaggcttcaagggctatgactgcagtgacatgagctgccctaatgactgtcaccagcacggccgctgtgtgaatggcatgtgtgtttgtgatgacggctacacaggggaagactgccgggatcgccaatgccccagggactgcagcaacaggggcctctgtgtggacggacagtgcgtctgtgaggacggcttcaccggccctgactgtgcagaactctcctgtccaaatgactgccatggccagggtcgctgtgtgaatgggcagtgcgtgtgccatgaaggatttatgggcaaagactgcaaggagcaaagatgtcccagtgactgtcatggccagggccgctgcgtggacggccagtgcatctgccacgagggcttcacaggcctggactgtggccagcactcctgccccagtgactgcaacaacttaggacaatgcgtctcgggccgctgcatctgcaacgagggctacagcggagaagactgctcagaggtgtctcctcccaaagacctcgttgtgacagaagtgacggaagagacggtcaacctggcctgggacaatgagatgcgggtcacagagtaccttgtcgtgtacacgcccacccacgagggtggtctggaaatgcagttccgtgtgcctggggaccagacgtccaccatcatccaggagctggagcctggtgtggagtactttatccgtgtatttgccatcctggagaacaagaagagcattcctgtcagcgccagggtggccacgtacttacctgcacctgaaggcctgaaattcaagtccatcaaggagacatctgtggaagtggagtgggatcctctagacattgcttttgaaacctgggagatcatcttccggaatatgaataaagaagatgagggagagatcaccaaaagcctgaggaggccagagacctcttaccggcaaactggtctagctcctgggcaagagtatgagatatctctgcacatagtgaaaaacaatacccggggccctggcctgaagagggtgaccaccacacgcttggatgcccccagccagatcgaggtgaaagatgtcacagacaccactgccttgatcacctggttcaagcccctggctgagatcgatggcattgagctgacctacggcatcaaagacgtgccaggagaccgtaccaccatcgatctcacagaggacgagaaccagtactccatcgggaacctgaagcctgacactgagtacgaggtgtccctcatctcccgcagaggtgacatgtcaagcaacccagccaaagagaccttcacaacaggcctcgatgctcccaggaatcttcgacgtgtttcccagacagataacagcatcaccctggaatggaggaatggcaaggcagctattgacagttacagaattaagtatgcccccatctctggaggggaccacgctgaggttgatgttccaaagagccaacaagccacaaccaaaaccacactcacaggtctgaggccgggaactgaatatgggattggagtttctgctgtgaaggaagacaaggagagcaatccagcgaccatcaacgcagccacagagttggacacgcccaaggaccttcaggtttctgaaactgcagagaccagcctgaccctgctctggaagacaccgttggccaaatttgaccgctaccgcctcaattacagtctccccacaggccagtgggtgggagtgcagcttccaagaaacaccacttcctatgtcctgagaggcctggaaccaggacaggagtacaatgtcctcctgacagccgagaaaggcagacacaagagcaagcccgcacgtgtgaaggcatccactgccatgggctccccaaaggaagtcattttctcagacatcactgaaaattcggctactgtcagctggagggcacccacagcccaagtggagagcttccggattacctatgtgcccattacaggaggtacaccctccatggtaactgtggacggaaccaagactcagaccaggctggtgaaactcatacctggcgtggagtaccttgtcagcatcatcgccatgaagggctttgaggaaagtgaacctgtctcagggtcattcaccacagctctggatggcccatctggcctggtgacagccaacatcactgactcagaagccttggccaggtggcagccagccattgccactgtggacagttatgtcatctcctacacaggcgagaaagtgccagaaattacacgcacggtgtccgggaacacagtggagtatgctctgaccgacctcgagcctgccacggaatacacactgagaatctttgcagagaaagggccccagaagagctcaaccatcactgccaagttcacaacagacctcgattctccaagagacttgactgctactgaggttcagtcggaaactgccctccttacctggcgacccccccgggcatcagtcaccggttacctgctggtctatgaatcagtggatggcacagtcaaggaagtcattgtgggtccagataccacctcctacagcctggcagacctgagcccatccacccactacacagccaagatccaggcactcaatgggcccctgaggagcaatatgatccagaccatcttcaccacaattggactcctgtaccccttccccaaggactgctcccaagcaatgctgaatggagacacgacctctggcctctacaccatttatctgaatggtgataaggctgaggcgctggaagtcttctgtgacatgacctctgatgggggtggatggattgtgttcctgagacgcaaaaacggacgcgagaacttctaccaaaactggaaggcatatgctgctggatttggggaccgcagagaagaattctggcttgggctggacaacctgaacaaaatcacagcccaggggcagtacgagctccgggtggacctgcgggaccatggggagacagcctttgctgtctatgacaagttcagcgtgggagatgccaagactcgctacaagctgaaggtggaggggtacagtgggacagcaggtgactccatggcctaccacaatggcagatccttctccacctttgacaaggacacagattcagccatcaccaactgtgctctgtcctacaaaggggctttctggtacaggaactgtcaccgtgtcaacctgatggggagatatggggacaataaccacagtcagggcgttaactggttccactggaagggccacgaacactcaatccagtttgctgagatgaagctgagaccaagcaacttcagaaatcttgaaggcaggcgcaaacgggcataaattccagggaccactgggtgagagaggaataaggcccagagcgaggaaaggattttaccaaagcatcaatacaaccagcccaaccatcggtccacacctgggcatttggtgagagtcaaagctgaccatggatccctggggccaacggcaacagcatgggcctcacctcctctgtgatttctttctttgcaccaaagacatcagtctccaacatgtttctgttttgttgtttgattcagcaaaaatctcccagtgacaacatcgcaatagttttttacttctcttaggtggctctgggaatgggagaggggtaggatgtacaggggtagtttgttttagaaccagccgtattttacatgaagctgtataattaattgtcattatttttgttagcaaagattaaatgtgtcattggaagccatccctttttttacatttcatacaacagaaaccagaaaagcaatactgtttccattttaaggatatgattaatattattaatataataatgatgatgatgatgatgaaaactaaggatttttcaagagatctttctttccaaaacatttctggacagtacctgattgtattttttttttaaataaaagcacaagtacttttgagtttgtt

SEQ ID NO: 31264 - DNA, 5960 bp, Homo sapiens
  source 1..5960: mol_type = unassigned DNA
attacagaggaaggagctcgctatataagccagccaaagttggctgcaccggccacagcctgcctactgtcacccgcctctcccgcgcgcagatacacgcccccgcctccgtgggcacaaaggcagcgctgctggggaactcgggggaacgcgcacgtgggaaccgccgcagctccacactccaggtacttcttccaaggacctaggtctctcgcccatcggaaagaaaataattctttcaagaagatcagggacaactgatttgaagtctactctgtgcttctaaatccccaattctgctgaaagtgagataccctagagccctagagccccagcagcacccagccaaacccacctccaccatgggggccatgactcagctgttggcaggtgtctttcttgctttccttgccctcgctaccgaaggtggggtcctcaagaaagtcatccggcacaagcgacagagtggggtgaacgccaccctgccagaagagaaccagccagtggtgtttaaccacgtttacaacatcaagctgccagtgggatcccagtgttcggtggatctggagtcagccagtggggagaaagacctggcaccgccttcagagcccagcgaaagctttcaggagcacacagtggatggggaaaaccagattgtcttcacacatcgcatcaacatcccccgccgggcctgtggctgtgccgcagcccctgatgttaaggagctgctgagcagactggaggagctggagaacctggtgtcttccctgagggagcaatgtactgcaggagcaggctgctgtctccagcctgccacaggccgcttggacaccaggcccttctgtagcggtcggggcaacttcagcactgaaggatgtggctgtgtctgcgaacctggctggaaaggccccaactgctctgagcccgaatgtccaggcaactgtcaccttcgaggccggtgcattgatgggcagtgcatctgtgacgacggcttcacgggcgaggactgcagccagctggcttgccccagcgactgcaatgaccagggcaagtgcgtaaatggagtctgcatctgtttcgaaggctacgccggggctgactgcagccgtgaaatctgcccagtgccctgcagtgaggagcacggcacatgtgtagatggcttgtgtgtgtgccacgatggctttgcaggcgatgactgcaacaagcctctgtgtctcaacaattgctacaaccgtggacgatgcgtggagaatgagtgcgtgtgtgatgagggtttcacgggcgaagactgcagtgagctcatctgccccaatgactgcttcgaccggggccgctgcatcaatggcacctgctactgcgaagaaggcttcacaggtgaagactgcgggaaacccacctgcccacatgcctgccacacccagggccggtgtgaggaggggcagtgtgtatgtgatgagggctttgccggtgtggactgcagcgagaagaggtgtcctgctgactgtcacaatcgtggccgctgtgtagacgggcggtgtgagtgtgatgatggtttcactggagctgactgtggggagctcaagtgtcccaatggctgcagtggccatggccgctgtgtcaatgggcagtgtgtgtgtgatgagggctatactggggaggactgcagccagctacggtgccccaatgactgtcacagtcggggccgctgtgtcgagggcaaatgtgtatgtgagcaaggcttcaagggctatgactgcagtgacatgagctgccctaatgactgtcaccagcacggccgctgtgtgaatggcatgtgtgtttgtgatgacggctacacaggggaagactgccgggatcgccaatgccccagggactgcagcaacaggggcctctgtgtggacggacagtgcgtctgtgaggacggcttcaccggccctgactgtgcagaactctcctgtccaaatgactgccatggccagggtcgctgtgtgaatgggcagtgcgtgtgccatgaaggatttatgggcaaagactgcaaggagcaaagatgtcccagtgactgtcatggccagggccgctgcgtggacggccagtgcatctgccacgagggcttcacaggcctggactgtggccagcactcctgccccagtgactgcaacaacttaggacaatgcgtctcgggccgctgcatctgcaacgagggctacagcggagaagactgctcagaggtgtctcctcccaaagacctcgttgtgacagaagtgacggaagagacggtcaacctggcctgggacaatgagatgcgggtcacagagtaccttgtcgtgtacacgcccacccacgagggtggtctggaaatgcagttccgtgtgcctggggaccagacgtccaccatcatccaggagctggagcctggtgtggagtactttatccgtgtatttgccatcctggagaacaagaagagcattcctgtcagcgccagggtggccacgtacttacctgcacctgaaggcctgaaattcaagtccatcaaggagacatctgtggaagtggagtgggatcctctagacattgcttttgaaacctgggagatcatcttccggaatatgaataaagaagatgagggagagatcaccaaaagcctgaggaggccagagacctcttaccggcaaactggtctagctcctgggcaagagtatgagatatctctgcacatagtgaaaaacaatacccggggccctggcctgaagagggtgaccaccacacgcttggatgcccccagccagatcgaggtgaaagatgtcacagacaccactgccttgatcacctggttcaagcccctggctgagatcgatggcattgagctgacctacggcatcaaagacgtgccaggagaccgtaccaccatcgatctcacagaggacgagaaccagtactccatcgggaacctgaagcctgacactgagtacgaggtgtccctcatctcccgcagaggtgacatgtcaagcaacccagccaaagagaccttcacaacaggcctcgatgctcccaggaatcttcgacgtgtttcccagacagataacagcatcaccctggaatggaggaatggcaaggcagctattgacagttacagaattaagtatgcccccatctctggaggggaccacgctgaggttgatgttccaaagagccaacaagccacaaccaaaaccacactcacaggtctgaggccgggaactgaatatgggattggagtttctgctgtgaaggaagacaaggagagcaatccagcgaccatcaacgcagccacagagttggacacgcccaaggaccttcaggtttctgaaactgcagagaccagcctgaccctgctctggaagacaccgttggccaaatttgaccgctaccgcctcaattacagtctccccacaggccagtgggtgggagtgcagcttccaagaaacaccacttcctatgtcctgagaggcctggaaccaggacaggagtacaatgtcctcctgacagccgagaaaggcagacacaagagcaagcccgcacgtgtgaaggcatccactgaagccgaaccggaagttgacaaccttctggtttcagatgccaccccagacggtttccgtctgtcctggacagctgatgaaggggtcttcgacaattttgttctcaaaatcagagataccaaaaagcagtctgagccactggaaataaccctacttgcccccgaacgtaccagggacataacaggtctcagagaggctactgaatacgaaattgaactctatggaataagcaaaggaaggcgatcccagacagtcagtgctatagcaacaacagccatgggctccccaaaggaagtcattttctcagacatcactgaaaattcggctactgtcagctggagggcacccacagcccaagtggagagcttccggattacctatgtgcccattacaggaggtacaccctccatggtaactgtggacggaaccaagactcagaccaggctggtgaaactcatacctggcgtggagtaccttgtcagcatcatcgccatgaagggctttgaggaaagtgaacctgtctcagggtcattcaccacagctctggatggcccatctggcctggtgacagccaacatcactgactcagaagccttggccaggtggcagccagccattgccactgtggacagttatgtcatctcctacacaggcgagaaagtgccagaaattacacgcacggtgtccgggaacacagtggagtatgctctgaccgacctcgagcctgccacggaatacacactgagaatctttgcagagaaagggccccagaagagctcaaccatcactgccaagttcacaacagacctcgattctccaagagacttgactgctactgaggttcagtcggaaactgccctccttacctggcgacccccccgggcatcagtcaccggttacctgctggtctatgaatcagtggatggcacagtcaaggaagtcattgtgggtccagataccacctcctacagcctggcagacctgagcccatccacccactacacagccaagatccaggcactcaatgggcccctgaggagcaatatgatccagaccatcttcaccacaattggactcctgtaccccttccccaaggactgctcccaagcaatgctgaatggagacacgacctctggcctctacaccatttatctgaatggtgataaggctgaggcgctggaagtcttctgtgacatgacctctgatgggggtggatggattgtgttcctgagacgcaaaaacggacgcgagaacttctaccaaaactggaaggcatatgctgctggatttggggaccgcagagaagaattctggcttgggctggacaacctgaacaaaatcacagcccaggggcagtacgagctccgggtggacctgcgggaccatggggagacagcctttgctgtctatgacaagttcagcgtgggagatgccaagactcgctacaagctgaaggtggaggggtacagtgggacagcaggtgactccatggcctaccacaatggcagatccttctccacctttgacaaggacacagattcagccatcaccaactgtgctctgtcctacaaaggggctttctggtacaggaactgtcaccgtgtcaacctgatggggagatatggggacaataaccacagtcagggcgttaactggttccactggaagggccacgaacactcaatccagtttgctgagatgaagctgagaccaagcaacttcagaaatcttgaaggcaggcgcaaacgggcataaattccagggaccactgggtgagagaggaataaggcccagagcgaggaaaggattttaccaaagcatcaatacaaccagcccaaccatcggtccacacctgggcatttggtgagagtcaaagctgaccatggatccctggggccaacggcaacagcatgggcctcacctcctctgtgatttctttctttgcaccaaagacatcagtctccaacatgtttctgttttgttgtttgattcagcaaaaatctcccagtgacaacatcgcaatagttttttacttctcttaggtggctctgggaatgggagaggggtaggatgtacaggggtagtttgttttagaaccagccgtattttacatgaagctgtataattaattgtcattatttttgttagcaaagattaaatgtgtcattggaagccatccctttttttacatttcatacaacagaaaccagaaaagcaatactgtttccattttaaggatatgattaatattattaatataataatgatgatgatgatgatgaaaactaaggatttttcaagagatctttctttccaaaacatttctggacagtacctgattgtattttttttttaaataaaagcacaagtacttttgagtttgtt

SEQ ID NO: 31265 - DNA, 7641 bp, Homo sapiens
  source 1..7641: mol_type = unassigned DNA
aattcgccaactgaaaaagtgggaaaggatgtctggaggcgaggcgtcccattacagaggaaggagctcgctatataagccagccaaagttggctgcaccggccacagcctgcctactgtcacccgcctctcccgcgcgcagatacacgcccccgcctccgtgggcacaaaggcagcgctgctggggaactcgggggaacgcgcacgtgggaaccgccgcagctccacactccaggtacttcttccaaggacctaggtctctcgcccatcggaaagaaaataattctttcaagaagatcagggacaactgatttgaagtctactctgtgcttctaaatccccaattctgctgaaagtgagataccctagagccctagagccccagcagcacccagccaaacccacctccaccatgggggccatgactcagctgttggcaggtgtctttcttgctttccttgccctcgctaccgaaggtggggtcctcaagaaagtcatccggcacaagcgacagagtggggtgaacgccaccctgccagaagagaaccagccagtggtgtttaaccacgtttacaacatcaagctgccagtgggatcccagtgttcggtggatctggagtcagccagtggggagaaagacctggcaccgccttcagagcccagcgaaagctttcaggagcacacagtggatggggaaaaccagattgtcttcacacatcgcatcaacatcccccgccgggcctgtggctgtgccgcagcccctgatgttaaggagctgctgagcagactggaggagctggagaacctggtgtcttccctgagggagcaatgtactgcaggagcaggctgctgtctccagcctgccacaggccgcttggacaccaggcccttctgtagcggtcggggcaacttcagcactgaaggatgtggctgtgtctgcgaacctggctggaaaggccccaactgctctgagcccgaatgtccaggcaactgtcaccttcgaggccggtgcattgatgggcagtgcatctgtgacgacggcttcacgggcgaggactgcagccagctggcttgccccagcgactgcaatgaccagggcaagtgcgtaaatggagtctgcatctgtttcgaaggctacgccggggctgactgcagccgtgaaatctgcccagtgccctgcagtgaggagcacggcacatgtgtagatggcttgtgtgtgtgccacgatggctttgcaggcgatgactgcaacaagcctctgtgtctcaacaattgctacaaccgtggacgatgcgtggagaatgagtgcgtgtgtgatgagggtttcacgggcgaagactgcagtgagctcatctgccccaatgactgcttcgaccggggccgctgcatcaatggcacctgctactgcgaagaaggcttcacaggtgaagactgcgggaaacccacctgcccacatgcctgccacacccagggccggtgtgaggaggggcagtgtgtatgtgatgagggctttgccggtgtggactgcagcgagaagaggtgtcctgctgactgtcacaatcgtggccgctgtgtagacgggcggtgtgagtgtgatgatggtttcactggagctgactgtggggagctcaagtgtcccaatggctgcagtggccatggccgctgtgtcaatgggcagtgtgtgtgtgatgagggctatactggggaggactgcagccagctacggtgccccaatgactgtcacagtcggggccgctgtgtcgagggcaaatgtgtatgtgagcaaggcttcaagggctatgactgcagtgacatgagctgccctaatgactgtcaccagcacggccgctgtgtgaatggcatgtgtgtttgtgatgacggctacacaggggaagactgccgggatcgccaatgccccagggactgcagcaacaggggcctctgtgtggacggacagtgcgtctgtgaggacggcttcaccggccctgactgtgcagaactctcctgtccaaatgactgccatggccagggtcgctgtgtgaatgggcagtgcgtgtgccatgaaggatttatgggcaaagactgcaaggagcaaagatgtcccagtgactgtcatggccagggccgctgcgtggacggccagtgcatctgccacgagggcttcacaggcctggactgtggccagcactcctgccccagtgactgcaacaacttaggacaatgcgtctcgggccgctgcatctgcaacgagggctacagcggagaagactgctcagaggtgtctcctcccaaagacctcgttgtgacagaagtgacggaagagacggtcaacctggcctgggacaatgagatgcgggtcacagagtaccttgtcgtgtacacgcccacccacgagggtggtctggaaatgcagttccgtgtgcctggggaccagacgtccaccatcatccaggagctggagcctggtgtggagtactttatccgtgtatttgccatcctggagaacaagaagagcattcctgtcagcgccagggtggccacgtacttacctgcacctgaaggcctgaaattcaagtccatcaaggagacatctgtggaagtggagtgggatcctctagacattgcttttgaaacctgggagatcatcttccggaatatgaataaagaagatgagggagagatcaccaaaagcctgaggaggccagagacctcttaccggcaaactggtctagctcctgggcaagagtatgagatatctctgcacatagtgaaaaacaatacccggggccctggcctgaagagggtgaccaccacacgcttggatgcccccagccagatcgaggtgaaagatgtcacagacaccactgccttgatcacctggttcaagcccctggctgagatcgatggcattgagctgacctacggcatcaaagacgtgccaggagaccgtaccaccatcgatctcacagaggacgagaaccagtactccatcgggaacctgaagcctgacactgagtacgaggtgtccctcatctcccgcagaggtgacatgtcaagcaacccagccaaagagaccttcacaacaggcctcgatgctcccaggaatcttcgacgtgtttcccagacagataacagcatcaccctggaatggaggaatggcaaggcagctattgacagttacagaattaagtatgcccccatctctggaggggaccacgctgaggttgatgttccaaagagccaacaagccacaaccaaaaccacactcacaggtctgaggccgggaactgaatatgggattggagtttctgctgtgaaggaagacaaggagagcaatccagcgaccatcaacgcagccacagagttggacacgcccaaggaccttcaggtttctgaaactgcagagaccagcctgaccctgctctggaagacaccgttggccaaatttgaccgctaccgcctcaattacagtctccccacaggccagtgggtgggagtgcagcttccaagaaacaccacttcctatgtcctgagaggcctggaaccaggacaggagtacaatgtcctcctgacagccgagaaaggcagacacaagagcaagcccgcacgtgtgaaggcatccactgaacaagcccctgagctggaaaacctcaccgtgactgaggttggctgggatggcctcagactcaactggaccgcagctgaccaggcctatgagcactttatcattcaggtgcaggaggccaacaaggtggaggcagctcggaacctcaccgtgcctggcagccttcgggctgtggacataccgggcctcaaggctgctacgccttatacagtctccatctatggggtgatccagggctatagaacaccagtgctctctgctgaggcctccacaggggaaactcccaatttgggagaggtcgtggtggccgaggtgggctgggatgccctcaaactcaactggactgctccagaaggggcctatgagtactttttcattcaggtgcaggaggctgacacagtagaggcagcccagaacctcaccgtcccaggaggactgaggtccacagacctgcctgggctcaaagcagccactcattataccatcaccatccgcggggtcactcaggacttcagcacaacccctctctctgttgaagtcttgacagaggaggttccagatatgggaaacctcacagtgaccgaggttagctgggatgctctcagactgaactggaccacgccagatggaacctatgaccagtttactattcaggtccaggaggctgaccaggtggaagaggctcacaatctcacggttcctggcagcctgcgttccatggaaatcccaggcctcagggctggcactccttacacagtcaccctgcacggcgaggtcaggggccacagcactcgaccccttgctgtagaggtcgtcacagaggatctcccacagctgggagatttagccgtgtctgaggttggctgggatggcctcagactcaactggaccgcagctgacaatgcctatgagcactttgtcattcaggtgcaggaggtcaacaaagtggaggcagcccagaacctcacgttgcctggcagcctcagggctgtggacatcccgggcctcgaggctgccacgccttatagagtctccatctatggggtgatccggggctatagaacaccagtactctctgctgaggcctccacagccaaagaacctgaaattggaaacttaaatgtttctgacataactcccgagagcttcaatctctcctggatggctaccgatgggatcttcgagacctttaccattgaaattattgattccaataggttgctggagactgtggaatataatatctctggtgctgaacgaactgcccatatctcagggctaccccctagtactgattttattgtctacctctctggacttgctcccagcatccggaccaaaaccatcagtgccacagccacgacagaggccctgccccttctggaaaacctaaccatttccgacattaatccctacgggttcacagtttcctggatggcatcggagaatgcctttgacagctttctagtaacggtggtggattctgggaagctgctggacccccaggaattcacactttcaggaacccagaggaagctggagcttagaggcctcataactggcattggctatgaggttatggtctctggcttcacccaagggcatcaaaccaagcccttgagggctgagattgttacagaagccgaaccggaagttgacaaccttctggtttcagatgccaccccagacggtttccgtctgtcctggacagctgatgaaggggtcttcgacaattttgttctcaaaatcagagataccaaaaagcagtctgagccactggaaataaccctacttgcccccgaacgtaccagggacataacaggtctcagagaggctactgaatacgaaattgaactctatggaataagcaaaggaaggcgatcccagacagtcagtgctatagcaacaacagccatgggctccccaaaggaagtcattttctcagacatcactgaaaattcggctactgtcagctggagggcacccacagcccaagtggagagcttccggattacctatgtgcccattacaggaggtacaccctccatggtaactgtggacggaaccaagactcagaccaggctggtgaaactcatacctggcgtggagtaccttgtcagcatcatcgccatgaagggctttgaggaaagtgaacctgtctcagggtcattcaccacagctctggatggcccatctggcctggtgacagccaacatcactgactcagaagccttggccaggtggcagccagccattgccactgtggacagttatgtcatctcctacacaggcgagaaagtgccagaaattacacgcacggtgtccgggaacacagtggagtatgctctgaccgacctcgagcctgccacggaatacacactgagaatctttgcagagaaagggccccagaagagctcaaccatcactgccaagttcacaacagacctcgattctccaagagacttgactgctactgaggttcagtcggaaactgccctccttacctggcgacccccccgggcatcagtcaccggttacctgctggtctatgaatcagtggatggcacagtcaaggaagtcattgtgggtccagataccacctcctacagcctggcagacctgagcccatccacccactacacagccaagatccaggcactcaatgggcccctgaggagcaatatgatccagaccatcttcaccacaattggactcctgtaccccttccccaaggactgctcccaagcaatgctgaatggagacacgacctctggcctctacaccatttatctgaatggtgataaggctgaggcgctggaagtcttctgtgacatgacctctgatgggggtggatggattgtgttcctgagacgcaaaaacggacgcgagaacttctaccaaaactggaaggcatatgctgctggatttggggaccgcagagaagaattctggcttgggctggacaacctgaacaaaatcacagcccaggggcagtacgagctccgggtggacctgcgggaccatggggagacagcctttgctgtctatgacaagttcagcgtgggagatgccaagactcgctacaagctgaaggtggaggggtacagtgggacagcaggtgactccatggcctaccacaatggcagatccttctccacctttgacaaggacacagattcagccatcaccaactgtgctctgtcctacaaaggggctttctggtacaggaactgtcaccgtgtcaacctgatggggagatatggggacaataaccacagtcagggcgttaactggttccactggaagggccacgaacactcaatccagtttgctgagatgaagctgagaccaagcaacttcagaaatcttgaaggcaggcgcaaacgggcataaattccagggaccactgggtgagagaggaataaggcccagagcgaggaaaggattttaccaaagcatcaatacaaccagcccaaccatcggtccacacctgggcatttggtgagagtcaaagctgaccatggatccctggggccaacggcaacagcatgggcctcacctcctctgtgatttctttctttgcaccaaagacatcagtctccaacatgtttctgttttgttgtttgattcagcaaaaatctcccagtgacaacatcgcaatagttttttacttctcttaggtggctctgggaatgggagaggggtaggatgtacaggggtagtttgttttagaaccagccgtattttacatgaagctgtataattaattgtcattatttttgttagcaaagattaaatgtgtcattggaagccatccctttttttacatttcatacaacagaaaccagaaaagcaatactgtttccattttaaggatatgattaatattattaatataataatgatgatgatgatgatgaaaactaaggatttttcaagagatctttctttccaaaacatttctggacagtacctgattgtattttttttttaaataaaagcacaagtacttttga

SEQ ID NO: 31266 - DNA, 3602 bp, Homo sapiens
  source 1..3602: mol_type = unassigned DNA
attacagaggaaggagctcgctatataagccagccaaagttggctgcaccggccacagcctgcctactgtcacccgcctctcccgcgcgcagatacacgcccccgcctccgtgggcacaaaggcagcgctgctggggaactcgggggaacgcgcacgtgggaaccgccgcagctccacactccaggtacttcttccaaggacctaggtctctcgcccatcggaaagaaaataattctttcaagaagatcagggacaactgatttgaagtctactctgtgcttctaaatccccaattctgctgaaagtgagataccctagagccctagagccccagcagcacccagccaaacccacctccaccatgggggccatgactcagctgttggcaggtgtctttcttgctttccttgccctcgctaccgaaggtggggtcctcaagaaagtcatccggcacaagcgacagagtggggtgaacgccaccctgccagaagagaaccagccagtggtgtttaaccacgtttacaacatcaagctgccagtgggatcccagtgttcggtggatctggagtcagccagtggggagaaagacctggcaccgccttcagagcccagcgaaagctttcaggagcacacagtggatggggaaaaccagattgtcttcacacatcgcatcaacatcccccgccgggcctgtggctgtgccgcagcccctgatgttaaggagctgctgagcagactggaggagctggagaacctggtgtcttccctgagggagcaatgtactgcaggagcaggctgctgtctccagcctgccacaggccgcttggacaccaggcccttctgtagcggtcggggcaacttcagcactgaaggatgtggctgtgtctgcgaacctggctggaaaggccccaactgctctgagcccgaatgtccaggcaactgtcaccttcgaggccggtgcattgatgggcagtgcatctgtgacgacggcttcacgggcgaggactgcagccagctggcttgccccagcgactgcaatgaccagggcaagtgcgtaaatggagtctgcatctgtttcgaaggctacgccggggctgactgcagccgtgaaatctgcccagtgccctgcagtgaggagcacggcacatgtgtagatggcttgtgtgtgtgccacgatggctttgcaggcgatgactgcaacaagcctctgtgtctcaacaattgctacaaccgtggacgatgcgtggagaatgagtgcgtgtgtgatgagggtttcacgggcgaagactgcagtgagctcatctgccccaatgactgcttcgaccggggccgctgcatcaatggcacctgctactgcgaagaaggcttcacaggtgaagactgcgggaaacccacctgcccacatgcctgccacacccagggccggtgtgaggaggggcagtgtgtatgtgatgagggctttgccggtgtggactgcagcgagaagaggtgtcctgctgactgtcacaatcgtggccgctgtgtagacgggcggtgtgagtgtgatgatggtttcactggagctgactgtggggagctcaagtgtcccaatggctgcagtggccatggccgctgtgtcaatgggcagtgtgtgtgtgatgagggctatactggggaggactgcagccagctacggtgccccaatgactgtcacagtcggggccgctgtgtcgagggcaaatgtgtatgtgagcaaggcttcaagggctatgactgcagtgacatgagctgccctaatgactgtcaccagcacggccgctgtgtgaatggcatgtgtgtttgtgatgacggctacacaggggaagactgccgggatcgccaatgccccagggactgcagcaacaggggcctctgtgtggacggacagtgcgtctgtgaggacggcttcaccggccctgactgtgcagaactctcctgtccaaatgactgccatggccagggtcgctgtgtgaatgggcagtgcgtgtgccatgaaggatttatgggcaaagactgcaaggagcaaagatgtcccagtgactgtcatggccagggccgctgcgtggacggccagtgcatctgccacgagggcttcacaggcctggactgtggccagcactcctgccccagtgactgcaacaacttaggacaatgcgtctcgggccgctgcatctgcaacgagggctacagcggagaagactgctcagaggtgtctcctcccaaagacctcgttgtgacagaagtgacggaagagacggtcaacctggcctgggacaatgagatgcgggtcacagagtaccttgtcgtgtacacgcccacccacgagggtggtctggaaatgcagttccgtgtgcctggggaccagacgtccaccatcatccaggagctggagcctggtgtggagtactttatccgtgtatttgccatcctggagaacaagaagagcattcctgtcagcgccagggtggccacgtacttacctgcacctgaaggcctgaaattcaagtccatcaaggagacatctgtggaagtggagtgggatcctctagacattgcttttgaaacctgggagatcatcttccggaatatgaataaagaagatgagggagagatcaccaaaagcctgaggaggccagagacctcttaccggcaaactggtctagctcctgggcaagagtatgagatatctctgcacatagtgaaaaacaatacccggggccctggcctgaagagggtgaccaccacacgcttggatgcccccagccagatcgaggtgaaagatgtcacagacaccactgccttgatcacctggttcaagcccctggctgagatcgatggcattgagctgacctacggcatcaaagacgtgccaggagaccgtaccaccatcgatctcacagaggacgagaaccagtactccatcgggaacctgaagcctgacactgagtacgaggtgtccctcatctcccgcagaggtgacatgtcaagcaacccagccaaagagaccttcacaacaggcctcgatgctcccaggaatcttcgacgtgtttcccagacagataacagcatcaccctggaatggaggaatggcaaggcagctattgacagttacagaattaagtatgcccccatctctggaggggaccacgctgaggttgatgttccaaagagccaacaagccacaaccaaaaccatcactgccaagttcacaacagacctcgattctccaagagacttgactgctactgaggttcagtcggaaactgccctccttacctggcgacccccccgggcatcagtcaccggttacctgctggtctatgaatcagtggatggcacagtcaaggaagtcattgtgggtccagataccacctcctacagcctggcagacctgagcccaccatccctttttttacatttcatacaacagaaaccagaaaagcaatactgtttccattttaaggatatgattaatattattaatataataatgatgatgatgatgatgaaaactaaggatttttcaagagatctttctttccaaaacatttctggacagtacctgattgtattttttttttaa

SEQ ID NO: 31267 - DNA, 734 bp, Homo sapiens
  source 1..734: mol_type = unassigned DNA
ggaaggagctcgctatataagccagccaaagttggctgcaccggccacagcctgcctactgtcacccgcctctcccgcgcgcagatacacgcccccgcctccgtgggcacaaaggcagcgctgctggggaactcgggggaacgcgcacgtgggaaccgccgcagctccacactccaggtacttcttccaaggacctaggtctctcgcccatcggaaagatttctatagacacctagctgtgctttcttacaagaaaacatatccactggaccaaagcgcagcccccttcatgctgaagccacttcagtttgaaacgtaaaaaaaaataattctttcaagaagatcagggacaactgatttgaagtctactctgtgcttctaaatccccaattctgctgaaagtgagataccctagagccctagagccccagcagcacccagccaaacccacctccaccatgggggccatgactcagctgttggcaggtgtctttcttgctttccttgccctcgctaccgaaggtggggtcctcaagaaagtcatccggcacaagcgacagagtggggtgaacgccaccctgccagaagagaaccagccagtggtgtttaaccacgtttacaacatcaagctgccagtgggatcccagtgttcggtggatctggagtcagccagtggggagaaagacctggcaccgccttcagagcccagcgaaagctttcaggagcacacagtg

SEQ ID NO: 31268 - DNA, 6233 bp, Homo sapiens
  source 1..6233: mol_type = unassigned DNA
attacagaggaaggagctcgctatataagccagccaaagttggctgcaccggccacagcctgcctactgtcacccgcctctcccgcgcgcagatacacgcccccgcctccgtgggcacaaaggcagcgctgctggggaactcgggggaacgcgcacgtgggaaccgccgcagctccacactccaggtacttcttccaaggacctaggtctctcgcccatcggaaagaaaataattctttcaagaagatcagggacaactgatttgaagtctactctgtgcttctaaatccccaattctgctgaaagtgagataccctagagccctagagccccagcagcacccagccaaacccacctccaccatgggggccatgactcagctgttggcaggtgtctttcttgctttccttgccctcgctaccgaaggtggggtcctcaagaaagtcatccggcacaagcgacagagtggggtgaacgccaccctgccagaagagaaccagccagtggtgtttaaccacgtttacaacatcaagctgccagtgggatcccagtgttcggtggatctggagtcagccagtggggagaaagacctggcaccgccttcagagcccagcgaaagctttcaggagcacacagtggatggggaaaaccagattgtcttcacacatcgcatcaacatcccccgccgggcctgtggctgtgccgcagcccctgatgttaaggagctgctgagcagactggaggagctggagaacctggtgtcttccctgagggagcaatgtactgcaggagcaggctgctgtctccagcctgccacaggccgcttggacaccaggcccttctgtagcggtcggggcaacttcagcactgaaggatgtggctgtgtctgcgaacctggctggaaaggccccaactgctctgagcccgaatgtccaggcaactgtcaccttcgaggccggtgcattgatgggcagtgcatctgtgacgacggcttcacgggcgaggactgcagccagctggcttgccccagcgactgcaatgaccagggcaagtgcgtaaatggagtctgcatctgtttcgaaggctacgccggggctgactgcagccgtgaaatctgcccagtgccctgcagtgaggagcacggcacatgtgtagatggcttgtgtgtgtgccacgatggctttgcaggcgatgactgcaacaagcctctgtgtctcaacaattgctacaaccgtggacgatgcgtggagaatgagtgcgtgtgtgatgagggtttcacgggcgaagactgcagtgagctcatctgccccaatgactgcttcgaccggggccgctgcatcaatggcacctgctactgcgaagaaggcttcacaggtgaagactgcgggaaacccacctgcccacatgcctgccacacccagggccggtgtgaggaggggcagtgtgtatgtgatgagggctttgccggtgtggactgcagcgagaagaggtgtcctgctgactgtcacaatcgtggccgctgtgtagacgggcggtgtgagtgtgatgatggtttcactggagctgactgtggggagctcaagtgtcccaatggctgcagtggccatggccgctgtgtcaatgggcagtgtgtgtgtgatgagggctatactggggaggactgcagccagctacggtgccccaatgactgtcacagtcggggccgctgtgtcgagggcaaatgtgtatgtgagcaaggcttcaagggctatgactgcagtgacatgagctgccctaatgactgtcaccagcacggccgctgtgtgaatggcatgtgtgtttgtgatgacggctacacaggggaagactgccgggatcgccaatgccccagggactgcagcaacaggggcctctgtgtggacggacagtgcgtctgtgaggacggcttcaccggccctgactgtgcagaactctcctgtccaaatgactgccatggccagggtcgctgtgtgaatgggcagtgcgtgtgccatgaaggatttatgggcaaagactgcaaggagcaaagatgtcccagtgactgtcatggccagggccgctgcgtggacggccagtgcatctgccacgagggcttcacaggcctggactgtggccagcactcctgccccagtgactgcaacaacttaggacaatgcgtctcgggccgctgcatctgcaacgagggctacagcggagaagactgctcagaggtgtctcctcccaaagacctcgttgtgacagaagtgacggaagagacggtcaacctggcctgggacaatgagatgcgggtcacagagtaccttgtcgtgtacacgcccacccacgagggtggtctggaaatgcagttccgtgtgcctggggaccagacgtccaccatcatccaggagctggagcctggtgtggagtactttatccgtgtatttgccatcctggagaacaagaagagcattcctgtcagcgccagggtggccacgtacttacctgcacctgaaggcctgaaattcaagtccatcaaggagacatctgtggaagtggagtgggatcctctagacattgcttttgaaacctgggagatcatcttccggaatatgaataaagaagatgagggagagatcaccaaaagcctgaggaggccagagacctcttaccggcaaactggtctagctcctgggcaagagtatgagatatctctgcacatagtgaaaaacaatacccggggccctggcctgaagagggtgaccaccacacgcttggatgcccccagccagatcgaggtgaaagatgtcacagacaccactgccttgatcacctggttcaagcccctggctgagatcgatggcattgagctgacctacggcatcaaagacgtgccaggagaccgtaccaccatcgatctcacagaggacgagaaccagtactccatcgggaacctgaagcctgacactgagtacgaggtgtccctcatctcccgcagaggtgacatgtcaagcaacccagccaaagagaccttcacaacaggcctcgatgctcccaggaatcttcgacgtgtttcccagacagataacagcatcaccctggaatggaggaatggcaaggcagctattgacagttacagaattaagtatgcccccatctctggaggggaccacgctgaggttgatgttccaaagagccaacaagccacaaccaaaaccacactcacaggtctgaggccgggaactgaatatgggattggagtttctgctgtgaaggaagacaaggagagcaatccagcgaccatcaacgcagccacagagttggacacgcccaaggaccttcaggtttctgaaactgcagagaccagcctgaccctgctctggaagacaccgttggccaaatttgaccgctaccgcctcaattacagtctccccacaggccagtgggtgggagtgcagcttccaagaaacaccacttcctatgtcctgagaggcctggaaccaggacaggagtacaatgtcctcctgacagccgagaaaggcagacacaagagcaagcccgcacgtgtgaaggcatccactgccaaagaacctgaaattggaaacttaaatgtttctgacataactcccgagagcttcaatctctcctggatggctaccgatgggatcttcgagacctttaccattgaaattattgattccaataggttgctggagactgtggaatataatatctctggtgctgaacgaactgcccatatctcagggctaccccctagtactgattttattgtctacctctctggacttgctcccagcatccggaccaaaaccatcagtgccacagccacgacagaagccgaaccggaagttgacaaccttctggtttcagatgccaccccagacggtttccgtctgtcctggacagctgatgaaggggtcttcgacaattttgttctcaaaatcagagataccaaaaagcagtctgagccactggaaataaccctacttgcccccgaacgtaccagggacataacaggtctcagagaggctactgaatacgaaattgaactctatggaataagcaaaggaaggcgatcccagacagtcagtgctatagcaacaacagccatgggctccccaaaggaagtcattttctcagacatcactgaaaattcggctactgtcagctggagggcacccacagcccaagtggagagcttccggattacctatgtgcccattacaggaggtacaccctccatggtaactgtggacggaaccaagactcagaccaggctggtgaaactcatacctggcgtggagtaccttgtcagcatcatcgccatgaagggctttgaggaaagtgaacctgtctcagggtcattcaccacagctctggatggcccatctggcctggtgacagccaacatcactgactcagaagccttggccaggtggcagccagccattgccactgtggacagttatgtcatctcctacacaggcgagaaagtgccagaaattacacgcacggtgtccgggaacacagtggagtatgctctgaccgacctcgagcctgccacggaatacacactgagaatctttgcagagaaagggccccagaagagctcaaccatcactgccaagttcacaacagacctcgattctccaagagacttgactgctactgaggttcagtcggaaactgccctccttacctggcgacccccccgggcatcagtcaccggttacctgctggtctatgaatcagtggatggcacagtcaaggaagtcattgtgggtccagataccacctcctacagcctggcagacctgagcccatccacccactacacagccaagatccaggcactcaatgggcccctgaggagcaatatgatccagaccatcttcaccacaattggactcctgtaccccttccccaaggactgctcccaagcaatgctgaatggagacacgacctctggcctctacaccatttatctgaatggtgataaggctgaggcgctggaagtcttctgtgacatgacctctgatgggggtggatggattgtgttcctgagacgcaaaaacggacgcgagaacttctaccaaaactggaaggcatatgctgctggatttggggaccgcagagaagaattctggcttgggctggacaacctgaacaaaatcacagcccaggggcagtacgagctccgggtggacctgcgggaccatggggagacagcctttgctgtctatgacaagttcagcgtgggagatgccaagactcgctacaagctgaaggtggaggggtacagtgggacagcaggtgactccatggcctaccacaatggcagatccttctccacctttgacaaggacacagattcagccatcaccaactgtgctctgtcctacaaaggggctttctggtacaggaactgtcaccgtgtcaacctgatggggagatatggggacaataaccacagtcagggcgttaactggttccactggaagggccacgaacactcaatccagtttgctgagatgaagctgagaccaagcaacttcagaaatcttgaaggcaggcgcaaacgggcataaattccagggaccactgggtgagagaggaataaggcccagagcgaggaaaggattttaccaaagcatcaatacaaccagcccaaccatcggtccacacctgggcatttggtgagagtcaaagctgaccatggatccctggggccaacggcaacagcatgggcctcacctcctctgtgatttctttctttgcaccaaagacatcagtctccaacatgtttctgttttgttgtttgattcagcaaaaatctcccagtgacaacatcgcaatagttttttacttctcttaggtggctctgggaatgggagaggggtaggatgtacaggggtagtttgttttagaaccagccgtattttacatgaagctgtataattaattgtcattatttttgttagcaaagattaaatgtgtcattggaagccatccctttttttacatttcatacaacagaaaccagaaaagcaatactgtttccattttaaggatatgattaatattattaatataataatgatgatgatgatgatgaaaactaaggatttttcaagagatctttctttccaaaacatttctggacagtacctgattgtattttttttttaaataaaagcacaagtacttttgagtttgtt

SEQ ID NO: 31269 - DNA, 5517 bp, Homo sapiens
  source 1..5517: mol_type = unassigned DNA
atgggggccatgactcagctgttggcaggtgtctttcttgctttccttgccctcgctaccgaaggtggggtcctcaagaaagtcatccggcacaagcgacagagtggggtgaacgccaccctgccagaagagaaccagccagtggtgtttaaccacgtttacaacatcaagctgccagtgggatcccagtgttcggtggatctggagtcagccagtggggagaaagacctggcaccgccttcagagcccagcgaaagctttcaggagcacacagtggatggggaaaaccagattgtcttcacacatcgcatcaacatcccccgccgggcctgtggctgtgccgcagcccctgatgttaaggagctgctgagcagactggaggagctggagaacctggtgtcttccctgagggagcaatgtactgcaggagcaggctgctgtctccagcctgccacaggccgcttggacaccaggcccttctgtagcggtcggggcaacttcagcactgaaggatgtggctgtgtctgcgaacctggctggaaaggccccaactgctctgagcccgaatgtccaggcaactgtcaccttcgaggccggtgcattgatgggcagtgcatctgtgacgacggcttcacgggcgaggactgcagccagctggcttgccccagcgactgcaatgaccagggcaagtgcgtaaatggagtctgcatctgtttcgaaggctacgccggggctgactgcagccgtgaaatctgcccagtgccctgcagtgaggagcacggcacatgtgtagatggcttgtgtgtgtgccacgatggctttgcaggcgatgactgcaacaagcctctgtgtctcaacaattgctacaaccgtggacgatgcgtggagaatgagtgcgtgtgtgatgagggtttcacgggcgaagactgcagtgagctcatctgccccaatgactgcttcgaccggggccgctgcatcaatggcacctgctactgcgaagaaggcttcacaggtgaagactgcgggaaacccacctgcccacatgcctgccacacccagggccggtgtgaggaggggcagtgtgtatgtgatgagggctttgccggtgtggactgcagcgagaagaggtgtcctgctgactgtcacaatcgtggccgctgtgtagacgggcggtgtgagtgtgatgatggtttcactggagctgactgtggggagctcaagtgtcccaatggctgcagtggccatggccgctgtgtcaatgggcagtgtgtgtgtgatgagggctatactggggaggactgcagccagctacggtgccccaatgactgtcacagtcggggccgctgtgtcgagggcaaatgtgtatgtgagcaaggcttcaagggctatgactgcagtgacatgagctgccctaatgactgtcaccagcacggccgctgtgtgaatggcatgtgtgtttgtgatgacggctacacaggggaagactgccgggatcgccaatgccccagggactgcagcaacaggggcctctgtgtggacggacagtgcgtctgtgaggacggcttcaccggccctgactgtgcagaactctcctgtccaaatgactgccatggccagggtcgctgtgtgaatgggcagtgcgtgtgccatgaaggatttatgggcaaagactgcaaggagcaaagatgtcccagtgactgtcatggccagggccgctgcgtggacggccagtgcatctgccacgagggcttcacaggcctggactgtggccagcactcctgccccagtgactgcaacaacttaggacaatgcgtctcgggccgctgcatctgcaacgagggctacagcggagaagactgctcagaggtgtctcctcccaaagacctcgttgtgacagaagtgacggaagagacggtcaacctggcctgggacaatgagatgcgggtcacagagtaccttgtcgtgtacacgcccacccacgagggtggtctggaaatgcagttccgtgtgcctggggaccagacgtccaccatcatccaggagctggagcctggtgtggagtactttatccgtgtatttgccatcctggagaacaagaagagcattcctgtcagcgccagggtggccacgtacttacctgcacctgaaggcctgaaattcaagtccatcaaggagacatctgtggaagtggagtgggatcctctagacattgcttttgaaacctgggagatcatcttccggaatatgaataaagaagatgagggagagatcaccaaaagcctgaggaggccagagacctcttaccggcaaactggtctagctcctgggcaagagtatgagatatctctgcacatagtgaaaaacaatacccggggccctggcctgaagagggtgaccaccacacgcttggatgcccccagccagatcgaggtgaaagatgtcacagacaccactgccttgatcacctggttcaagcccctggctgagatcgatggcattgagctgacctacggcatcaaagacgtgccaggagaccgtaccaccatcgatctcacagaggacgagaaccagtactccatcgggaacctgaagcctgacactgagtacgaggtgtccctcatctcccgcagaggtgacatgtcaagcaacccagccaaagagaccttcacaacaggcctcgatgctcccaggaatcttcgacgtgtttcccagacagataacagcatcaccctggaatggaggaatggcaaggcagctattgacagttacagaattaagtatgcccccatctctggaggggaccacgctgaggttgatgttccaaagagccaacaagccacaaccaaaaccacactcacaggtctgaggccgggaactgaatatgggattggagtttctgctgtgaaggaagacaaggagagcaatccagcgaccatcaacgcagccacagagttggacacgcccaaggaccttcaggtttctgaaactgcagagaccagcctgaccctgctctggaagacaccgttggccaaatttgaccgctaccgcctcaattacagtctccccacaggccagtgggtgggagtgcagcttccaagaaacaccacttcctatgtcctgagaggcctggaaccaggacaggagtacaatgtcctcctgacagccgagaaaggcagacacaagagcaagcccgcacgtgtgaaggcatccactgccaaagaacctgaaattggaaacttaaatgtttctgacataactcccgagagcttcaatctctcctggatggctaccgatgggatcttcgagacctttaccattgaaattattgattccaataggttgctggagactgtggaatataatatctctggtgctgaacgaactgcccatatctcagggctaccccctagtactgattttattgtctacctctctggacttgctcccagcatccggaccaaaaccatcagtgccacagccacgacagaaccaaagccacagttgggcacgctaatctttagcaatattactccaaaaagcttcaacatgtcatggaccactcaagctgggctttttgcaaagattgttatcaatgtgagtgacgctcactcactgcatgagtcccagcaattcacagtctcaggagatgcaaagcaagctcacatcacaggcttggtggagaacactggctatgacgtcagtgtggcaggaaccaccttggctggggatcccaccagacccctcactgcctttgtcattacagaagccgaaccggaagttgacaaccttctggtttcagatgccaccccagacggtttccgtctgtcctggacagctgatgaaggggtcttcgacaattttgttctcaaaatcagagataccaaaaagcagtctgagccactggaaataaccctacttgcccccgaacgtaccagggacataacaggtctcagagaggctactgaatacgaaattgaactctatggaataagcaaaggaaggcgatcccagacagtcagtgctatagcaacaacagccatgggctccccaaaggaagtcattttctcagacatcactgaaaattcggctactgtcagctggagggcacccacagcccaagtggagagcttccggattacctatgtgcccattacaggaggtacaccctccatggtaactgtggacggaaccaagactcagaccaggctggtgaaactcatacctggcgtggagtaccttgtcagcatcatcgccatgaagggctttgaggaaagtgaacctgtctcagggtcattcaccacagctctggatggcccatctggcctggtgacagccaacatcactgactcagaagccttggccaggtggcagccagccattgccactgtggacagttatgtcatctcctacacaggcgagaaagtgccagaaattacacgcacggtgtccgggaacacagtggagtatgctctgaccgacctcgagcctgccacggaatacacactgagaatctttgcagagaaagggccccagaagagctcaaccatcactgccaagttcacaacagacctcgattctccaagagacttgactgctactgaggttcagtcggaaactgccctccttacctggcgacccccccgggcatcagtcaccggttacctgctggtctatgaatcagtggatggcacagtcaaggaagtcattgtgggtccagataccacctcctacagcctggcagacctgagcccatccacccactacacagccaagatccaggcactcaatgggcccctgaggagcaatatgatccagaccatcttcaccacaattggactcctgtaccccttccccaaggactgctcccaagcaatgctgaatggagacacgacctctggcctctacaccatttatctgaatggtgataaggctgaggcgctggaagtcttctgtgacatgacctctgatgggggtggatggattgtgttcctgagacgcaaaaacggacgcgagaacttctaccaaaactggaaggcatatgctgctggatttggggaccgcagagaagaattctggcttgggctggacaacctgaacaaaatcacagcccaggggcagtacgagctccgggtggacctgcgggaccatggggagacagcctttgctgtctatgacaagttcagcgtgggagatgccaagactcgctacaagctgaaggtggaggggtacagtgggacagcaggtgactccatggcctaccacaatggcagatccttctccacctttgacaaggacacagattcagccatcaccaactgtgctctgtcctacaaaggggctttctggtacaggaactgtcaccgtgtcaacctgatggggagatatggggacaataaccacagtcagggcgttaactggttccactggaagggccacgaacactcaatccagtttgctgagatgaagctgagaccaagcaacttcagaaatcttgaaggcaggcgcaaacgggcataa

SEQ ID NO: 31270 - DNA, 5190 bp, Homo sapiens
  source 1..5190: mol_type = unassigned DNA
ccaggcttcctcctctctttcacgtcagaggcaggaaccgactgtgctaaggctgttggctcaacacccagaggagacgggcagacccagggagagtgagagaagggggtcctctctgacccaaggaattaccactagtggagtgaagccacctgactttttgatcttattttggttgcctcctcattctccttccacccgtagccctgacagcttgggtttcatttctttcgtggagccttgtctcttcctcccagaataggaggaagggaagagaagggaaagaggagggctctctaggtgagcgcatcagctggctccagcctgagcaagcaagaattttcttcccaggaagctcctctcgctccccggccgcccacccccagcctgggtggctgtatcgttttaactgcatagagggcaggtctcttttggaattaggattaaagaaagtgcagtaaagagaaagcatcgaagacaccatcacaaaagattcccacaactccatgctgtgtgctgcaggctggtcctgaacccagatctctggctgagaggatgggggcagatggggaaacagtggttctgaagaacatgctcattggcatcaacctgatccttctgggctccatgatcaagccttcagagtgtcagctggaggtcaccacagaaagggtccagagacagtcagtggaggaggagggaggcattgccaactacaacacatccagcaaagagcagcctgtggtcttcaaccacgtgtacaacattaacgtgcccttggacaacctctgctcctcagggctagaggcctctgctgagcaggaggtgagtgcagaagacgagactctggcagagtacatgggccagacctcagaccacgagagccaggtcacctttacacacaggatcaacttccccaaaaaggcctgtccatgtgccagttcagcccaggtgctgcaggagctgctgagccggatcgagatgctggagagggaggtgtcggtgctgcgagaccagtgcaacgccaactgctgccaagaaagtgctgccacaggacaactggactatatccctcactgcagtggccacggcaactttagctttgagtcctgtggctgcatctgcaacgaaggctggtttggcaagaattgctcggagccctactgcccgctgggttgctccagccggggggtgtgtgtggatggccagtgcatctgtgacagcgagtacagcggggatgactgttccgaactccggtgcccaacagactgcagctcccgggggctctgcgtggacggggagtgtgtctgtgaagagccctacactggcgaggactgcagggaactgaggtgccctggggactgttcggggaaggggagatgtgccaacggtacctgtttatgcgaggagggctacgttggtgaggactgcggccagcggcagtgtctgaatgcctgcagtgggcgaggacaatgtgaggaggggctctgcgtctgtgaagagggctaccagggccctgactgctcagcagttgcccctccagaggacttgcgagtggctggtatcagcgacaggtccattgagctggaatgggacgggccgatggcagtgacggaatatgtgatctcttaccagccgacggccctggggggcctccagctccagcagcgggtgcctggagattggagtggtgtcaccatcacggagctggagccaggtctcacctacaacatcagcgtctacgctgtcattagcaacatcctcagccttcccatcactgccaaggtggccacccatctctccactcctcaagggctacaatttaagacgatcacagagaccaccgtggaggtgcagtgggagcccttctcattttccttcgatgggtgggaaatcagcttcattccaaagaacaatgaagggggagtgattgctcaggtccccagcgatgttacgtcctttaaccagacaggactaaagcctggggaggaatacattgtcaatgtggtggctctgaaagaacaggcccgcagcccccctacctcggccagcgtctccacagtcattgacggccccacgcagatcctggttcgcgatgtctcggacactgtggcttttgtggagtggattccccctcgagccaaagtcgatttcattcttttgaaatatggcctggtgggcggggaaggtgggaggaccaccttccggctgcagcctcccctgagccaatactcagtgcaggccctgcggcctggctcccgatacgaggtgtcagtcagtgccgtccgagggaccaacgagagcgattctgccaccactcagttcacaacagagatcgatgcccccaagaacttgcgagttggttctcgcacagcaaccagccttgacctcgagtgggataacagtgaagccgaagttcaggagtacaaggttgtgtacagcaccctggcgggtgagcaatatcatgaggtactggtccccaggggcattggtccaaccaccagggccaccctgacagatctggtacctggcactgagtatggagttggaatatctgccgtcatgaactcacagcaaagcgtgccagccaccatgaatgccaggactgaacttgacagtccccgagacctcatggtgacagcctcctcggagacctccatctccctcatctggaccaaggccagtggccccattgaccactaccgaattacctttaccccatcctctgggattgcctcagaagtcaccgtacccaaggacaggacctcatacacactaacagatctagagcctggggcagagtacatcatttccgtcactgctgagaggggtcggcagcagagcttggagtccactgtggatgctttcacaggcttccgtcccatctctcatctgcacttttctcatgtgacctcctccagtgtgaacatcacttggagtgatccatctcccccagcagacagactcattcttaactacagccccagggatgaggaggaagagatgatggaggtctccctggatgccaccaagaggcatgctgtcctgatgggcctgcaaccagccacagagtatattgtgaaccttgtggctgtccatggcacagtgacctctgagcccattgtgggctccatcaccacaggaattgatcccccaaaagacatcacaattagcaatgtgaccaaggactcagtgatggtctcctggagccctcctgttgcatctttcgattactaccgagtatcatatcgacccacccaagtgggacgactagacagctcagtggtgcccaacactgtgacagaattcaccatcaccagactgaacccagctaccgaatacgaaatcagcctcaacagcgtgcggggcagggaggaaagcgagcgcatctgtactcttgtgcacacagccatggacaaccctgtggatctgattgctaccaatatcactccaacagaagccctgctgcagtggaaggcaccagtgggtgaggtggagaactacgtcattgttcttacacactttgcagtcgctggagagaccatccttgttgacggagtcagtgaggaatttcggcttgttgacctgcttcctagcacccactatactgccaccatgtatgccaccaatggacctctcaccagtggcaccatcagcaccaacttttctactctcctggaccctccggcaaacctgacagccagtgaagtcaccagacaaagtgccctgatctcctggcagcctcccagggcagagattgaaaattatgtcttgacctacaaatccaccgatggaagccgcaaggagctgattgtggatgcagaagacacctggattcgactggagggcctgttggagaacacagactacacggtgctcctgcaggcagcacaggacaccacgtggagcagcatcacctccaccgctttcaccacaggaggccgggtgttccctcatccccaagactgtgcccagcatttgatgaatggagacactttgagtggggtttaccccatcttcctcaatggggagctgagccagaaattacaagtgtactgtgatatgaccaccgacgggggcggctggattgtattccagaggcggcagaatggccaaactgattttttccggaaatgggctgattaccgtgttggcttcgggaacgtggaggatgagttctggctggggctggacaatatacacaggatcacatcccagggccgctatgagctgcgcgtggacatgcgggatggccaagaggccgccttcgcctcctacgacaggttctctgtcgaggacagcagaaacctgtacaaactccgcataggaagctacaacggcactgcgggggactccctcagctatcatcaaggacgccctttctccacagaggatagagacaatgatgttgcagtgactaactgtgccatgtcgtacaagggagcatggtggtataagaactgccaccggaccaacctcaatgggaagtacggggagtccaggcacagtcagggcatcaactggtaccattggaaaggccatgagttctccatcccctttgtggaaatgaagatgcgcccctacaaccaccgtctcatggcagggagaaaacggcagtccttacagttctgagcagtgggcggctgcaagccaaccaatattttctgtcatttgtttgtattttataatatgaaacaaggggggagggtaatagcaatgtgttttgcaacatattaagagtatgtgaaggaagcagggatgtcgcaggaatccgctggctaacatctgctcttggtttctgctgccctggagcctgaccctcagtctccattctccctcctacccaggcctcctcaaccttcacctcctttcccaccaaggaggagaagtaggaagttttcttaaagggccaattcaaagccaagtcgtggggtgcagattgttatggtgacaggcacacacatttttctacccttcttctgagatgtcctctgccttccaggtatttgtgattttgtcacagcctgacatggccaggttctcacactggcccagagaaaagagcctcagcaagagagttttgccaacaattccccttaaaaggaaacagatcaactacaccgcatcccaacaacccaggttcttttccttccttccttccttcctcccttccttctttcctgccttccc

SEQ ID NO: 31271 - DNA, 4920 bp, Homo sapiens
  source 1..4920: mol_type = unassigned DNA
ccaggcttcctcctctctttcacgtcagaggcaggaaccgactgtgctaaggctgttggctcaacacccagaggagacgggcagacccagggagagtgagagaagggggtcctctctgacccaaggaattaccactagtggagtgaagccacctgactttttgatcttattttggttgcctcctcattctccttccacccgtagccctgacagcttgggtttcatttctttcgtggagccttgtctcttcctcccagaataggaggaagggaagagaagggaaagaggagggctctctaggtgagcgcatcagctggctccagcctgagcaagcaagaattttcttcccaggaagctcctctcgctccccggccgcccacccccagcctgggtggctgtatcgttttaactgcatagagggcaggtctcttttggaattaggattaaagaaagtgcagtaaagagaaagcatcgaagacaccatcacaaaagattcccacaactccatgctgtgtgctgcaggctggtcctgaacccagatctctggctgagaggatgggggcagatggggaaacagtggttctgaagaacatgctcattggcatcaacctgatccttctgggctccatgatcaagccttcagagtgtcagctggaggtcaccacagaaagggtccagagacagtcagtggaggaggagggaggcattgccaactacaacacatccagcaaagagcagcctgtggtcttcaaccacgtgtacaacattaacgtgcccttggacaacctctgctcctcagggctagaggcctctgctgagcaggaggtgagtgcagaagacgagactctggcagagtacatgggccagacctcagaccacgagagccaggtcacctttacacacaggatcaacttccccaaaaaggcctgtccatgtgccagttcagcccaggtgctgcaggagctgctgagccggatcgagatgctggagagggaggtgtcggtgctgcgagaccagtgcaacgccaactgctgccaagaaagtgctgccacaggacaactggactatatccctcactgcagtggccacggcaactttagctttgagtcctgtggctgcatctgcaacgaaggctggtttggcaagaattgctcggagccctactgcccgctgggttgctccagccggggggtgtgtgtggatggccagtgcatctgtgacagcgagtacagcggggatgactgttccgaactccggtgcccaacagactgcagctcccgggggctctgcgtggacggggagtgtgtctgtgaagagccctacactggcgaggactgcagggaactgaggtgccctggggactgttcggggaaggggagatgtgccaacggtacctgtttatgcgaggagggctacgttggtgaggactgcggccagcggcagtgtctgaatgcctgcagtgggcgaggacaatgtgaggaggggctctgcgtctgtgaagagggctaccagggccctgactgctcagcagttgcccctccagaggacttgcgagtggctggtatcagcgacaggtccattgagctggaatgggacgggccgatggcagtgacggaatatgtgatctcttaccagccgacggccctggggggcctccagctccagcagcgggtgcctggagattggagtggtgtcaccatcacggagctggagccaggtctcacctacaacatcagcgtctacgctgtcattagcaacatcctcagccttcccatcactgccaaggtggccacccatctctccactcctcaagggctacaatttaagacgatcacagagaccaccgtggaggtgcagtgggagcccttctcattttccttcgatgggtgggaaatcagcttcattccaaagaacaatgaagggggagtgattgctcaggtccccagcgatgttacgtcctttaaccagacaggactaaagcctggggaggaatacattgtcaatgtggtggctctgaaagaacaggcccgcagcccccctacctcggccagcgtctccacagtcattgacggccccacgcagatcctggttcgcgatgtctcggacactgtggcttttgtggagtggattccccctcgagccaaagtcgatttcattcttttgaaatatggcctggtgggcggggaaggtgggaggaccaccttccggctgcagcctcccctgagccaatactcagtgcaggccctgcggcctggctcccgatacgaggtgtcagtcagtgccgtccgagggaccaacgagagcgattctgccaccactcagttcacaacagagatcgatgcccccaagaacttgcgagttggttctcgcacagcaaccagccttgacctcgagtgggataacagtgaagccgaagttcaggagtacaaggttgtgtacagcaccctggcgggtgagcaatatcatgaggtactggtccccaggggcattggtccaaccaccagggccaccctgacagatctggtacctggcactgagtatggagttggaatatctgccgtcatgaactcacagcaaagcgtgccagccaccatgaatgccaggactgaacttgacagtccccgagacctcatggtgacagcctcctcggagacctccatctccctcatctggaccaaggccagtggccccattgaccactaccgaattacctttaccccatcctctgggattgcctcagaagtcaccgtacccaaggacaggacctcatacacactaacagatctagagcctggggcagagtacatcatttccgtcactgctgagaggggtcggcagcagagcttggagtccactgtggatgctttcacaggaattgatcccccaaaagacatcacaattagcaatgtgaccaaggactcagtgatggtctcctggagccctcctgttgcatctttcgattactaccgagtatcatatcgacccacccaagtgggacgactagacagctcagtggtgcccaacactgtgacagaattcaccatcaccagactgaacccagctaccgaatacgaaatcagcctcaacagcgtgcggggcagggaggaaagcgagcgcatctgtactcttgtgcacacagccatggacaaccctgtggatctgattgctaccaatatcactccaacagaagccctgctgcagtggaaggcaccagtgggtgaggtggagaactacgtcattgttcttacacactttgcagtcgctggagagaccatccttgttgacggagtcagtgaggaatttcggcttgttgacctgcttcctagcacccactatactgccaccatgtatgccaccaatggacctctcaccagtggcaccatcagcaccaacttttctactctcctggaccctccggcaaacctgacagccagtgaagtcaccagacaaagtgccctgatctcctggcagcctcccagggcagagattgaaaattatgtcttgacctacaaatccaccgatggaagccgcaaggagctgattgtggatgcagaagacacctggattcgactggagggcctgttggagaacacagactacacggtgctcctgcaggcagcacaggacaccacgtggagcagcatcacctccaccgctttcaccacaggaggccgggtgttccctcatccccaagactgtgcccagcatttgatgaatggagacactttgagtggggtttaccccatcttcctcaatggggagctgagccagaaattacaagtgtactgtgatatgaccaccgacgggggcggctggattgtattccagaggcggcagaatggccaaactgattttttccggaaatgggctgattaccgtgttggcttcgggaacgtggaggatgagttctggctggggctggacaatatacacaggatcacatcccagggccgctatgagctgcgcgtggacatgcgggatggccaagaggccgccttcgcctcctacgacaggttctctgtcgaggacagcagaaacctgtacaaactccgcataggaagctacaacggcactgcgggggactccctcagctatcatcaaggacgccctttctccacagaggatagagacaatgatgttgcagtgactaactgtgccatgtcgtacaagggagcatggtggtataagaactgccaccggaccaacctcaatgggaagtacggggagtccaggcacagtcagggcatcaactggtaccattggaaaggccatgagttctccatcccctttgtggaaatgaagatgcgcccctacaaccaccgtctcatggcagggagaaaacggcagtccttacagttctgagcagtgggcggctgcaagccaaccaatattttctgtcatttgtttgtattttataatatgaaacaaggggggagggtaatagcaatgtgttttgcaacatattaagagtatgtgaaggaagcagggatgtcgcaggaatccgctggctaacatctgctcttggtttctgctgccctggagcctgaccctcagtctccattctccctcctacccaggcctcctcaaccttcacctcctttcccaccaaggaggagaagtaggaagttttcttaaagggccaattcaaagccaagtcgtggggtgcagattgttatggtgacaggcacacacatttttctacccttcttctgagatgtcctctgccttccaggtatttgtgattttgtcacagcctgacatggccaggttctcacactggcccagagaaaagagcctcagcaagagagttttgccaacaattccccttaaaaggaaacagatcaactacaccgcatcccaacaacccaggttcttttccttccttccttccttcctcccttccttctttcctgccttccc

SEQ ID NO: 31272 - DNA, 5344 bp, Homo sapiens
  source 1..5344: mol_type = unassigned DNA
cactagggggctgcttgtagggggatggaaaaaacggaggcttaaaaaaatcatgctgctgaaatttcagcaagaggggaaaagagagagcgcgtgagagagagagagagagagagagagagagagagagagagagagagacagcaaagcagtcccaggcttcctcctctctttcacgtcagaggcaggaaccgactgtgctaaggctgttggctcaacacccagaggagacgggcagacccagggagagtgagagaagggggtcctctctgacccaaggaattaccactagtggagtgaagccacctgactttttgatcttattttggttgcctcctcattctccttccacccgtagccctgacagcttgggtttcatttctttcgtggagccttgtctcttcctcccagaataggaggaagggaagagaagggaaagaggagggctctctaggtgagcgcatcagctggctccagcctgagcaagcaagaattttcttcccaggaagctcctctcgctccccggccgcccacccccagcctgggtggctgtatcgttttaactgcatagagggcaggtctcttttggaattaggattaaagaaagtgcagtaaagagaaagcatcgaagacaccatcacaaaagattcccacaactccatgctgtgtgctgcaggctggtcctgaacccagatctctggctgagaggatgggggcagatggggaaacagtggttctgaagaacatgctcattggcatcaacctgatccttctgggctccatgatcaagccttcagagtgtcagctggaggtcaccacagaaagggtccagagacagtcagtggaggaggagggaggcattgccaactacaacacatccagcaaagagcagcctgtggtcttcaaccacgtgtacaacattaacgtgcccttggacaacctctgctcctcagggctagaggcctctgctgagcaggaggtgagtgcagaagacgagactctggcagagtacatgggccagacctcagaccacgagagccaggtcacctttacacacaggatcaacttccccaaaaaggcctgtccatgtgccagttcagcccaggtgctgcaggagctgctgagccggatcgagatgctggagagggaggtgtcggtgctgcgagaccagtgcaacgccaactgctgccaagaaagtgctgccacaggacaactggactatatccctcactgcagtggccacggcaactttagctttgagtcctgtggctgcatctgcaacgaaggctggtttggcaagaattgctcggagccctactgcccgctgggttgctccagccggggggtgtgtgtggatggccagtgcatctgtgacagcgagtacagcggggatgactgttccgaactccggtgcccaacagactgcagctcccgggggctctgcgtggacggggagtgtgtctgtgaagagccctacactggcgaggactgcagggaactgaggtgccctggggactgttcggggaaggggagatgtgccaacggtacctgtttatgcgaggagggctacgttggtgaggactgcggccagcggcagtgtctgaatgcctgcagtgggcgaggacaatgtgaggaggggctctgcgtctgtgaagagggctaccagggccctgactgctcagcagttgcccctccagaggacttgcgagtggctggtatcagcgacaggtccattgagctggaatgggacgggccgatggcagtgacggaatatgtgatctcttaccagccgacggccctggggggcctccagctccagcagcgggtgcctggagattggagtggtgtcaccatcacggagctggagccaggtctcacctacaacatcagcgtctacgctgtcattagcaacatcctcagccttcccatcactgccaaggtggccacccatctctccactcctcaagggctacaatttaagacgatcacagagaccaccgtggaggtgcagtgggagcccttctcattttccttcgatgggtgggaaatcagcttcattccaaagaacaatgaagggggagtgattgctcaggtccccagcgatgttacgtcctttaaccagacaggactaaagcctggggaggaatacattgtcaatgtggtggctctgaaagaacaggcccgcagcccccctacctcggccagcgtctccacagtcattgacggccccacgcagatcctggttcgcgatgtctcggacactgtggcttttgtggagtggattccccctcgagccaaagtcgatttcattcttttgaaatatggcctggtgggcggggaaggtgggaggaccaccttccggctgcagcctcccctgagccaatactcagtgcaggccctgcggcctggctcccgatacgaggtgtcagtcagtgccgtccgagggaccaacgagagcgattctgccaccactcagttcacaacagagatcgatgcccccaagaacttgcgagttggttctcgcacagcaaccagccttgacctcgagtgggataacagtgaagccgaagttcaggagtacaaggttgtgtacagcaccctggcgggtgagcaatatcatgaggtactggtccccaggggcattggtccaaccaccagggccaccctgacagatctggtacctggcactgagtatggagttggaatatctgccgtcatgaactcacagcaaagcgtgccagccaccatgaatgccaggactgaacttgacagtccccgagacctcatggtgacagcctcctcggagacctccatctccctcatctggaccaaggccagtggccccattgaccactaccgaattacctttaccccatcctctgggattgcctcagaagtcaccgtacccaaggacaggacctcatacacactaacagatctagagcctggggcagagtacatcatttccgtcactgctgagaggggtcggcagcagagcttggagtccactgtggatgctttcacaggcttccgtcccatctctcatctgcacttttctcatgtgacctcctccagtgtgaacatcacttggagtgatccatctcccccagcagacagactcattcttaactacagccccagggatgaggaggaagagatgatggaggtctccctggatgccaccaagaggcatgctgtcctgatgggcctgcaaccagccacagagtatattgtgaaccttgtggctgtccatggcacagtgacctctgagcccattgtgggctccatcaccacaggaattgatcccccaaaagacatcacaattagcaatgtgaccaaggactcagtgatggtctcctggagccctcctgttgcatctttcgattactaccgagtatcatatcgacccacccaagtgggacgactagacagctcagtggtgcccaacactgtgacagaattcaccatcaccagactgaacccagctaccgaatacgaaatcagcctcaacagcgtgcggggcagggaggaaagcgagcgcatctgtactcttgtgcacacagccatggacaaccctgtggatctgattgctaccaatatcactccaacagaagccctgctgcagtggaaggcaccagtgggtgaggtggagaactacgtcattgttcttacacactttgcagtcgctggagagaccatccttgttgacggagtcagtgaggaatttcggcttgttgacctgcttcctagcacccactatactgccaccatgtatgccaccaatggacctctcaccagtggcaccatcagcaccaacttttctactctcctggaccctccggcaaacctgacagccagtgaagtcaccagacaaagtgccctgatctcctggcagcctcccagggcagagattgaaaattatgtcttgacctacaaatccaccgatggaagccgcaaggagctgattgtggatgcagaagacacctggattcgactggagggcctgttggagaacacagactacacggtgctcctgcaggcagcacaggacaccacgtggagcagcatcacctccaccgctttcaccacaggaggccgggtgttccctcatccccaagactgtgcccagcatttgatgaatggagacactttgagtggggtttaccccatcttcctcaatggggagctgagccagaaattacaagtgtactgtgatatgaccaccgacgggggcggctggattgtattccagaggcggcagaatggccaaactgattttttccggaaatgggctgattaccgtgttggcttcgggaacgtggaggatgagttctggctggggctggacaatatacacaggatcacatcccagggccgctatgagctgcgcgtggacatgcgggatggccaagaggccgccttcgcctcctacgacaggttctctgtcgaggacagcagaaacctgtacaaactccgcataggaagctacaacggcactgcgggggactccctcagctatcatcaaggacgccctttctccacagaggatagagacaatgatgttgcagtgactaactgtgccatgtcgtacaagggagcatggtggtataagaactgccaccggaccaacctcaatgggaagtacggggagtccaggcacagtcagggcatcaactggtaccattggaaaggccatgagttctccatcccctttgtggaaatgaagatgcgcccctacaaccaccgtctcatggcagggagaaaacggcagtccttacagttctgagcagtgggcggctgcaagccaaccaatattttctgtcatttgtttgtattttataatatgaaacaaggggggagggtaatagcaatgtgttttgcaacatattaagagtatgtgaaggaagcagggatgtcgcaggaatccgctggctaacatctgctcttggtttctgctgccctggagcctgaccctcagtctccattctccctcctacccaggcctcctcaaccttcacctcctttcccaccaaggaggagaagtaggaagttttcttaaagggccaattcaaagccaagtcgtggggtgcagattgttatggtgacaggcacacacatttttctacccttcttctgagatgtcctctgccttccaggtatttgtgattttgtcacagcctgacatggccaggttctcacactggcccagagaaaagagcctcagcaagagagttttgccaacaattccccttaaaaggaaacagatcaactacaccgcatcccaacaacccaggttcttttccttccttccttccttcctcccttccttctttcctgccttccc

SEQ ID NO: 31273 - DNA, 529 bp, Homo sapiens
  source 1..529: mol_type = unassigned DNA
gatcaacttccccaaaaaggcctgtccatgtgccagttcagcccaggtgctgcaggagctgctgagccggatcgagatgctggagagggaggtgtcggtgctgcgagaccagtgcaacgccaactgctgccaagaaagtgctgccacagttgcccctccagaggacttgcgagtggctggtatcagcgacaggtccattgagctggaatgggacgggccgatggcagtgacggaatatgtgatctcttaccagccgacggccctggggggcctccagctccagcagcgggtgcctggagattggagtggtgtcaccatcacggagctggagccaggtctcacctacaacatcagcgtctacgctgtcattagcaacatcctcagccttcccatcactgccaaggtggccacccatctctccactcctcaagggctacaatttaagacgatcacagagaccaccgtggaggtgcagtgggagcccttctcattttccttcgatgggtgggaaatcagcttcattccaaag

SEQ ID NO: 31274 - DNA, 13065 bp, Homo sapiens
  source 1..13065: mol_type = unassigned DNA
tcctccccttctcctcccctgctcgctgcagactccctcctcactgtcgctgccgagatccacagtcggttgtggctcagcccctgttgcaggggacaagtgagggagacttccctgtcctgccctgagacgccgccctcccggggttggggacagagcaggtgcagaggcactgcagctgctcggttgcccagcctcctgaatgatgccagcccagtatgctctaacctccagcctggttctcctggtgctgctgagcacagccagagcaggccccttctcttcacggtccaatgtgacactgccagccccccggccccctccccagccagggggccacacagtgggggctggagtgggaagcccctcttctcagctttacgagcacacagtggaaggaggggagaagcaggtggtattcacccaccgcattaacctgcccccttccactggctgtggctgtcccccaggcaccgagcccccagtccttgcttcagaggtacaggccctgagggtccgtctagagatcctggaggagttggtgaaggggctcaaggaacagtgcactgggggatgttgtcctgcctctgcccaagctggcacaggtcagacagatgtgcggaccctctgcagtctccatggtgtgtttgatctgagccgctgcacctgttcctgtgagccaggctggggtgggcccacctgctcagaccccacagatgctgagatccctccctcttccccaccctcagcctcggggtcctgcccagatgactgcaatgatcagggtcgctgtgtccgtggtcgttgcgtgtgctttcccggctacactggccccagctgtggctggccatcctgtcccggggactgccaaggccgtgggcgctgcgtgcagggcgtgtgtgtgtgccgggcaggcttctcaggccccgactgcagccagcgctcctgccctcgaggttgcagccagaggggacgctgtgagggtgggcgctgcgtgtgtgacccaggctacactggtgacgactgtggcatgaggagctgccctcgcggttgcagtcagagggggcgctgtgagaatgggcgctgcgtgtgtaaccccggctacgctggcgaggactgtggggtgaggagctgccctcggggctgcagccagcggggacgctgcaaggacgggcgctgcgtgtgtgaccccggctacactggcgaggactgtggtacgcggagctgcccctgggactgtggcgagggcgggcgctgcgtggacggccgctgcgtgtgctggcccgggtacacaggcgaggactgcagcacgcggacatgtccgagggactgccggggccgcgggcgctgcgaggacggcgaatgcatttgcgacacgggctacagcggggacgactgcggcgtgcgcagctgccctggcgactgcaaccaaaggggccgctgcgaggacggccgctgcgtgtgctggccggggtacactggaaccgattgcggctcgcgcgcctgcccacgcgactgtagaggtcgcgggcgctgcgagaacggcgtgtgtgtttgcaatgcgggctacagcggcgaggactgcggtgtgcgcagctgtcctggggactgtcgtggccggggccgctgtgagagtggccgctgcatgtgttggccggggtacacaggccgggactgcggcacgcgcgcctgtcctggcgactgtcgcgggcgcgggcgctgcgtggatggccgctgcgtgtgcaacccgggcttcaccggtgaggactgtgggagccgtcgctgtcccggggactgccgtgggcacggcctttgcgaggatggcgtgtgcgtgtgtgacgcaggctactcaggggaagactgcagcacgcgcagctgccccgggggctgccgaggccgcggccagtgcctagatgggcggtgtgtgtgcgaggacggctactctggcgaggattgcggtgtgaggcagtgcccgaatgactgcagccagcacggcgtgtgccaggacggtgtgtgcatctgttgggaaggctacgtgagtgaggactgcagcatccgcacctgcccctccaactgccacgggaggggccgctgtgaggaagggcgctgcctgtgcgacccaggctacaccggccctacctgtgccacccgcatgtgcccggctgactgccggggacgtgggcggtgtgtgcaaggagtgtgcctgtgccacgtgggctatggcggtgaggactgcgggcaggaagagcctccagccagcgcctgccctggaggctgcgggccccgggaactgtgccgggcaggccagtgtgtgtgtgtagagggcttccgaggccctgactgtgccatccagacatgcccaggggactgccgtggccgaggagagtgtcacgatggcagctgtgtctgcaaagatgggtatgctggcgaagactgcggagaagaggtgccaaccattgagggcatgaggatgcatctcttggaggagacaacagttcggacagagtggaccccggctcctggccccgtggatgcctatgaaattcagttcatccccacgacagagggggcgagccccccattcacagcacgggttccaagctctgcctcagcctatgaccagagaggactggcccctggacaggagtaccaggtcactgtccgagcccttcgagggaccagctggggccttcctgcctccaagaccatcaccaccatgatcgatgggccccaggacctccgagtggtggctgtgacaccgacaacactggagcttggctggctgcgtccccaggctgaggtggaccgatttgtggtgtcctacgtcagtgccggcaaccagagggtgaggctggaagtgccccctgaagcagacgggacgctgctgactgacctgatgccaggcgtagaatatgtggtgactgtcacagcggagcggggccgggcagtcagctacccagcttctgtcagggccaacacagggtcctcacccttgggcctcttggggactaccgatgagcctcctccctcaggcccctcgacgacgcaaggggcccaggctcctctcctgcagcagcgcccccaggagctgggagagttgagggtgctgggcagagatgagacagggcgcctccgtgtggtctggaccgcccagcctgacacctttgcctacttccaactgcgcatgcgggtgcccgaggggccgggggcacatgaggaagtgctgccaggggacgtccgccaggctctggtgcctccaccccctcctggaaccccgtatgagctgtcacttcatggggtccctcctgggggcaagccctctgaccccatcatctaccaaggcattatggacaaggatgaggagaagcctgggaagtcctcaggcccaccacgcctgggtgagctgacggtgacagacaggacctccgactccttgctcctgcgctggacggtccccgagggcgagtttgactccttcgtgatccagtacaaagacagggacgggcagccccaggtggtgcccgtggaaggaccccagcgctcggccgtcatcacctccctggatcctggccgcaagtacaaatttgtcctgtatgggtttgttggcaagaagaggcatggtccgctggtggctgaagccaagatcttgcctcagagtgacccaagtccagggactccaccccacctgggaaacctgtgggtgacagaccctaccccagattcactgcacctctcctggactgtccctgagggccagtttgacaccttcatggtccagtacagggacagggatggacggccccaggtggtacctgtggaagggcccgagcgttcatttgttgtctcctcactggaccctgaccacaagtacagattcactctgtttggaattgcgaacaagaagcggtatggccccctcacggccgatggcaccactgctccagagaggaaagaggagcccccccgccctgagttcctggagcagcccctcctgggggaactgacagtgaccggcgtgaccccagactccttgcgtctctcatggacagtggcccagggccccttcgactcattcatggtccagtacaaggatgcacaggggcagccccaggcagtgcctgttgcgggggatgagaatgaggttactgtccccggcctggatcccgaccggaagtataagatgaacctctacgggcttcgtggcaggcagcgtgtggggcccgagtctgtggtggccaagactgctcctcaggaggatgtggacgagacccccagccccacagaactgggcacggaggccccggagtcccccgaggagccgctcctgggggagctgacagtgacaggatcctcccctgattcgctgagcctcttctggaccgtcccccagggcagcttcgactctttcaccgtgcagtacaaggacagggatgggcggccccgggcggtgcgtgttgggggcaaggagagtgaggtcaccgtgggaggcctagagcccgggcacaagtacaagatgcacctgtacggcctccacgaggggcagcgcgtgggcccggtgtccgccgtgggcgtgacagccccacaacaagaagagacccctccagccactgagtccccgctggagccacgcctaggagagctgacagtgacagatgtgacccccaactctgtgggcctctcctggacagtccccgagggccagtttgactccttcatagtccagtacaaggacaaggacgggcagccccaggtggtgccggtggcggcagaccagcgagaggtcacagtctacaacctggagcctgagagaaaatataagatgaacatgtatggactacatgatgggcaacgcatgggccccctgtctgtggtcatcgtgacggctcccctcccaccagccccagccacagaggcctccaagcctcccctggagccacgcctaggggagctgacagtgacggatataacccctgactctgtgggcctctcatggacagtccctgagggtgaattcgactcctttgtggttcagtacaaggacagggacgggcagccccaggtggtgcccgtggctgcagatcagcgggaggtcactatccctgacctggaaccctcccgcaagtacaagttcctgctctttgggatccaggatgggaaacgacgcagcccagtctctgtggaggcaaagacggttgcccgaggtgacgccagcccaggggccccaccccgccttggggagctgtgggtgacagaccccaccccagactcactgcgcctctcctggacggttcctgagggccagttcgactcttttgtggtccagttcaaggacaaagacgggccccaggtggtgcccgtggagggccatgagcgctctgtcactgtcacccctctggatgccggccgcaagtacagattcctcctctatggcctcctgggcaagaagcgccatggccctctcactgccgacggcaccacggaagcccggagtgctatggatgatactggaacaaagcgtcccccaaaaccccgtctgggggaggagctgcaggtgaccaccgtgacccagaactccgtgggcctctcctggacagtccctgagggccagtttgactcctttgtggtccagtacaaagacagggacgggcagccccaggtggtgcccgtggagggcagcctcagggaggtcagcgtgccgggcctggaccctgcccacaggtacaagctgctgctctacgggctgcaccacggcaagcgtgtgggccccatctcggccgtcgccattactgccggcagggaagaaacggaaactgagaccacggccccgacccctccagcgcctgagccccacctcggggagttgacagtggaggaggccacgtcacacaccctgcatctctcctggatggtgactgagggagaatttgactccttcgaaatccagtacacagatagagacgggcaactccaaatggtccgcataggaggtgaccggaatgacatcaccctctctggcctggaatccgaccacagatacctggtgaccctgtatggtttcagtgatgggaagcatgtaggtcctgtccatgtcgaggccctgacagtcccggaggaggagaagccttcagaacctcccaccgcaacccccgagccccccatcaagcctcgcctgggggagctgaccgtgacagatgccacccctgactccctcagcctgtcctggacagttcccgagggacagtttgaccacttcctggtccagtacaggaatggagatgggcagcccaaggcagtgagggtgccagggcacgaggaaggggtcaccatctcgggcctggagccagaccataaatacaagatgaacctgtacggcttccacggtggccagcgcatgggccctgtgtctgtcgtcggggtgacagctgcagaggaagagacccccagccccacagaacccagcatggaggccccggagcccgctgaggagccactcctgggggagctaacagtgacaggatcctcccctgactcgctgagcctctcctggaccgtcccccagggccgcttcgactccttcaccgtgcagtacaaggacagggacgggcggccccaggtggtgcgtgttgggggcgaggagagtgaagtcaccgtggggggcctggagcctgggcgcaagtacaagatgcacctgtacggcctccacgaggggcggcgcgtgggcccagtgtctgctgtgggcgtcacggcccccgaagaggagtcccctgatgctcctcttgcaaagctgcgcctagggcagatgacagtgagagacatcacctccgactccctcagcctctcctggacagtccccgagggccagtttgaccatttcttggtccagtttaagaatggggacgggcagcccaaggcggtgcgggtgccgggacacgaggatggggtcaccatctcgggcctggagccagaccacaagtacaagatgaacctgtacggcttccacggtggccagcgcgtgggccccgtgtctgctgttggtttaactgccccaggaaaggatgaagaaatggccccagcctcgacagaacctcccacccctgaaccccccatcaagcctcgcctggaggagctgaccgtgacagatgcgacccctgactccctcagcctgtcctggacggttcccgagggacagtttgaccacttcctggtccagtacaagaatggggatgggcagcccaaggcaacacgggtgccaggacatgaggacagggtcaccatctccggcctggagccagacaacaagtacaagatgaacctgtacggcttccacggtggccagcgtgtgggccccgtgtctgccatcggggtgacagctgcagaggaagagacccccagccccacagaacccagcatggaggccccggagccccctgaggagccgctcctgggggagctaacagtgacaggatcctcccctgactcgctgagcctctcctggaccgtcccccagggccgcttcgactccttcaccgtgcagtacaaggacagggacgggcggccccaggtggtgcgtgttgggggcgaggagagcgaggtcaccgtggggggcctggagcctgggcgcaaatacaagatgcacctgtacggcctccacgaggggcggcgtgtgggcccggtgtccaccgtgggcgtgactgccccacaagaggatgtggacgagacccccagccctacagaaccaggcacagaggccccagagccccccgaggagcctctcctgggggagctgacagtgacaggatcctcccctgactcgctgagcctttcctggaccgtcccccagggccgctttgactccttcaccgtgcagtacaaggacagggacgggcggccccaggcggtgcgtgttgggggccaggagagcaaggtcactgtgaggggcctggagcctgggcgcaagtacaagatgcacctgtacggcctccacgaggggcggcgcctaggcccggtgtctgccgtgggcgtcacagaggatgaagccgagaccacccaagcagtgcctaccatgacccctgagccccccatcaagcctcgcctgggggagctgaccatgacagatgccacccctgactccctcagcctgtcctggacggttcccgagggccagtttgaccacttcctggtccagtacaggaatggggatgggcagcccaaggcggtgcgggtgccggggcacgaggacggggtcaccatctcaggcctggagccagaccataaatacaagatgaacctgtacggcttccacggtggccagcgcgtgggccccatctctgtcattggggtgacggctgcagaggaagagacccccagccccacggaactcagcactgaggccccggagccccctgaggagccgctcctgggggagctgacagtgacaggatcctcccctgactcgctgagcctctcctggaccatcccccagggccacttcgactccttcaccgtgcagtacaaggacagggacgggcggccccaggtgatgcgtgtcaggggcgaggagagcgaggtcaccgtggggggcctggagcccgggcgcaaatacaagatgcacctgtacggcctccacgaggggcggcgtgtgggcccggtgtccaccgtgggtgtgacagtgcccaccacaacccctgagccccccaacaagcctcgcctcggggagctgaccgtgacagatgccacccctgactccctcagcctgtcctggatggtccccgagggccagtttgaccacttcctggtccagtacaggaatggggatgggcagcccaaggtggtgcgggtgccggggcacgaggacggggtcaccatctcaggcctggagccagaccacaagtacaagatgaacctgtacggcttccacggtggccagcgcgtgggccccatctctgtcattggggtgacagctgcagaggaagaaactcccgcccccacagaacccagcacggaggccccggagccccctgaggagccgctcctgggggagctgacagtgacaggatcctcccctgactcgctgagcctctcctggaccatcccccagggccgcttcgactccttcactgtgcagtacaaggacagggacgggcggccccaggtggtgcgtgtcaggggcgaggagagcgaggtcaccgtggggggcctggagcccgggtgcaaatacaagatgcacctgtacggcctccacgaggggcagcgcgtgggcccagtgtccgctgtgggtgtgacagtgcctaccatgacccctgagccccccatcaagcctcgcctgggggagctgaccgtgacagatgccacccccgactccctcagcctgtcctggatggttcccgagggccagtttgaccacttcctggtccagtacaggaatggggatgggcagcccaaggcggtgcgggtgccggggcacgaggacggggtcaccatctcaggcctggagccagaccataaatacaagatgaacctgtacggcttccacggtggccagcgcgtaggccctgtgtctgccattggggtgacggaggaagagacccccagccccacagaacccagcactgaggccccggaggcccctgaggagccgctcctgggggagttgacagtgacaggatcctcccctgactcgctgagcctctcctggaccgtcccccagggccgcttcgactccttcaccgtgcagtacaaggacagggacgggcagccccaggtggtgcgtgtcaggggcgaggagagcgaggtcaccgtggggggcctggagcccgggcgcaaatacaagatgcatctgtacggcctccacgaggggcagcgcgtgggcccagtgtccaccgtgggcatcacggcgcccctgcccacaccactgccggtggagccccgcctgggggagctggcggtggcggccgtgacctcggactcagtgggcctctcatggacggtggcccagggcccctttgactccttcctggtacagtacagggacgcgcaggggcagccccaggcagtgcctgtgagcggagacctccgagcggtcgccgtctcggggctggacccggcccgcaagtacaagttcctgctctttggactccagaatgggaaacgccacggcccagtccctgtggaggccaggaccgccccagacaccaaaccgtctccccgcctgggggagctgactgtgacagatgcgacccctgactccgtgggcctctcgtggacggtccctgagggcgaattcgactccttcgtggtccagtacaaggataaggatggtcggctccaggtggtgccggtggcagccaaccagcgggaggtcacagtccagggcctggagcccagtaggaaatacaggttcctgctctatggtctgtcaggcaggaaacgactgggccccatctctgctgacagcaccacagctcccctggagaaggagctacctccccacctgggggaactgaccgtggctgaggagacctccagctctctgcgcctgtcctggacggtagcccagggcccctttgactccttcgtggtccagtacagggacacggacgggcagcccagggcagtgcctgtggccgcagaccagcgcacagtcaccgtagaggacctggagcctggcaagaaatacaagtttctgctctacgggctccttgggggaaagcgcctgggcccggtctctgccctgggaatgacagccccagaagaggacacaccagccccagagttagccccagaggcccctgagcctcctgaagagccccgcctaggagtgctgaccgtgaccgacacaaccccagactccatgcgcctctcgtggagcgtggcccagggcccctttgattccttcgtggtccagtatgaggacacgaacgggcagccccaggccttgctcgtggacggcgaccagagcaagatcctcatctcaggcctggagcccagcaccccctacaggttcctcctctatggcctccatgaagggaagcgcctggggcccctctcagctgagggcaccacagggctggctcctgctggtcagacctcagaggagtcaaggccccgcctgtcccagctgtctgtgactgacgtgaccaccagttcactgaggctcaactgggaggccccaccgggggccttcgactccttcctgctccgctttggggttccatcaccaagcactctggagccgcatccgcgtccactgctgcagcgcgagctgatggtgccggggacgcggcactcggccgtgctccgggacctgcgttccgggactctgtacagcctgacactgtatgggctgcgaggaccccacaaggccgacagcatccagggaaccgcccgcaccctcagcccagttctggagagcccccgtgacctccaattcagtgaaatcagggagacctcagccaaggtcaactggatgcccccaccatcccgggcggacagcttcaaagtctcctaccagctggcggacggaggggagcctcagagtgtgcaggtggatggccaggcccggacccagaaactccaggggctgatcccaggcgctcgctatgaggtgaccgtggtctcggtccgaggctttgaggagagtgagcctctcacaggcttcctcaccacggttcctgacggtcccacacagttgcgtgcactgaacttgaccgagggattcgccgtgctgcactggaagcccccccagaatcctgtggacacctatgacgtccaggtcacagcccctggggccccgcctctgcaggcggagaccccaggcagcgcggtggactaccccctgcatgaccttgtcctccacaccaactacaccgccacagtgcgtggcctgcggggccccaacctcacttccccagccagcatcaccttcaccacagggctagaggcccctcgggacttggaggccaaggaagtgaccccccgcaccgccctgctcacttggactgagcccccagtccggcccgcaggctacctgctcagcttccacacccctggtggacagaaccaggagatcctgctcccaggagggatcacatctcaccagctccttggcctctttccctccacctcctacaatgcacggctccaggccatgtggggccagagcctcctgccgcccgtgtccacctctttcaccacgggtgggctgcggatccccttccccagggactgcggggaggagatgcagaacggagccggtgcctccaggaccagcaccatcttcctcaacggcaaccgcgagcggcccctgaacgtgttttgcgacatggagactgatgggggcggctggctggtgttccagcgccgcatggatggacagacagacttctggagggactgggaggactatgcccatggttttgggaacatctctggagagttctggctgggcaatgaggccctgcacagcctgacacaggcaggtgactactccatgcgcgtggacctgcgggctggggacgaggctgtgttcgcccagtacgactccttccacgtagactcggctgcggagtactaccgcctccacttggagggctaccacggcaccgcaggggactccatgagctaccacagcggcagtgtcttctctgcccgtgatcgggaccccaacagcttgctcatctcctgcgctgtctcctaccgaggggcctggtggtacaggaactgccactacgccaacctcaacgggctctacgggagcacagtggaccatcagggagtgagctggtaccactggaagggcttcgagttctcggtgcccttcacggaaatgaagctgagaccaagaaactttcgctccccagcggggggaggctgagctgctgcccacctctctcgcaccccagtatgactgccgagcactgaggggtcgccccgagagaagagccagggtccttcaccacccagccgctggaggaagccttctctgccagcgatctcgcagcactgtgtttacaggggggaggggaggggttcgtacaggagcaataaaggagaaactgaggtacccgg

SEQ ID NO: 31275 - DNA, 6643 bp, Homo sapiens
  source 1..6643: mol_type = unassigned DNA
ctgcagaggaagagacccccagccccacagaacccagcatggaggccccggagcccgctgaggagccgctcctgggggagctaacagtgacaggatcctcccctgactcgctgagcctctcctggaccgtcccccagggccgcttcgactccttcaccgtgcagtacaaggacagggacgggcggccccaggtggtgcgtgttgggggcgaggagagtgaagtcaccgtggggggcctggagcctgggcgcaagtacaagatgcacctgtacggcctccacgaggggcggcgcgtgggcccagtgtctgctgtgggcgtcacggcccccgaagaggagtcccctgatgctcctcttgcaaagctgcgcctagggcagatgacagtgagagacatcacctccgactccctcagcctctcctggacagtccccgagggccagtttgaccatttcttggtccagtttaagaatggggatgggcagcccaaggcggtgcgggtgccgggacacgaggatggggtcaccatctcgggcctggagccagaccacaagtacaagatgaacctgtacggcttccacggtggccagcgcgtgggccccgtgtctgctgttggtttaactgccccaggaaaggatgaagaaatggccccagcctcgacagaacctcccacccctgaaccccccatcaagcctcgcctggaggagctgaccgtgacagatgcgacccctgactccctcagcctgtcctggacggttcccgagggacagtttgaccacttcctggtccagtacaagaatggggatgggcagcccaaggcaacacgggtgccaggacatgaggacagggtcaccatctccggcctggagccagacaacaagtacaagatgaacctgtacggcttccacggtggccagcgtgtgggccccgtgtctgccatcggggtgacagctgcagaggaagagacccccagccccacagaacccagcatggaggccccggagccccctgaggagccgctcctgggggagctgacagtgacaggatcctcccctgactcgctgagcctctcctggaccgtcccccagggccgcttcgactccttcaccgtgcagtacaaggacagggacgggcggccccaggtggtgcgtgttgggggcgaggagagcgaggtcaccgtggggggcctggagcctgggcgcaaatacaagatgcacctgtacggcctccacgaggggcggcgcgtgggcccggtgtccaccgtgggcgtgactgccccacaagaggatgtggacgagacccccagccctacagaaccaggcacagaggccccagagccccccgaggagcctctcctgggggagctgacagtgacaggatcctcccctgactcgctgagcctttcctggaccgtcccccagggccgctttgactccttcaccgtgcagtacaaggacagggacgggcggccccaggcggtgcgtgttgggggccaggagagcaaggtcactgtgaggggcctggagcctgggcgcaagtacaagatgcacctgtacggcctccacgaggggcggcgcctgggcccggtgtctgccgtgggcgtcacagaggatgaagccgagaccacccaagcagtgcctaccatgacccctgagccccccatcaagcctcgcctgggggagctgaccatgacagatgccacccctgactccctcagcctgtcctggacggttcccgagggccagtttgaccacttcctggtccagtacaggaatggggatgggcagcccaaggcggtgcgggtgccggggcacgaggacggggtcaccatctcaggcctggagccagaccataaatacaagatgaacctgtacggcttccacggtggccagcgcgtgggccccatctctgtcactggggtgacggctgcagaggaagagacccccagccccacggaactcagcactgaggccccggagccccctgaggagccgctcctgggggagctgacagtgacaggatcctcccctgactcgctgagcctctcctggaccatcccccagggccacttcgactccttcaccgtgcagtacaaggacagggacgggcggccccaggtgatgcgtgtcaggggcgaggagagcgaggtcaccgtggggggcctggagcccgggcgcaaatacaagatgcacctgtacggcctccacgaggggcggcgtgtgggcccggtgtccaccgtgggtgtgacagtgcccaccacaacccctgagccccccaacaagcctcgcctcggggagctgaccgtgacagatgccacccctgactccctcagcctgtcctggatggtccccgagggccagtttgaccacttcctggtccagtacaggaatggggatgggcagcccaaggtggtgcgggtgccggggcacgaggacggggtcaccatctcaggcctggagccagaccacaagtacaagatgaacctgtacggcttccacggtggccagcgcgtgggccccatctctgtcattggggtgacagctgcagaggaagaaactcccgcccccacagaacccagcacggaggccccggagccccctgaggagccgctcctgggggagctgacagtgacaggatcctcccctgactcgctgagcctctcctggaccatcccccagggccgcttcgactccttcactgtgcagtacaaggacagggacgggcggccccaggtggtgcgtgtcaggggcgaggagagcgaggtcaccgtggggggcctggagcccgggtgcaaatacaagatgcacctgtacggcctccacgaggggcagcgcgtgggcccagtgtccgctgtgggtgtgacagtgcctaccatgacccctgagccccccatcaagcctcgcctgggggagctgaccgtgacagatgccacccccgactccctcagcctgtcctggatggttcccgagggccagtttgaccacttcctggtccagtacaggaatggggatgggcagcccaaggcggtgcgggtgccggggcacgaggacggggtcaccatctcaggcctggagccagaccataaatacaagatgaacctgtacggcttccacggtggccagcgcgtaggccctgtgtctgccattggggtgacggaggaagagacccccagccccacagaacccagcactgaggccccggaggcccctgaggagccgctcctgggggagttgacagtgacaggatcctcccctgactcgctgagcctctcctggaccgtcccccagggccgcttcgactccttcaccgtgcagtacaaggacagggacgggcagccccaggtggtgcgtgtcaggggcgaggagagcgaggtcaccgtggggggcctggagcccgggcgcaaatacaagatgcatctgtacggcctccacgaggggcagcgcgtgggcccagtgtccaccgtgggcatcacggcgcccctgcccacaccactgccggtggagccccgcctgggggagctggcggtggcggccgtgacctcggactcagtgggcctctcatggacggtggcccagggcccctttgactccttcctggtacagtacagggacgcgcaggggcagccccaggcagtgcctgtgagcggagacctccgagcggtcgccgtctcggggctggacccggcccgcaagtacaagttcctgctctttggactccagaatgggaaacgccacggcccagtccctgtggaggccaggaccgccccagacaccaaaccgtctccccgcctgggggagctgactgtgacagatgcgacccctgactccgtgggcctctcgtggacggtccctgagggcgaattcgactccttcgtggtccagtacaaggataaggatggtcggctccaggtggtgccggtggcagccaaccagcgggaggtcacagtccagggcctggagcccagtaggaaatacaggttcctgctctatggtctgtcaggcaggaaacgactgggccccatctctgctgacagcaccacagctcccctggagaaggagctacctccccacctgggggaactgaccgtggctgaggagacctccagctctctgcgcctgtcctggacggtagcccagggcccctttgactccttcgtggtccagtacagggacacggacgggcagcccagggcagtgcctgtggccgcagaccagcgcacagtcaccgtagaggacctggagcctggcaagaaatacaagtttctgctctacgggctccttgggggaaagcgcctgggcccggtctctgccctgggaatgacagccccagaagaggacacaccagccccagagttagccccagaggcccctgagcctcctgaagagccccgcctaggagtgctgaccgtgaccgacacaaccccagactccatgcgcctctcgtggagcgtggcccagggcccctttgattccttcgtggtccagtatgaggacacgaacgggcagccccaggccttgctcgtggacggcgaccagagcaagatcctcatctcaggcctggagcccagcaccccctacaggttcctcctctatggcctccatgaagggaagcgcctggggcccctctcagctgagggcaccacagggctggctcctgctggtcagacctcagaggagtcaaggccccgcctgtcccagctgtctgtgactgacgtgaccaccagttcactgaggctcaactgggaggccccaccgggggccttcgactccttcctgctccgctttggggttccatcaccaagcacactggagccgcatccgcgtccactgctgcagcgcgagctgatggtgccggggacgcggcactcggccgtgctccgggacctgcgttccgggactctgtacagcctgacactgtatgggctgcgaggaccccacaaggccgacagcatccagggaaccgcccgcaccctcagcccagttctggagagcccccgtgacctccaattcagtgaaatcagggagacctcagccaaggtcaactggatgcccccaccatcccgggcggacagcttcaaagtctcctaccagctggcggacggaggggagcctcagagtgtgcaggtggatggccaggcccggacccagaaactccaggggctgatcccaggcgctcgctatgaggtgaccgtggtctcggtccgaggctttgaggagagtgagcctctcacaggcttcctcaccacggttcctgacggtcccacacagttgcgtgcactgaacttgaccgagggattcgccgtgctgcactggaagcccccccagaatcctgtagacacctatgacatccaggtcacagcccctggggccccgcctctgcaggcggagaccccaggcagcgcggtggactaccccctgcatgaccttgtcctccacaccaactacaccgccacagtgcgtggcctgcggggccccaacctcacttccccagccagcatcaccttcaccacagggctagaggcccctcgggacttggaggccaaggaagtgaccccccgcaccgccctgctcacttggactgagcccccagtccggcccgcaggctacctgctcagcttccacacccctggtggacagacccaggagatcctgctcccaggagggatcacatctcaccagctccttggcctctttccctccacctcctacaatgcacggctccaggccatgtggggccagagcctcctgccgcccgtgtccacctctttcaccacgggtgggctgcggatccccttccccagggactgcggggaggagatgcagaacggagccggtgcctccaggaccagcaccatcttcctcaacggcaaccgcgagcggcccctgatcgtgttttgcgacatggagactgatgggggcggctggctggtgttccagcgccgcatggatggacagacagacttctggagggactgggaggactatgcccatggttttgggaacatctctggagagttctggctgggcaatgaggccctgcacagcctgacacaggcaggtgactactccatgcgcgtggacctgcgggctggggacgaggctgtgttcgcccagtacgactccttccacgtagactcggctgcggagtactaccgcctccacttggagggctaccacggcaccgcaggggactccatgagctaccacagcggcagtgtcttctctgcccgtgatcgggaccccaacagcttgctcatctcctgcgctgtctcctaccgaggggcctggtggtacaggaactgccactacgccaacctcaacgggctctacgggagcacagtggaccatcagggagtgagctggtaccactggaagggcttcgagttctcggtgcccttcacggaaatgaagctgagaccaagaaactttcgctccccagcggggggaggctgagctgctgcccacctctctcgcaccccagtatgactgccgagcactgaggggtcgccccgagagaagagccagggtccttcaccacccagccgctggaggaagccttctctgccagcgatctcgcagcactgtgtttacaggggggaggggaggggttcgtacgggagcaataaaggagaaactgaggtacccgg

SEQ ID NO: 31276 - DNA, 31 bp, Homo sapiens
  source 1..31: mol_type = unassigned DNA
cctcctgaatgatgccagcccagtatgctct

SEQ ID NO: 31277 - DNA, 320 bp, Homo sapiens
  source 1..320: mol_type = unassigned DNA
cttcaaccgcactgagtccctgaggcttgctgacgagttgagtggctgggtccagcgccaccagagaggccggaggaagatccctcagagggcccaggagagacagaagtctcagccacggaagaagtcacctccagttaaggcagtccccatccaaccccctggacccccagaaagggattctgtgggccagctgcaactatatcgccacccagaccgttcgcagccagcattcttggatgcaattgaccgacgggaagacacattttatgttgtctctttccgaaggcctcctgaatgatgccagcccagtatgctct

SEQ ID NO: 31278 - DNA, 10084 bp, Homo sapiens
  source 1..10084: mol_type = unassigned DNA
ggtcctcacccttgggcctcttggggactaccgatgagcctcctccctcaggcccctcgacgacgcaaggggcccaggctcctctcctgcagcagcgcccccaggagctgggagagttgagggtgctgggcagagatgagacagggcgcctccgtgtggtctggaccgcccagcctgacacctttgcctacttccaactgcgcatgcgggtgcccgaggggccgggggcacatgaggaagtgctgccaggggacgtccgccaggctctggtgcctccaccccctcctggaaccccgtatgagctgtcacttcatggggtccctcctgggggcaagccctctgaccccatcatctaccaaggcattatggacaaggatgaggagaagcctgggaagtcctcaggcccaccacgcctgggtgagctgacggtgacagacaggacctccgactccttgctcctgcgctggacggtccccgagggcgagtttgactccttcgtgatccagtacaaagacagggacgggcagccccaggtggtgcccgtggaaggaccccagcgctcggccgtcatcacctccctggatcctggccgcaagtacaaatttgtcctgtatgggtttgttggcaagaagaggcatggtccgctggtggctgaagccaagatcttgcctcagagtgacccaagtccagggactccaccccacctgggaaacctgtgggtgacagaccctaccccagattcactgcacctctcctggactgtccctgagggccagtttgacaccttcatggtccagtacagggacagggatggacggccccaggtggtacctgtggaagggcccgagcgttcatttgttgtctcctcactggaccctgaccacaagtacagattcactctgtttggaattgcgaacaagaagcggtatggccccctcacggccgatggcaccactgctccagagaggaaagaggagcccccccgccctgagttcctggagcagcccctcctgggggaactgacagtgaccggcgtgaccccagactccttgcgtctctcatggacagtggcccagggccccttcgactcattcatggtccagtacaaggatgcacaggggcagccccaggcagtgcctgttgcgggggatgagaatgaggttactgtccccggcctggatcccgaccggaagtataagatgaacctctacgggcttcgtggcaggcagcgtgtggggcccgagtctgtggtggccaagactgctcctcaggaggatgtggacgagacccccagccccacagaactgggcacggaggccccggagtcccccgaggagccgctcctgggggagctgacagtgacaggatcctcccctgattcgctgagcctcttctggaccgtcccccagggcagcttcgactctttcaccgtgcagtacaaggacagggatgggcggccccaggcggtgcgtgttgggggcaaggagagtgaggtcaccgtgggaggcctagagcccgggcacaagtacaagatgcacctgtacggcctccacgaggggcagcgcgtgggcccggtgtccgccgtgggcgtgacagccccacaacaagaagagacccctccagccactgagtccccgctggagccacgcctaggagagctgacagtgacagatgtgacccccaactctgtgggcctctcctggacagtccccgagggccagtttgactccttcatagtccagtacaaggacaaggacgggcagccccaggtggtgccggtggcggcagaccagcgagaggtcacagtctacaacctggagcctgagagaaaatataagatgaacatgtatggactacatgatgggcaacgcatgggccccctgtctgtggtcatcgtgacggctcccctcccaccagccccagccacagaggcctccaagcctcccctggagccacgcctaggggagctgacagtgacggatataacccctgactctgtgggcctctcatggacagtccctgagggtgaattcgactcctttgtggttcagtacaaggacagggacgggcagccccaggtggtgcccgtggctgcagatcagcgggaggtcactatccctgacctggaaccctcccgcaagtacaagttcctgctctttgggatccaggatgggaaacgacgcagcccagtctctgtggaggcaaagacggttgcccgaggtgacgccagcccaggggccccaccccgccttggggagctgtgggtgacagaccccaccccagactcactgcgcctctcctggacggttcctgagggccagttcgactcttttgtggtccagttcaaggacaaagacgggccccaggtggtgcccgtggagggccatgagcgctctgtcactgtcacccctctggatgccggccgcaagtacagattcctcctctatggcctcctgggcaagaagcgccatggccctctcactgccgacggcaccacggaagcccggagtgctatggatgatactggaacaaagcgtcccccaaaaccccgtctgggggaggagctgcaggtgaccaccgtgacccagaactccgtgggcctctcctggacagtccctgagggccagtttgactcctttgtggtccagtacaaagacagggacgggcagccccaggtggtgcccgtggagggcagcctcagggaggtcagcgtgccgggcctggaccctgcccacaggtacaagctgctgctctacgggctgcaccacggcaagcgtgtgggccccatctcggccgtcgccattactgccggcagggaagaaacggaaactgagaccacggccccgacccctccagcgcctgagccccacctcggggagttgacagtggaggaggccacgtcacacaccctgcatctctcctggatggtgactgagggagaatttgactccttcgaaatccagtacacagatagagacgggcaactccaaatggtccgcataggaggtgaccggaatgacatcaccctctctggcctggaatccgaccacagatacctggtgaccctgtatggtttcagtgatgggaagcatgtaggtcctgtccatgtcgaggccctgacagtcccggaggaggagaagccttcagaacctcccaccgcaacccccgagccccccatcaagcctcgcctgggggagctgaccgtgacagatgccacccctgactccctcagcctgtcctggacagttcccgagggacagtttgaccacttcctggtccagtacaggaatggagatgggcagcccaaggcagtgagggtgccagggcacgaggaaggggtcaccatctcgggcctggagccagaccataaatacaagatgaacctgtacggcttccacggtggccagcgcatgggccctgtgtctgtcgtcggggtgacagctgcagaggaagagacccccagccccacagaacccagcatggaggccccggagcccgctgaggagccgctcctgggggagctaacagtgacaggatcctcccctgactcgctgagcctctcctggaccgtcccccagggccgcttcgactccttcaccgtgcagtacaaggacagggacgggcggccccaggtggtgcgtgttgggggcgaggagagtgaagtcaccgtggggggcctggagcctgggcgcaagtacaagatgcacctgtacggcctccacgaggggcggcgcgtgggcccagtgtctgctgtgggcgtcacggcccccgaagaggagtcccctgatgctcctcttgcaaagctgcgcctagggcagatgacagtgagagacatcacctccgactccctcagcctctcctggacagtccccgagggccagtttgaccatttcttggtccagtttaagaatggggacgggcagcccaaggcggtgcgggtgccgggacacgaggatggggtcaccatctcgggcctggagccagaccacaagtacaagatgaacctgtacggcttccacggtggccagcgcgtgggccccgtgtctgctgttggtttaactgccccaggaaaggatgaagaaatggccccagcctcgacagaacctcccacccctgaaccccccatcaagcctcgcctggaggagctgaccgtgacagatgcgacccctgactccctcagcctgtcctggacggttcccgagggacagtttgaccacttcctggtccagtacaagaatggggatgggcagcccaaggcaacacgggtgccaggacatgaggacagggtcaccatctccggcctggagccagacaacaagtacaagatgaacctgtacggcttccacggtggccagcgtgtgggccccgtgtctgccatcggggtgacagctgcagaggaagagacccccagccccacagaacccagcatggaggccccggagccccctgaggagccgctcctgggggagctaacagtgacaggatcctcccctgactcgctgagcctctcctggaccgtcccccagggccgcttcgactccttcaccgtgcagtacaaggacagggacgggcggccccaggtggtgcgtgttgggggcgaggagagcgaggtcaccgtggggggcctggagcctgggcgcaaatacaagatgcacctgtatggcctccacgaggggcggcgcgtgggcccggtgtccaccgtgggcgtgactgccccacaagaggatgtggacgagacccccagccctacagaaccaggcacagaggccccagggccccccgaggagcctctcctgggggagctgacagtgacaggatcctcccctgactcgctgagcctttcctggaccgtcccccagggccgctttgactccttcaccgtgcagtacaaggacagggacgggcggccccaggcggtgcgtgttgggggccaggagagcaaggtcactgtgaggggcctggagcctgggcgcaagtacaagatgcacctgtacggcctccacgaggggcggcgcctgggcccggtgtctgccgtgggcgtcacagaggatgaagccgagaccacccaagcagtgcctaccatgacccctgagccccccatcaagcctcgcctgggggagctgaccatgacagatgccacccctgactccctcagcctgtcctggacggttcccgagggccagtttgaccacttcctggtccagtacaggaatggggatgggcagcccaaggcggtgcgggtgccggggcacgaggacggggtcaccatctcaggcctggagccagaccataaatacaagatgaacctgtacggcttccacggtggccagcgcgtgggccccatctctgtcattggggtgacggctgcagaggaagagacccccagccccacggaactcagcactgaggccccggagccccctgaggagccgctcctgggggagctgacagtgacaggatcctcccctgactcgctgagcctctcctggaccatcccccagggccacttcgactccttcaccgtgcagtacaaggacagggacgggcggccccaggtgatgcgtgtcaggggcgaggagagcgaggtcaccgtggggggcctggagcccgggcgcaaatacaagatgcacctgtacggcctccacgaggggcggcgtgtgggcccggtgtccaccgtgggtgtgacagtgcccaccacaacccctgagccccccaacaagcctcgcctcggggagctgaccgtgacagatgccacccctgactccctcagcctgtcctggatggtccccgagggccagtttgaccacttcctggtccagtacaggaatggggatgggcagcccaaggtggtgcgggtgccggggcacgaggacggggtcaccatctcaggcctggagccagaccacaagtacaagatgaacctgtacggcttccacggtggccagcgcgtgggccccatctctgtcattggggtgacagctgcagaggaagaaactcccgcccccacagaacccagcacggaggccccggagccccctgaggagccgctcctgggggagctgacagtgacaggatcctcccctgactcgctgagcctctcctggaccatcccccagggccgcttcgactccttcactgtgcagtacaaggacagggacgggcggccccaggtggtgcgtgtcaggggcgaggagagcgaggtcaccgtggggggcctggagcccgggtgcaaatacaagatgcacctgtacggcctccacgaggggcagcgcgtgggcccagtgtccgctgtgggtgtgacagtgcctaccatgacccctgagccccccatcaagcctcgcctgggggagctgaccgtgacagatgccacccccgactccctcagcctgtcctggatggttcccgagggccagtttgaccacttcctggtccagtacaggaatggggatgggcagcccaaggcggtgcgggtgccggggcacgaggacggggtcaccatctcaggcctggagccagaccataaatacaagatgaacctgtacggcttccacggtggccagcgcgtaggccctgtgtctgccattggggtgacggaggaagagacccccagccccacagaacccagcactgaggccccggaggcccctgaggagccgctcctgggggagttgacagtgacaggatcctcccctgactcgctgagcctctcctggaccgtcccccagggccgcttcgactccttcaccgtgcagtacaaggacagggacgggcagccccaggtggtgcgtgtcagggtcgaggagagcgaggtcaccgtggggggcctggagcccgggcgcaaatacaagatgcatctgtacggcctccacgaggggcagcgcgtgggcccagtgtccaccgtgggcatcacggcgcccctgcccacaccactgccggtggagccccgcctgggggagctggcggtggcggccgtgacctcggactcagtgggcctctcatggacggtggcccagggcccctttgactccttcctggtacagtacagggacgcgcaggggcagccccaggcagtgcctgtgagcggagacctccgagcggtcgccgtctcggggctggacccggcccgcaagtacaagttcctgctctttggactccagaatgggaaacgccacggcccagtccctgtggaggccaggaccgccccagacaccaaaccgtctccccgcctgggggagctgactgtgacagatgcgacccctgactccgtgggcctctcgtggacggtccctgagggcgaattcgactccttcgtggtccagtacaaggataaggatggtcggctccaggtggtgccggtggcagccaaccagcgggaggtcacagtccagggcctggagcccagtaggaaatacaggttcctgctctatggtctgtcaggcaggaaacgactgggccccatctctgctgacagcaccacagctcccctggagaaggagctacctccccacctgggggaactgaccgtggctgaggagacctccagctctctgcgcctgtcctggacggtagcccagggcccctttgactccttcgtggtccagtacagggacacggacgggcagcccagggcagtgcctgtggccgcagaccagcgcacagtcaccgtagaggacctggagcctggcaagaaatacaagtttctgctctacgggctccttgggggaaagcgcctgggcccggtctctgccctgggaatgacagccccagaagaggacacaccagccccagagttagccccagaggcccctgagcctcctgaagagccccgcctaggagtgctgaccgtgaccgacacaaccccagactccatgcgcctctcgtggagcgtggcccagggcccctttgattccttcgtggtccagtatgaggacacgaacgggcagccccaggccttgctcgtggacggcgaccagagcaagatcctcatctcaggcctggagcccagcaccccctacaggttcctcctctatggcctccatgaagggaagcgcctggggcccctctcagctgagggcaccacagggctggctcctgctggtcagacctcagaggagtcaaggccccgcctgtcccagctgtctgtgactgacgtgaccaccagttcactgaggctcaactgggaggccccaccgggggccttcgactccttcctgctccgctttggggttccatcaccaagcactctggagccgcatccgcgtccactgctgcagcgcgagctgatggtgccggggacgcggcactcggccgtgctccgggacctgcgttccgggactctgtacagcctgacactgtatgggctgcgaggaccccacaaggccgacagcatccagggaaccgcccgcaccctcagcccagttctggagagcccccgtgacctccaattcagtgaaatcagggagacctcagccaaggtcaactggatgcccccaccatcccgggcggacagcttcaaagtctcctaccagctggcggacggaggggagcctcagagtgtgcaggtggatggccaggcccggacccagaaactccaggggctgatcccaggcgctcgctatgaggtgaccgtggtctcggtccgaggctttgaggagagtgagcctctcacaggcttcctcaccacggttcctgacggtcccacacagttgcgtgcactgaacttgaccgagggattcgccgtgctgcactggaagcccccccagaatcctgtggacacctatgacgtccaggtcacagcccctggggccccgcctctgcaggcggagaccccaggcagcgcggtggactaccccctgcatgaccttgtcctccacaccaactacaccgccacagtgcgtggcctgcggggccccaacctcacttccccagccagcatcaccttcaccacagggctagaggcccctcgggacttggaggccaaggaagtgaccccccgcaccgccctgctcacttggactgagcccccagtccggcccgcaggctacctgctcagcttccacacccctggtggacagaaccaggagatcctgctcccaggagggatcacatctcaccagctccttggcctctttccctccacctcctacaatgcacggctccaggccatgtggggccagagcctcctgccgcccgtgtccacctctttcaccacgggtgggctgcggatccccttccccagggactgcggggaggagatgcagaacggagccggtgcctccaggaccagcaccatcttcctcaacggcaaccgcgagcggcccctgaacgtgttttgcgacatggagactgatgggggcggctggctggtgttccagcgccgcatggatggacagacagacttctggagggactgggaggactatgcccatggttttgggaacatctctggagagttctggctgggcaatgaggccctgcacagcctgacacaggcaggtgactactccatgcgcgtggacctgcgggctggggacgaggctgtgttcgcccagtacgactccttccacgtagactcggctgcggagtactaccgcctccacttggagggctaccacggcaccgcaggggactccatgagctaccacagcggcagtgtcttctctgcccgtgatcgggaccccaacagcttgctcatctcctgcgctgtctcctaccgaggggcctggtggtacaggaactgccactacgccaacctcaacgggctctacgggagcacagtggaccatcagggagtgagctggtaccactggaagggcttcgagttctcggtgcccttcacggaaatgaagctgagaccaagaaactttcgctccccagcggggggaggctgagctgctgcccacctctctcgcaccccagtatgactgccgagcactgaggggtcgccccgagagaagagccagggtccttcaccacccagccgctggaggaagccttctctgccagcgatctcgcagcactgtgtttacaggggggaggggaggggttcgtacaggagcaataaaggagaaactgaggtacccgg

SEQ ID NO: 31279 - DNA, 13065 bp, Homo sapiens
  source 1..13065: mol_type = unassigned DNA
tcctccccttctcctcccctgctcgctgcagactccctcctcactgtcgctgccgagatccacagtcggttgtggctcagcccctgttgcaggggacaagtgagggagacttccctgtcctgccctgagacgccgccctcccggggttggggacagagcaggtgcagaggcactgcagctgctcggttgcccagcctcctgaatgatgccagcccagtatgctctaacctccagcctggttctcctggtgctgctgagcacagccagagcaggccccttctcttcacggtccaatgtgacactgccagccccccggccccctccccagccagggggccacacagtgggggctggagtgggaagcccctcttctcagctttacgagcacacagtggaaggaggggagaagcaggtggtattcacccaccgcattaacctgcccccttccactggctgtggctgtcccccaggcaccgagcccccagtccttgcttcagaggtacaggccctgagggtccgtctagagatcctggaggagttggtgaaggggctcaaggaacagtgcactgggggatgttgtcctgcctctgcccaagctggcacaggtcagacagatgtgcggaccctctgcagtctccatggtgtgtttgatctgagccgctgcacctgttcctgtgagccaggctggggtgggcccacctgctcagaccccacagatgctgagatccctccctcttccccaccctcagcctcggggtcctgcccagatgactgcaatgatcagggtcgctgtgtccgtggtcgttgcgtgtgctttcccggctacactggccccagctgtggctggccatcctgtcccggggactgccaaggccgtgggcgctgcgtgcagggcgtgtgtgtgtgccgggcaggcttctcaggccccgactgcagccagcgctcctgccctcgaggttgcagccagaggggacgctgtgagggtgggcgctgcgtgtgtgacccaggctacactggtgacgactgtggcatgaggagctgccctcgcggttgcagtcagagggggcgctgtgagaatgggcgctgcgtgtgtaaccccggctacactggcgaggactgtggggtgaggagctgccctcggggctgcagccagcggggacgctgcaaggacgggcgctgcgtgtgtgaccccggctacactggcgaggactgtggtacgcggagctgcccctgggactgtggcgagggcgggcgctgcgtggacggccgctgcgtgtgctggcccgggtacacaggcgaggactgcagcacgcggacatgtccgagggactgccggggccgcgggcgctgcgaggacggcgaatgcatttgcgacacgggctacagcggggacgactgcggcgtgcgcagctgccctggcgactgcaaccaaaggggccgctgcgaggacggccgctgcgtgtgctggccggggtacactggaaccgattgcggctcgcgcgcctgcccacgcgactgtagaggtcgcgggcgctgcgagaacggcgtgtgtgtttgcaatgcgggctacagcggcgaggactgcggtgtgcgcagctgtcctggggactgtcgtggccggggccgctgtgagagtggccgctgcatgtgttggccggggtacacaggccgggactgcggcacgcgcgcctgtcctggcgactgtcgcgggcgcgggcgctgcgtggatggccgctgcgtgtgcaacccgggcttcaccggtgaggactgtgggagccgtcgctgtcccggggactgccgtgggcacggcctttgcgaggatggcgtgtgcgtgtgtgacgcaggctactcaggggaagactgcagcacgcgcagctgccccgggggctgccgaggccgcggccagtgcctagatgggcggtgtgtgtgcgaggacggctactctggcgaggattgcggtgtgaggcagtgcccgaatgactgcagccagcacggcgtgtgccaggacggtgtgtgcatctgttgggaaggctacgtgagtgaggactgcagcatccgcacctgcccctccaactgccacgggaggggccgctgtgaggaagggcgctgcctgtgcgacccaggctacaccggccctacctgtgccacccgcatgtgcccggctgactgccggggacgtgggcggtgtgtgcaaggagtgtgcctgtgccacgtgggctatggcggtgaggactgcgggcaggaagagcctccagccagcgcctgccctggaggctgcgggccccgggaactgtgccgggcaggccagtgtgtgtgtgtagagggcttccgaggccctgactgtgccatccagacatgcccaggggactgccgtggccgaggagagtgtcacgatggcagctgtgtctgcaaagatgggtatgctggcgaagactgcggagaagaggtgccaaccattgagggcatgaggatgcatctcttggaggagacaacagttcggacagagtggaccccggctcctggccccgtggatgcctatgaaattcagttcatccccacgacagagggggcgagccccccattcacagcacgggttccaagctctgcctcagcctatgaccagagaggactggcccctggacaggagtaccaggtcactgtccgagcccttcgagggaccagctggggccttcctgcctccaagaccatcaccaccatgatcgatgggccccaggacctccgagtggtggctgtgacaccgacaacactggagcttggctggctgcgtccccaggctgaggtggaccgatttgtggtgtcctacgtcagtgccggcaaccagagggtgaggctggaagtgccccctgaagcagacgggacgctgctgactgacctgatgccaggcgtagaatatgtggtgactgtcacagcggagcggggccgggcagtcagctacccagcttctgtcagggccaacacagggtcctcacccttgggcctcttggggactaccgatgagcctcctccctcaggcccctcgacgacgcaaggggcccaggctcctctcctgcagcagcgcccccaggagctgggagagttgagggtgctgggcagagatgagacagggcgcctccgtgtggtctggaccgcccagcctgacacctttgcctacttccaactgcgcatgcgggtgcccgaggggccgggggcacatgaggaagtgctgccaggggacgtccgccaggctctggtgcctccaccccctcctggaaccccgtatgagctgtcacttcatggggtccctcctgggggcaagccctctgaccccatcatctaccaaggcattatggacaaggatgaggagaagcctgggaagtcctcaggcccaccacgcctgggtgagctgacggtgacagacaggacctccgactccttgctcctgcgctggacggtccccgagggcgagtttgactccttcgtgatccagtacaaagacagggacgggcagccccaggtggtgcccgtggaaggaccccagcgctcggccgtcatcacctccctggatcctggccgcaagtacaaatttgtcctgtatgggtttgttggcaagaagaggcatggtccgctggtggctgaagccaagatcttgcctcagagtgacccaagtccagggactccaccccgcctgggaaacctgtgggtgacagaccctaccccagattcactgcacctctcctggactgtccctgagggccagtttgacaccttcatggtccagtacagggacagggatggacggccccaggtggtacctgtggaagggcccgagcgttcatttgttgtctcctcactggaccctgaccacaagtacagattcactctgtttggaattgcgaacaagaagcggtatggccccctcacggccgatggcaccactgctccagagaggaaagaggagcccccccgccctgagttcctggagcagcccctcctgggggaactgacagtgaccggcgtgaccccagactccttgcgtctctcatggacagtggcccagggccccttcgactcattcatggtccagtacaaggatgcacaggggcagccccaggcagtgcctgttgcgggggatgagaatgaggttactgtccccggcctggatcccgaccggaagtataagatgaacctctacgggcttcgtggcaggcagcgtgtggggcccgagtctgtggtggccaagactgctcctcaggaggatgtggacgagacccccagccccacagaactgggcacggaggccccggagtcccccgaggagccgctcctgggggagctgacagtgacaggatcctcccctgattcgctgagcctcttctggaccgtcccccagggcagcttcgactctttcaccgtgcagtacaaggacagggatgggcggccccgggcggtgcgtgttgggggcaaggagagtgaggtcaccgtgggaggcctagagcccgggcacaagtacaagatgcacctgtacggcctccacgaggggcagcgcgtgggcccggtgtccgccgtgggcgtgacagccccacaacaagaagagacccctccagccactgagtccccgctggagccacgcctaggagagctgacagtgacagatgtgacccccaactctgtgggcctctcctggacagtccccgagggccagtttgactccttcatagtccagtacaaggacaaggacgggcagccccaggtggtgccggtggcggcagaccagcgagaggtcacagtctacaacctggagcctgagagaaaatataagatgaacatgtatggactacatgatgggcaacgcatgggccccctgtctgtggtcatcgtgacggctcccctcccaccagccccagccacagaggcctccaagcctcccctggagccacgcctaggggagctgacagtgacggatataacccctgactctgtgggcctctcatggacagtccctgagggtgaattcgactcctttgtggttcagtacaaggacagggacgggcagccccaggtggtgcccgtggctgcagatcagcgggaggtcactatccctgacctggaaccctcccgcaagtacaagttcctgctctttgggatccaggatgggaaacgacgcagcccagtctctgtggaggcaaagacggttgcccgaggtgacgccagcccaggggccccaccccgccttggggagctgtgggtgacagaccccaccccagactcactgcgcctctcctggacggttcctgagggccagttcgactcttttgtggtccagttcaaggacaaagacgggccccaggtggtgcccgtggagggccatgagcgctctgtcactgtcacccctctggatgccggccgcaagtacagattcctcctctatggcctcctgggcaagaagcgccatggccctctcactgccgacggcaccacggaagcccggagtgctatggatgatactggaacaaagcgtcccccaaaaccccgtctgggggaggagctgcaggtgaccaccgtgacccagaactccgtgggcctctcctggacagtccctgagggccagtttgactcctttgtggtccagtacaaagacagggacgggcagccccaggtggtgcccgtggagggcagcctcagggaggtcagcgtgccgggcctggaccctgcccacaggtacaagctgctgctctacgggctgcaccacggcaagcgtgtgggccccatctcggccgtcgccattactgccggcagggaagaaacggaaactgagaccacggccccgacccctccagcgcctgagccccacctcggggagttgacagtggaggaggccacgtcacacaccctgcatctctcctggatggtgactgagggagaatttgactccttcgaaatccagtacacagatagagacgggcaactccaaatggtccgcataggaggtgaccggaatgacatcaccctctctggcctggaatccgaccacagatacctggtgaccctgtatggtttcagtgatgggaagcatgtaggtcctgtccatgtcgaggccctgacagtcccggaggaggagaagccttcagaacctcccaccgcaacccccgagccccccatcaagcctcgcctgggggagctgaccgtgacagatgccacccctgactccctcagcctgtcctggacagttcccgagggacagtttgaccacttcctggtccagtacaggaatggagatgggcagcccaaggcagtgagggtgccagggcacgaggaaggggtcaccatctcgggcctggagccagaccataaatacaagatgaacctgtacggcttccacggtggccagcgcatgggccctgtgtctgtcgtcggggtgacagctgcagaggaagagacccccagccccacagaacccagcatggaggccccggagcccgctgaggagccgctcctgggggagctaacagtgacaggatcctcccctgactcgctgagcctctcctggaccgtcccccagggccgcttcgactccttcaccgtgcagtacaaggacagggacgggcggccccaggtggtgcgtgttgggggcgaggagagtgaagtcaccgtggggggcctggagcctgggcgcaagtacaagatgcacctgtacggcctccacgaggggcggcgcgtgggcccagtgtctgctgtgggcgtcacggcccccgaagaggagtcccctgatgctcctcttgcaaagctgcgcctagggcagatgacagtgagagacatcacctccgactccctcagcctctcctggacagtccccgagggccagtttgaccatttcttggtccagtttaagaatggggatgggcagcccaaggcggtgcgggtgccgggacacgaggatggggtcaccatctcgggcctggagccagaccacaagtacaagatgaacctgtacggcttccacggtggccagcgcgtgggccccgtgtctgctgttggtttaactgccccaggaaaggatgaagaaatggccccagcctcgacagaacctcccacccctgaaccccccatcaagcctcgcctggaggagctgaccgtgacagatgcgacccctgactccctcagcctgtcctggacggttcccgagggacagtttgaccacttcctggtccagtacaagaatggggatgggcagcccaaggcaacacgggtgccaggacatgaggacagggtcaccatctccggcctggagccagacaacaagtacaagatgaacctgtacggcttccacggtggccagcgtgtgggccccgtgtctgccatcggggtgacagctgcagaggaagagacccccagccccacagaacccagcatggaggccccggagccccctgaggagccgctcctgggggagctgacagtgacaggatcctcccctgactcgctgagcctctcctggaccgtcccccagggccgcttcgactccttcaccgtgcagtacaaggacagggacgggcggccccaggtggtgcgtgttgggggcgaggagagcgaggtcaccgtggggggcctggagcctgggcgcaaatacaagatgcacctgtacggcctccacgaggggcggcgcgtgggcccggtgtccaccgtgggcgtgactgccccacaagaggatgtggacgagacccccagccctacagaaccaggcacagaggccccagagccccccgaggagcctctcctgggggagctgacagtgacaggatcctcccctgactcgctgagcctttcctggaccgtcccccagggccgctttgactccttcaccgtgcagtacaaggacagggacgggcggccccaggcggtgcgtgttgggggccaggagagcaaggtcactgtgaggggcctggagcctgggcgcaagtacaagatgcacctgtacggcctccacgaggggcggcgcctgggcccggtgtctgccgtgggcgtcacagaggatgaagccgagaccacccaagcagtgcctaccatgacccctgagccccccatcaagcctcgcctgggggagctgaccatgacagatgccacccctgactccctcagcctgtcctggacggttcccgagggccagtttgaccacttcctggtccagtacaggaatggggatgggcagcccaaggcggtgcgggtgccggggcacgaggacggggtcaccatctcaggcctggagccagaccataaatacaagatgaacctgtacggcttccacggtggccagcgcgtgggccccatctctgtcattggggtgacggctgcagaggaagagacccccagccccacggaactcagcactgaggccccggagccccctgaggagccgctcctgggggagctgacagtgacaggatcctcccctgactcgctgagcctctcctggaccatcccccagggccacttcgactccttcaccgtgcagtacaaggacagggacgggcggccccaggtgatgcgtgtcaggggcgaggagagcgaggtcaccgtggggggcctggagcccgggcgcaaatacaagatgcacctgtacggcctccacgaggggcggcgtgtgggcccggtgtccaccgtgggtgtgacagtgcccaccacaacccctgagccccccaacaagcctcgcctcggggagctgaccgtgacagatgccacccctgactccctcagcctgtcctggatggtccccgagggccagtttgaccacttcctggtccagtacaggaatggggatgggcagcccaaggtggtgcgggtgccggggcacgaggacggggtcaccatctcaggcctggagccagaccacaagtacaagatgaacctgtacggcttccacggtggccagcgcgtgggccccatctctgtcattggggtgacagctgcagaggaagaaactcccgcccccacagaacccagcacggaggccccggagccccctgaggagccgctcctgggggagctgacagtgacaggatcctcccctgactcgctgagcctctcctggaccatcccccagggccgcttcgactccttcactgtgcagtacaaggacagggacgggcggccccaggtggtgcgtgtcaggggcgaggagagcgaggtcaccgtggggggcctggagcccgggtgcaaatacaagatgcacctgtacggcctccacgaggggcagcgcgtgggcccagtgtccgctgtgggtgtgacagtgcctaccatgacccctgagccccccatcaagcctcgcctgggggagctgaccgtgacagatgccacccccgactccctcagcctgtcctggatggttcccgagggccagtttgaccacttcctggtccagtacaggaatggggatgggcagcccaaggcggtgcgggtgccggggcacgaggacggggtcaccatctcaggcctggagccagaccataaatacaagatgaacctgtacggcttccacggtggccagcgcgtaggccctgtgtctgccattggggtgacggaggaagagacccccagccccacagaacccagcactgaggccccggaggcccctgaggagccgctcctgggggagttgacagtgacaggatcctcccctgactcgctgagcctctcctggaccgtcccccagggccgcttcgactccttcaccgtgcagtacaaggacagggacgggcagccccaggtggtgcgtgtcaggggcgaggagagcgaggtcaccgtggggggcctggagcccgggcgcaaatacaagatgcatctgtacggcctccacgaggggcagcgcgtgggcccagtgtccaccgtgggcatcacggcgcccctgcccacaccactgccggtggagccccgcctgggggagctggcggtggcggccgtgacctcggactcagtgggcctctcatggacggtggcccagggcccctttgactccttcctggtacagtacagggacgcgcaggggcagccccaggcagtgcctgtgagcggagacctccgagcggtcgccgtctcggggctggacccggcccgcaagtacaagttcctgctctttggactccagaatgggaaacgccacggcccagtccctgtggaggccaggaccgccccagacaccaaaccgtctccccgcctgggggagctgactgtgacagatgcgacccctgactccgtgggcctctcgtggacggtccctgagggcgaattcgactccttcgtggtccagtacaaggataaggatggtcggctccaggtggtgccggtggcagccaaccagcgggaggtcacagtccagggcctggagcccagtaggaaatacaggttcctgctctatggtctgtcaggcaggaaacgactgggccccatctctgctgacagcaccacagctcccctggagaaggagctacctccccacctgggggaactgaccgtggctgaggagacctccagctctctgcgcctgtcctggacggtagcccagggcccctttgactccttcgtggtccagtacagggacacggacgggcagcccagggcagtgcctgtggccgcagaccagcgcacagtcaccgtagaggacctggagcctggcaagaaatacaagtttctgctctacgggctccttgggggaaagcgcctgggcccggtctctgccctgggaatgacagccccagaagaggacacaccagccccagagttagccccagaggcccctgagcctcctgaagagccccgcctaggagtgctgaccgtgaccgacacaaccccagactccatgcgcctctcgtggagcgtggcccagggcccctttgattccttcgtggtccagtatgaggacacgaacgggcagccccaggccttgctcgtggacggcgaccagagcaagatcctcatctcaggcctggagcccagcaccccctacaggttcctcctctatggcctccatgaagggaagcgcctggggcccctctcagctgagggcaccacagggctggctcctgctggtcagacctcagaggagtcaaggccccgcctgtcccagctgtctgtgactgacgtgaccaccagttcactgaggctcaactgggaggccccaccgggggccttcgactccttcctgctccgctttggggttccatcaccaagcacactggagccgcatccgcgtccactgctgcagcgcgagctgatggtgccggggacgcggcactcggccgtgctccgggacctgcgttccgggactctgtacagcctgacactgtatgggctgcgaggaccccacaaggccgacagcatccagggaaccgcccgcaccctcagcccagttctggagagcccccgtgacctccaattcagtgaaatcagggagacctcagccaaggtcaactggatgcccccaccatcccgggcggacagcttcaaagtctcctaccagctggcggacggaggggagcctcagagtgtgcaggtggatggccaggcccggacccagaaactccaggggctgatcccaggcgctcgctatgaggtgaccgtggtctcggtccgaggctttgaggagagtgagcctctcacaggcttcctcaccacggttcctgacggtcccacacagttgcgtgcactgaacttgaccgagggattcgccgtgctgcactggaagcccccccagaatcctgtagacacctatgacatccaggtcacagcccctggggccccgcctctgcaggcggagaccccaggcagcgcggtggactaccccctgcatgaccttgtcctccacaccaactacaccgccacagtgcgtggcctgcggggccccaacctcacttccccagccagcatcaccttcaccacagggctagaggcccctcgggacttggaggccaaggaagtgaccccccgcaccgccctgctcacttggactgagcccccagtccggcccgcaggctacctgctcagcttccacacccctggtggacagacccaggagatcctgctcccaggagggatcacatctcaccagctccttggcctctttccctccacctcctacaatgcacggctccaggccatgtggggccagagcctcctgccgcccgtgtccacctctttcaccacgggtgggctgcggatccccttccccagggactgcggggaggagatgcagaacggagccggtgcctccaggaccagcaccatcttcctcaacggcaaccgcgagcggcccctgatcgtgttttgcgacatggagactgatgggggcggctggctggtgttccagcgccgcatggatggacagacagacttctggagggactgggaggactatgcccatggttttgggaacatctctggagagttctggctgggcaatgaggccctgcacagcctgacacaggcaggtgactactccatgcgcgtggacctgcgggctggggacgaggctgtgttcgcccagtacgactccttccacgtagactcggctgcggagtactaccgcctccacttggagggctaccacggcaccgcaggggactccatgagctaccacagcggcagtgtcttctctgcccgtgatcgggaccccaacagcttgctcatctcctgcgctgtctcctaccgaggggcctggtggtacaggaactgccactacgccaacctcaacgggctctacgggagcacagtggaccatcagggagtgagctggtaccactggaagggcttcgagttctcggtgcccttcacggaaatgaagctgagaccaagaaactttcgctccccagcggggggaggctgagctgctgcccacctctctcgcaccccagtatgactgccgagcactgaggggtcgccccgagagaagagccagggtccttcaccacccagccgctggaggaagccttctctgccagcgatctcgcagcactgtgtttacaggggggaggggaggggttcgtacgggagcaataaaggagaaactgaggtacccgg

SEQ ID NO: 31280 - DNA, 372 bp, Homo sapiens
  source 1..372: mol_type = unassigned DNA
agttcaggtttatgtgtgtgcatttcttttttattattattaaataaacaacttggagggagttgaaggaatggtggctgccttcctggctcgtgatggggagtttgggggaaagtggcttttccagagccagcatcaaagaatcaagcactgaagacatagctggctctgaggtggggtgggtgcgggatcacagaccgcatgtcatccccttgcccccacccctgcaactctggggtatatctgtgtctagcaacgatgtctcatggcgtgacagactagaggatacgcatccctggaatgtgagtcaacaggaaagatggggccccacgcccttcaggcctcctgaatgatgccagcccagtatgctct

SEQ ID NO: 31281 - DNA, 1902 bp, Homo sapiens
  source 1..1902: mol_type = unassigned DNA
ggtcctcacccttgggcctcttggggactaccgatgagcctcctccctcaggcccctcgacgacgcaaggggcccaggctcctctcctgcagcagcgcccccaggagctgggagagttgagggtgctgggcagagatgagacagggcgcctccgtgtggtctggaccgcccagcctgacacctttgcctacttccaactgcgcatgcgggtgcccgaggggccgggggcacatgaggaagtgctgccaggggacgtccgccaggctctggtgcctccaccccctcctggaaccccgtatgagctgtcacttcatggggtccctcctgggggcaagccctctgaccccatcatctaccaaggcattatggacaaggatgaggagaagcctgggaagtcctcaggcccaccacgcctgggtgagctgacggtgacagacaggacctccgactccttgctcctgcgctggacggtccccgagggcgagtttgactccttcgtgatccagtacaaagacagggacgggcagccccaggtggtgcccgtggaaggaccccagcgctcggccgtcatcacctccctggatcctggccgcaagtacaaatttgtcctgtatgggtttgttggcaagaagaggcatggtccgctggtggctgaagccaagatcttgcctcagagtgacccaagtccagggactccaccccgcctgggaaacctgtgggtgacagaccctaccccagattcactgcacctctcctggactgtccctgagggccagtttgacaccttcatggtccagtacagggacagggatggacggccccaggtggtacctgtggaagggcccgagcgttcatttgttgtctcctcactggaccctgaccacaagtacagattcactctgtttggaattgcgaacaagaagcggtatggccccctcacggccgatggcaccactgctccagagaggaaagaggagcccccccgccctgagttcctggagcagcccctcctgggggaactgacagtgaccggcgtgaccccagactccttgcgtctctcatggacagtggcccagggccccttcgactcattcatggtccagtacaaggatgcacaggggcagccccaggcagtgcctgttgcgggggatgagaatgaggttactgtccccggcctggatcccgaccggaagtataagatgaacctctacgggcttcgtggcaggcagcgtgtggggcccgagtctgtggtggccaagactgctcctcaggaggatgtggacgagacccccagccccacagaactgggcacggaggccccggagtcccccgaggagccgctcctgggggagctgacagtgacaggatcctcccctgattcgctgagcctcttctggaccgtcccccagggcagcttcgactctttcaccgtgcagtacaaggacagggatgggcggccccgggcggtgcgtgttgggggcaaggagagtgaggtcaccgtgggaggcctagagcccgggcacaagtacaagatgcacctgtacggcctccacgaggggcagcgcgtgggcccggtgtccgccgtgggcgtgacagccccacaacaagaagagacccctccagccactgagtccccgctggagccacgcctaggagagctgacagtgacagatgtgacccccaactctgtgggcctctcctggacagtccccgagggccagtttgactccttcatagtccagtacaaggacaaggacgggcagccccaggtggtgccggtggcggcagaccagcgagaggtcacagtctacaacctggagcctgagagaaaatataagatgaacatgtatggactacatgatgggcaacgcatgggccccctgtctgtggtcatcgtgacgg

SEQ ID NO: 31282 - DNA, 372 bp, Homo sapiens; identical to SEQ ID NO: 31280
  source 1..372: mol_type = unassigned DNA

SEQ ID NO: 31283 - DNA, 13065 bp, Homo sapiens
  source 1..13065: mol_type = unassigned DNA
tcctccccttctcctcccctgctcgctgcagactccctcctcactgtcgctgccgagatccacagtcggttgtggctcagcccctgttgcaggggacaagtgagggagacttccctgtcctgccctgagacgccgccctcccggggttggggacagagcaggtgcagaggcactgcagctgctcggttgcccagcctcctgaatgatgccagcccagtatgctctaacctccagcctggttctcctggtgctgctgagcacagccagagcaggccccttctcttcacggtccaatgtgacactgccagccccccggccccctccccagccagggggccacacagtgggggctggagtgggaagcccctcttctcagctttacgagcacacagtggaaggaggggagaagcaggtggtattcacccaccgcattaacctgcccccttccactggctgtggctgtcccccaggcaccgagcccccagtccttgcttcagaggtacaggccctgagggtccgtctagagatcctggaggagttggtgaaggggctcaaggaacagtgcactgggggatgttgtcctgcctctgcccaagctggcacaggtcagacagatgtgcggaccctctgcagtctccatggtgtgtttgatctgagccgctgcacctgttcctgtgagccaggctggggtgggcccacctgctcagaccccacagatgctgagatccctccctcttccccaccctcagcctcggggtcctgcccagatgactgcaatgatcagggtcgctgtgtccgtggtcgttgcgtgtgctttcccggctacactggccccagctgtggctggccatcctgtcccggggactgccaaggccgtgggcgctgcgtgcagggcgtgtgtgtgtgccgggcaggcttctcaggccccgactgcagccagcgctcctgccctcgaggttgcagccagaggggacgctgtgagggtgggcgctgcgtgtgtgacccaggctacactggtgacgactgtggcatgaggagctgccctcgcggttgcagtcagagggggcgctgtgagaatgggcgctgcgtgtgtaaccccggctacactggcgaggactgtggggtgaggagctgccctcggggctgcagccagcggggacgctgcaaggacgggcgctgcgtgtgtgaccccggctacactggcgaggactgtggtacgcggagctgcccctgggactgtggcgagggcgggcgctgcgtggacggccgctgcgtgtgctggcccgggtacacaggcgaggactgcagcacgcggacatgtccgagggactgccggggccgcgggcgctgcgaggacggcgaatgcatttgcgacacgggctacagcggggacgactgcggcgtgcgcagctgccctggcgactgcaaccaaaggggccgctgcgaggacggccgctgcgtgtgctggccggggtacactggaaccgattgcggctcgcgcgcctgcccacgcgactgtagaggtcgcgggcgctgcgagaacggcgtgtgtgtttgcaatgcgggctacagcggcgaggactgcggtgtgcgcagctgtcctggggactgtcgtggccggggccgctgtgagagtggccgctgcatgtgttggccggggtacacaggccgggactgcggcacgcgcgcctgtcctggcgactgtcgcgggcgcgggcgctgcgtggatggccgctgcgtgtgcaacccgggcttcaccggtgaggactgtgggagccgtcgctgtcccggggactgccgtgggcacggcctttgcgaggatggcgtgtgcgtgtgtgacgcaggctactcaggggaagactgcagcacgcgcagctgccccgggggctgccgaggccgcggccagtgcctagatgggcggtgtgtgtgcgaggacggctactctggcgaggattgcggtgtgaggcagtgcccgaatgactgcagccagcacggcgtgtgccaggacggtgtgtgcatctgttgggaaggctacgtgagtgaggactgcagcatccgcacctgcccctccaactgccacgggaggggccgctgtgaggaagggcgctgcctgtgcgacccaggctacaccggccctacctgtgccacccgcatgtgcccggctgactgccggggacgtgggcggtgtgtgcaaggagtgtgcctgtgccacgtgggctatggcggtgaggactgcgggcaggaagagcctccagccagcgcctgccctggaggctgcgggccccgggaactgtgccgggcaggccagtgtgtgtgtgtagagggcttccgaggccctgactgtgccatccagacatgcccaggggactgccgtggccgaggagagtgtcacgatggcagctgtgtctgcaaagatgggtatgctggcgaagactgcggagaagaggtgccaaccattgagggcatgaggatgcatctcttggaggagacaacagttcggacagagtggaccccggctcctggccccgtggatgcctatgaaattcagttcatccccacgacagagggggcgagccccccattcacagcacgggttccaagctctgcctcagcctatgaccagagaggactggcccctggacaggagtaccaggtcactgtccgagcccttcgagggaccagctggggccttcctgcctccaagaccatcaccaccatgatcgatgggccccaggacctccgagtggtggctgtgacaccgacaacactggagcttggctggctgcgtccccaggctgaggtggaccgatttgtggtgtcctacgtcagtgccggcaaccagagggtgaggctggaagtgccccctgaagcagacgggacgctgctgactgacctgatgccaggcgtagaatatgtggtgactgtcacagcggagcggggccgggcagtcagctacccagcttctgtcagggccaacacagggtcctcacccttgggcctcttggggactaccgatgagcctcctccctcaggcccctcgacgacgcaaggggcccaggctcctctcctgcagcagcgcccccaggagctgggagagttgagggtgctgggcagagatgagacagggcgcctccgtgtggtctggaccgcccagcctgacacctttgcctacttccaactgcgcatgcgggtgcccgaggggccgggggcacatgaggaagtgctgccaggggacgtccgccaggctctggtgcctccaccccctcctggaaccccgtatgagctgtcacttcatggggtccctcctgggggcaagccctctgaccccatcatctaccaaggcattatggacaaggatgaggagaagcctgggaagtcctcaggcccaccacgcctgggtgagctgacggtgacagacaggacctccgactccttgctcctgcgctggacggtccccgagggcgagtttgactccttcgtgatccagtacaaagacagggacgggcagccccaggtggtgcccgtggaaggaccccagcgctcggccgtcatcacctccctggatcctggccgcaagtacaaatttgtcctgtatgggtttgttggcaagaagaggcatggtccgctggtggctgaagccaagatcttgcctcagagtgacccaagtccagggactccaccccgcctgggaaacctgtgggtgacagaccctaccccagattcactgcacctctcctggactgtccctgagggccagtttgacaccttcatggtccagtacagggacagggatggacggccccaggtggtacctgtggaagggcccgagcgttcatttgttgtctcctcactggaccctgaccacaagtacagattcactctgtttggaattgcgaacaagaagcggtatggccccctcacggccgatggcaccactgctccagagaggaaagaggagcccccccaccctgagttcctggagcagcccctcctgggggaactgacagtgaccggcgtgaccccagactccttgcgtctctcatggacagtggcccagggccccttcgactcattcatggtccagtacaaggatgcacaggggcagccccaggcagtgcctgttgcgggggatgagaatgaggttactgtccccggcctggatcccgaccggaagtataagatgaacctctacgggcttcgtggcaggcagcgtgtggggcccgagtctgtggtggccaagactgctcctcaggaggatgtggacgagacccccagccccacagaactgggcacggaggccccggagtcccccgaggagccgctcctgggggagctgacagtgacaggatcctcccctgattcgctgagcctcttctggaccgtcccccagggcagcttcgactctttcaccgtgcagtacaaggacagggatgggcggccccgggcggtgcgtgttgggggcaaggagagtgaggtcaccgtgggaggcctagagcccgggcacaagtacaagatgcacctgtacggcctccacgaggggcagcgcgtgggcccggtgtccgccgtgggcgtgacagccccacaacaagaagagacccctccagccactgagtccccgctggagccacgcctaggagagctgacagtgacagatgtgacccccaactctgtgggcctctcctggacagtccccgagggccagtttgactccttcatagtccagtacaaggacaaggacgggcagccccaggtggtgccggtggcggcagaccagcgagaggtcacagtctacaacctggagcctgagagaaaatataagatgaacatgtatggactacatgatgggcaacgcatgggccccctgtctgtggtcatcgtgacggctcccctcccaccagccccagccacagaggcctccaagcctcccctggagccacgcctaggggagctgacagtgacggatataacccctgactctgtgggcctctcatggacagtccctgagggtgaattcgactcctttgtggttcagtacaaggacagggacgggcagccccaggtggtgcccgtggctgcagatcagcgggaggtcactatccctgacctggaaccctcccgcaagtacaagttcctgctctttgggatccaggatgggaaacgacgcagcccagtctctgtggaggcaaagacggttgcccgaggtgacgccagcccaggggccccaccccgccttggggagctgtgggtgacagaccccaccccagactcactgcgcctctcctggacggttcctgagggccagttcgactcttttgtggtccagttcaaggacaaagacgggccccaggtggtgcccgtggagggccatgagcgctctgtcactgtcacccctctggatgccggccgcaagtacagattcctcctctatggcctcctgggcaagaagcgccatggccctctcactgccgacggcaccacggaagcccggagtgctatggatgatactggaacaaagcgtcccccaaaaccccgtctgggggaggagctgcaggtgaccaccgtgacccagaactccgtgggcctctcctggacagtccctgagggccagtttgactcctttgtggtccagtacaaagacagggacgggcagccccaggtggtgcccgtggagggcagcctcagggaggtcagcgtgccgggcctggaccctgcccacaggtacaagctgctgctctacgggctgcaccacggcaagcgtgtgggccccatctcggccgtcgccattactgccggcagggaagaaacggaaactgagaccacggccccgacccctccagcgcctgagccccacctcggggagttgacagtggaggaggccacgtcacacaccctgcatctctcctggatggtgactgagggagaatttgactccttcgaaatccagtacacagatagagacgggcaactccaaatggtccgcataggaggtgaccggaatgacatcaccctctctggcctggaatccgaccacagatacctggtgaccctgtatggtttcagtgatgggaagcatgtaggtcctgtccatgtcgaggccctgacagtcccggaggaggagaagccttcagaacctcccaccgcaacccccgagccccccatcaagcctcgcctgggggagctgaccgtgacagatgccacccctgactccctcagcctgtcctggacagttcccgagggacagtttgaccacttcctggtccagtacaggaatggagatgggcagcccaaggcagtgagggtgccagggcacgaggaaggggtcaccatctcgggcctggagccagaccataaatacaagatgaacctgtacggcttccacggtggccagcgcatgggccctgtgtctgtcgtcggggtgacagctgcagaggaagagacccccagccccacagaacccagcatggaggccccggagcccgctgaggagccgctcctgggggagctaacagtgacaggatcctcccctgactcgctgagcctctcctggaccgtcccccagggccgcttcgactccttcaccgtgcagtacaaggacagggacgggcggccccaggtggtgcgtgttgggggcgaggagagtgaagtcaccgtggggggcctggagcctgggcgcaagtacaagatgcacctgtacggcctccacgaggggcggcgcgtgggcccagtgtctgctgtgggcgtcacggcccccgaagaggagtcccctgatgctcctcttgcaaagctgcgcctagggcagatgacagtgagagacatcacctccgactccctcagcctctcctggacagtccccgagggccagtttgaccatttcttggtccagtttaagaatggggatgggcagcccaaggcggtgcgggtgccgggacacgaggatggggtcaccatctcgggcctggagccagaccacaagtacaagatgaacctgtacggcttccacggtggccagcgcgtgggccccgtgtctgctgttggtttaactgccccaggaaaggatgaagaaatggccccagcctcgacagaacctcccacccctgaaccccccatcaagcctcgcctggaggagctgaccgtgacagatgcgacccctgactccctcagcctgtcctggacggttcccgagggacagtttgaccacttcctggtccagtacaagaatggggatgggcagcccaaggcaacacgggtgccaggacatgaggacagggtcaccatctccggcctggagccagacaacaagtacaagatgaacctgtacggcttccacggtggccagcgtgtgggccccgtgtctgccatcggggtgacagctgcagaggaagagacccccagccccacagaacccagcatggaggccccggagccccctgaggagccgctcctgggggagctgacagtgacaggatcctcccctgactcgctgagcctctcctggaccgtcccccagggccgcttcgactccttcaccgtgcagtacaaggacagggacgggcggccccaggtggtgcgtgttgggggcgaggagagcgaggtcaccgtggggggcctggagcctgggcgcaaatacaagatgcacctgtacggcctccacgaggggcggcgcgtgggcccggtgtccaccgtgggcgtgactgccccacaagaggatgtggacgagacccccagccctacagaaccaggcacagaggccccagagccccccgaggagcctctcctgggggagctgacagtgacaggatcctcccctgactcgctgagcctttcctggaccgtcccccagggccgctttgactccttcaccgtgcagtacaaggacagggatgggcggccccaggcggtgcgtgttgggggccaggagagcaaggtcactgtgaggggcctggagcctgggcgcaagtacaagatgcacctgtacggcctccacgaggggcggcgcctgggcccggtgtctgccgtgggcgtcacagaggatgaagccgagaccacccaagcagtgcctaccatgacccctgagccccccatcaagcctcgcctgggggagctgaccatgacagatgccacccctgactccctcagcctgtcctggacggttcccgagggccagtttgaccacttcctggtccagtacaggaatggggatgggcagcccaaggcggtgcgggtgccggggcacgaggacggggtcaccatctcaggcctggagccagaccataaatacaagatgaacctgtacggcttccacggtggccagcgcgtgggccccatctctgtcattggggtgacggctgcagaggaagagacccccagccccacggaactcagcactgaggccccggagccccctgaggagccgctcctgggggagctgacagtgacaggatcctcccctgactcgctgagcctctcctggaccatcccccagggccacttcgactccttcaccgtgcagtacaaggacagggacgggcggccccaggtgatgcgtgtcaggggcgaggagagcgaggtcaccgtggggggcctggagcccgggcgcaaatacaagatgcacctgtacggcctccacgaggggcggcgtgtgggcccggtgtccaccgtgggtgtgacagtgcccaccacaacccctgagccccccaacaagcctcgcctcggggagctgaccgtgacagatgccacccctgactccctcagcctgtcctggatggtccccgagggccagtttgaccacttcctggtccagtacaggaatggggatgggcagcccaaggtggtgcgggtgccggggcacgaggacggggtcaccatctcaggcctggagccagaccacaagtacaagatgaacctgtacggcttccacggtggccagcgcgtgggccccatctctgtcattggggtgacagctgcagaggaagaaactcccgcccccacagaacccagcacggaggccccggagccccctgaggagccgctcctgggggagctgacagtgacaggatcctcccctgactcgctgagcctctcctggaccatcccccagggccgcttcgactccttcactgtgcagtacaaggacagggacgggcggccccaggtggtgcgtgtcaggggcgaggagagcgaggtcaccgtggggggcctggagcccgggtgcaaatacaagatgcacctgtacggcctccacgaggggcagcgcgtgggcccagtgtccgctgtgggtgtgacagtgcctaccatgacccctgagccccccatcaagcctcgcctgggggagctgaccgtgacagatgccacccccgactccctcagcctgtcctggatggttcccgagggccagtttgaccacttcctggtccagtacaggaatggggatgggcagcccaaggcggtgcgggtgccggggcacgaggacggggtcaccatctcaggcctggagccagaccataaatacaagatgaacctgtacggcttccacggtggccagcgcgtaggccctgtgtctgccattggggtgacggaggaagagacccccagccccacagaacccagcactgaggccccggaggcccctgaggagccgctcctgggggagttgacagtgacaggatcctcccctgactcgctgagcctctcctggaccatcccccagggccgcttcgactccttcaccgtgcagtacaaggacagggacgggcagccccaggtggtgcgtgtcaggggcgaggagagcgaggtcaccgtggggggcctggagcccgggcgcaaatacaagatgcatctgtacggcctccacgaggggcagcgcgtgggcccagtgtccaccgtgggcatcacggcgcccctgcccacaccactgccggtggagccccgcctgggggagctggcggtggcggccgtgacctcggactcagtgggcctctcatggacggtggcccagggcccctttgactccttcctggtacagtacagggacgcgcaggggcagccccaggcagtgcctgtgagcggagacctccgagcggtcgccgtctcggggctggacccggcccgcaagtacaagttcctgctctttggactccagaatgggaaacgccacggcccagtccctgtggaggccaggaccgccccagacaccaaaccgtctccccgcctgggggagctgactgtgacagatgcgacccctgactccgtgggcctctcgtggacggtccctgagggcgaattcgactccttcgtggtccagtacaaggataaggatggtcggctccaggtggtgccggtggcagccaaccagcgggaggtcacagtccagggcctggagcccagtaggaaatacaggttcctgctctatggtctgtcaggcaggaaacgactgggccccatctctgctgacagcaccacagctcccctggagaaggagctacctccccacctgggggaactgaccgtggctgaggagacctccagctctctgcgcctgtcctggacggtagcccagggcccctttgactccttcgtggtccagtacagggacacggacgggcagcccagggcagtgcctgtggccgcagaccagcgcacagtcaccgtagaggacctggagcctggcaagaaatacaagtttctgctctacgggctccttgggggaaagcgcctgggcccggtctctgccctgggaatgacagccccagaagaggacacaccagccccagagttagccccagaggcccctgagcctcctgaagagccccgcctaggagtgctgaccgtgaccgacacaaccccagactccatgcgcctctcgtggagcgtggcccagggcccctttgattccttcgtggtccagtatgaggacacgaacgggcagccccaggccttgctcgtggacggcgaccagagcaagatcctcatctcaggcctggagcccagcaccccctacaggttcctcctctatggcctccatgaagggaagcgcctggggcccctctcagctgagggcaccacagggctggctcctgctggtcagacctcagaggagtcaaggccccgcctgtcccagctgtctgtgactgacgtgaccaccagttcactgaggctcaactgggaggccccaccgggggccttcgactccttcctgctccgctttggggttccatcaccaagcactctggagccgcatccgcgtccactgctgcagcgcgagctgatggtgccggggacgcggcactcggccgtgctccgggacctgcgttccgggactctgtacagcctgacactgtatgggctgcgaggaccccacaaggccgacagcatccagggaaccgcccgcaccctcagcccagttctggagagcccccgtgacctccaattcagtgaaatcagggagacctcagccaaggtcaactggatgcccccaccatcccgggcggacagcttcaaagtctcctaccagctggcggacggaggggagcctcagagtgtgcaggtggatggccaggcccggacccagaaactccaggggctgatcccaggcgctcgctatgaggtgaccgtggtctcggtccgaggctttgaggagagtgagcctctcacaggcttcctcaccacggttcctgacggtcccacacagttgcgtgcactgaacttgaccgagggattcgccgtgctgcactggaagcccccccagaatcctgtagacacctatgacatccaggtcacagcccctggggccccgcctctgcaggcggagaccccaggcagcgcggtggactaccccctgcatgaccttgtcctccacaccaactacaccgccacagtgcgtggcctgcggggccccaacctcacttccccagccagcatcaccttcaccacagggctagaggcccctcgggacttggaggccaaggaagtgaccccccgcaccgccctgctcacttggactgagcccccagtccggcccgcaggctacctgctcagcttccacacccctggtggacagacccaggagatcctgctcccaggagggatcacatctcaccagctccttggcctctttccctccacctcctacaatgcacggctccaggccacgtggggccagagcctcctgccgcccgtgtccacctctttcaccacgggtgggctgcggatccccttccccagggactgcggggaggagatgcagaacggagccggtgcctccaggaccagcaccatcttcctcaacggcaaccgcgagcggcccctgaacgtgttttgcgacatggagactgatgggggcggctggctggtgttccagcgccgcatggatggacagacagacttctggagggactgggaggactatgcccatggttttgggaacatctctggagagttctggctgggcaatgaggccctgcacagcctgacacaggcaggtgactactccatgcgcgtggacctgcgggctggggacgaggctgtgttcgcccagtacgactccttccacgtagactcggctgcggagtactaccgcctccacttggagggctaccacggcaccgcaggggactccatgagctaccacagcggcagtgtcttctctgcccgtgatcgggaccccaacagcttgctcatctcctgcgctgtctcctaccgaggggcctggtggtacaggaactgccactacgccaacctcaacgggctctacgggagcacagtggaccatcagggagtgagctggtaccactggaagggcttcgagttctcggtgcccttcacggaaatgaagctgagaccaagaaactttcgctccccagcggggggaggctgagctgctgcccacctctctcgcaccccagtatgactgccgagcactgaggggtcgccccgagagaagagccagggtccttcaccacccagccgctggaggaagccttctctgccagcgatctcgcagcactgtgtttacaggggggaggggaggggttcgtacgggagcaataaaggagaaactgaggtacccgg

SEQ ID NO: 31284 - DNA, 372 bp, Homo sapiens; identical to SEQ ID NO: 31280
  source 1..372: mol_type = unassigned DNA

SEQ ID NO: 31285 - DNA, 6849 bp, Homo sapiens
  source 1..6849: mol_type = unassigned DNA
cctcctgaatgatgccagcccagtatgctctaacctccagcctggttctcctggtgctgctgagcacagccagagcaggccccttctcttcacggtccaatgtgacactgccagccccccggccccctccccagccagggggccacacagtgggggctggagtgggaagcccctcttctcagctttacgagcacacagtggaaggaggggagaagcaggtggtattcacccaccgcattaacctgcccccttccactggctgtggctgtcccccaggcaccgagcccccagtccttgcttcagaggtacaggccctgagggtccgtctagagatcctggaggagttggtgaaggggctcaaggaacagtgcactgggggatgttgtcctgcctctgcccaagctggcacaggtcagacagatgtgcggaccctctgcagtctccatggtgtgtttgatctgagccgctgcacctgttcctgtgagccaggctggggtgggcccacctgctcagaccccacagatgctgagatccctccctcttccccaccctcagcctcggggtcctgcccagatgactgcaatgatcagggtcgctgtgtccgtggtcgttgcgtgtgctttcccggctacactggccccagctgtggctggccatcctgtcccggggactgccaaggccgtgggcgctgcgtgcagggcgtgtgtgtgtgccgggcaggcttctcaggccccgactgcagccagcgctcctgccctcgaggttgcagccagaggggacgctgtgagggtgggcgctgcgtgtgtgacccaggctacactggtgacgactgtggcatgaggagctgccctcgcggttgcagtcagagggggcgctgtgagaatgggcgctgcgtgtgtaaccccggctacactggcgaggactgtggggtgaggagctgccctcggggctgcagccagcggggacgctgcaaggacgggcgctgcgtgtgtgaccccggctacactggcgaggactgtggtacgcggagctgcccctgggactgtggcgagggcgggcgctgcgtggacggccgctgcgtgtgctggcccgggtacacaggcgaggactgcagcacgcggacatgtccgagggactgccggggccgcgggcgctgcgaggacggcgaatgcatttgcgacacgggctacagcggggacgactgcggcgtgcgcagctgccctggcgactgcaaccaaaggggccgctgcgaggacggccgctgcgtgtgctggccggggtacactggaaccgattgcggctcgcgcgcctgcccacgcgactgtagaggtcgcgggcgctgcgagaacggcgtgtgtgtttgcaatgcgggctacagcggcgaggactgcggtgtgcgcagctgtcctggggactgtcgtggccggggccgctgtgagagtggccgctgcatgtgttggccggggtacacaggccgggactgcggcacgcgcgcctgtcctggcgactgtcgcgggcgcgggcgctgcgtggatggccgctgcgtgtgcaacccgggcttcaccggtgaggactgtgggagccgtcgctgtcccggggactgccgtgggcacggcctttgcgaggatggcgtgtgcgtgtgtgacgcaggctactcaggggaagactgcagcacgcgcagctgccccgggggctgccgaggccgcggccagtgcctagatgggcggtgtgtgtgcgaggacggctactctggcgaggattgcggtgtgaggcagtgcccgaatgactgcagccagcacggcgtgtgccaggacggtgtgtgcatctgttgggaaggctacgtgagtgaggactgcagcatccgcacctgcccctccaactgccacgggaggggccgctgtgaggaagggcgctgcctgtgcgacccaggctacaccggccctacctgtgccacccgcatgtgcccggctgactgccggggacgtgggcggtgtgtgcaaggagtgtgcctgtgccacgtgggctatggcggtgaggactgcgggcaggaagagcctccagccagcgcctgccctggaggctgcgggccccgggaactgtgccgggcaggccagtgtgtgtgtgtagagggcttccgaggccctgactgtgccatccagacatgcccaggggactgccgtggccgaggagagtgtcacgatggcagctgtgtctgcaaagatgggtatgctggcgaagactgcggagaagaggtgccaaccattgagggcatgaggatgcatctcttggaggagacaacagttcggacagagtggaccccggctcctggccccgtggatgcctatgaaattcagttcatccccacgacagagggggcgagccccccattcacagcacgggttccaagctctgcctcagcctatgaccagagaggactggcccctggacaggagtaccaggtcactgtccgagcccttcgagggaccagctggggccttcctgcctccaagaccatcaccaccatgatcgatgggccccaggacctccgagtggtggctgtgacaccgacaacactggagcttggctggctgcgtccccaggctgaggtggaccgatttgtggtgtcctacgtcagtgccggcaaccagagggtgaggctggaagtgccccctgaagcagacgggacgctgctgactgacctgatgccaggcgtagaatatgtggtgactgtcacagcggagcggggccgggcagtcagctacccagcttctgtcagggccaacacagggtcctcacccttgggcctcttggggactaccgatgagcctcctccctcaggcccctcgacgacgcaaggggcccaggctcctctcctgcagcagcgcccccaggagctgggagagttgagggtgctgggcagagatgagacagggcgcctccgtgtggtctggaccgcccagcctgacacctttgcctacttccaactgcgcatgcgggtgcccgaggggccgggggcacatgaggaagtgctgccaggggacgtccgccaggctctggtgcctccaccccctcctggaaccccgtatgagctgtcacttcatggggtccctcctgggggcaagccctctgaccccatcatctaccaaggcattatggacaaggatgaggagaagcctgggaagtcctcaggcccaccacgcctgggtgagctgacggtgacagacaggacctccgactccttgctcctgcgctggacggtccccgagggcgagtttgactccttcgtgatccagtacaaagacagggacgggcagccccaggtggtgcccgtggaaggaccccagcgctcggccgtcatcacctccctggatcctggccgcaagtacaaatttgtcctgtatgggtttgttggcaagaagaggcatggtccgctggtggctgaagccaagatcttgcctcagagtgacccaagtccagggactccaccccacctgggaaacctgtgggtgacagaccctaccccagattcactgcacctctcctggactgtccctgagggccagtttgacaccttcatggtccagtacagggacagggatggacggccccaggtggtacctgtggaagggcccgagcgttcatttgttgtctcctcactggaccctgaccacaagtacagattcactctgtttggaattgcgaacaagaagcggtatggccccctcacggccgatggcaccactgctccagagaggaaagaggagcccccccgccctgagttcctggagcagcccctcctgggggaactgacagtgaccggcgtgaccccagactccttgcgtctctcatggacagtggcccagggccccttcgactcattcatggtccagtacaaggatgcacaggggcagccccaggcagtgcctgttgcgggggatgagaatgaggttactgtccccggcctggatcccgaccggaagtataagatgaacctctacgggcttcgtggcaggcagcgtgtggggcccgagtctgtggtggccaagactgctcctcaggaggatgtggacgagacccccagccccacagaactgggcacggaggccccggagtcccccgaggagccgctcctgggggagctgacagtgacaggatcctcccctgattcgctgagcctcttctggaccgtcccccagggcagcttcgactctttcaccgtgcagtacaaggacagggatgggcggccccgggcggtgcgtgttgggggcaaggagagtgaggtcaccgtgggaggcctagagcccgggcacaagtacaagatgcacctgtacggcctccacgaggggcagcgcgtgggcccggtgtccgccgtgggcgtgacagccccacaacaagaagagacccctccagccactgagtccccgctggagccacgcctaggagagctgacagtgacagatgtgacccccaactctgtgggcctctcctggacagtccccgagggccagtttgactccttcatagtccagtacaaggacaaggacgggcagccccaggtggtgccggtggcggcagaccagcgagaggtcacagtctacaacctggagcctgagagaaaatataagatgaacatgtatggactacatgatgggcaacgcatgggccccctgtctgtggtcatcgtgacggctcccctcccaccagccccagccacagaggcctccaagcctcccctggagccacgcctaggggagctgacagtgacggatataacccctgactctgtgggcctctcatggacagtccctgagggtgaattcgactcctttgtggttcagtacaaggacagggacgggcagccccaggtggtgcccgtggctgcagatcagcgggaggtcactatccctgacctggaaccctcccgcaagtacaagttcctgctctttgggatccaggatgggaaacgacgcagcccagtctctgtggaggcaaagacggttgcccgaggtgacgccagcccaggggccccaccccgccttggggagctgtgggtgacagaccccaccccagactcactgcgcctctcctggacggttcctgagggccagttcgactcttttgtggtccagttcaaggacaaagacgggccccaggtggtgcccgtggagggccatgagcgctctgtcactgtcacccctctggatgccggccgcaagtacagattcctcctctatggcctcctgggcaagaagcgccatggccctctcactgccgacggcaccacggaagcccggagtgctatggatgatactggaacaaagcgtcccccaaaaccccgtctgggggaggagctgcaggtgaccaccgtgacccagaactccgtgggcctctcctggacagtccctgagggccagtttgactcctttgtggtccagtacaaagacagggacgggcagccccaggtggtgcccgtggagggcagcctcagggaggtcagcgtgccgggcctggaccctgcccacaggtacaagctgctgctctacgggctgcaccacggcaagcgtgtgggccccatctcggccgtcgccattactgccggcagggaagaaacggaaactgagaccacggccccgacccctccagcgcctgagccccacctcggggagttgacagtggaggaggccacgtcacacaccctgcatctctcctggatggtgactgagggagaatttgactccttcgaaatccagtacacagatagagacgggcaactccaaatggtccgcataggaggtgaccggaatgacatcaccctctctggcctggaatccgaccacagatacctggtgaccctgtatggtttcagtgatgggaagcatgtaggtcctgtccatgtcgaggccctgacagtcccggaggaggagaagccttcagaacctcccaccgcaacccccgagccccccatcaagcctcgcctgggggagctgaccgtgacagatgccacccctgactccctcagcctgtcctggacagttcccgagggacagtttgaccacttcctggtccagtacaggaatggagatgggcagcccaaggcagtgagggtgccagggcacgaggaaggggtcaccatctcgggcctggagccagaccataaatacaagatgaacctgtacggcttccacggtggccagcgcatgggccctgtgtctgtcgtcggggtgacagctgcagaggaagagacccccagccccacagaacccagcatggaggccccggagcccgctgaggagccgctcctgggggagctaacagtgacaggatcctcccctgactcgctgagcctctcctggaccgtcccccagggccgcttcgactccttcaccgtgcagtacaaggacagggacgggcggccccaggtggtgcgtgttgggggcgaggagagtgaagtcaccgtggggggcctggagcctgggcgcaagtacaagatgcacctgtacggcctccacgaggggcggcgcgtgggcccagtgtctgctgtgggcgtcacggcccccgaagaggagtcccctgatgctcctcttgcaaagctgcgcctagggcagatgacagtgagagacatcacctccgactccctcagcctctcctggacagtccccgagggccagtttgaccatttcttggtccagtttaagaatggggacgggcagcccaaggcggtgcgggtgccgggacacgaggatggggtcaccatctcgggcctggagccagaccacaagtacaagatgaacctgtacggcttccacggtggccagcgcgtgggccccgtgtctgctgttggtttaactg

SEQ ID NO: 31286 - DNA, 2852 bp, Homo sapiens
  source 1..2852: mol_type = unassigned DNA
agctgactgtgacagatgcgacccctgactccgtgggcctctcgtggacggtccctgagggcgaattcgactccttcgtggtccagtacaaggataaggatggtcggctccaggtggtgccggtggcagccaaccagcgggaggtcacagtccagggcctggagcccagtaggaaatacaggttcctgctctatggtctgtcaggcaggaaacgactgggccccatctctgctgacagcaccacagctcccctggagaaggagctacctccccacctgggggaactgaccgtggctgaggagacctccagctctctgcgcctgtcctggacggtagcccagggcccctttgactccttcgtggtccagtacagggacacggacgggcagcccagggcagtgcctgtggccgcagaccagcgcacagtcaccgtagaggacctggagcctggcaagaaatacaagtttctgctctacgggctccttgggggaaagcgcctgggcccggtctctgccctgggaatgacagccccagaagaggacacaccagccccagagttagccccagaggcccctgagcctcctgaagagccccgcctaggagtgctgaccgtgaccgacacaaccccagactccatgcgcctctcgtggagcgtggcccagggcccctttgattccttcgtggtccagtatgaggacacgaacgggcagccccaggccttgctcgtggacggcgaccagagcaagatcctcatctcaggcctggagcccagcaccccctacaggttcctcctctatggcctccatgaagggaagcgcctggggcccctctcagctgagggcaccacagggctggctcctgctggtcagacctcagaggagtcaaggccccgcctgtcccagctgtctgtgactgacgtgaccaccagttcactgaggctcaactgggaggccccaccgggggccttcgactccttcctgctccgctttggggttccatcaccaagcacactggagccgcatccgcgtccactgctgcagcgcgagctgatggtgccggggacgcggcactcggccgtgctccgggacctgcgttccgggactctgtacagcctgacactgtatgggctgcgaggaccccacaaggccgacagcatccagggaaccgcccgcaccctcagcccagttctggagagcccccgtgacctccaattcagtgaaatcagggagacctcagccaaggtcaactggatgcccccaccatcccgggcggacagcttcaaagtctcctaccagctggcggacggaggggagcctcagagtgtgcaggtggatggccaggcccggacccagaaactccaggggctgatcccaggcgctcgctatgaggtgaccgtggtctcggtccgaggctttgaggagagtgagcctctcacaggcttcctcaccacggttcctgacggtcccacacagttgcgtgcactgaacttgaccgagggattcgccgtgctgcactggaagcccccccagaatcctgtagacacctatgacatccaggtcacagcccctggggccccgcctctgcaggcggagaccccaggcagcgcggtggactaccccctgcatgaccttgtcctccacaccaactacaccgccacagtgcgtggcctgcggggccccaacctcacttccccagccagcatcaccttcaccacagggctagaggcccctcgggacttggaggccaaggaagtgaccccccgcaccgccctgctcacttggactgagcccccagtccggcccgcaggctacctgctcagcttccacacccctggtggacagacccaggagatcctgctcccaggagggatcacatctcaccagctccttggcctctttccctccacctcctacaatgcacggctccaggccatgtggggccagagcctcctgccgcccgtgtccacctctttcaccacgggtgggctgcggatccccttccccagggactgcggggaggagatgcagaacggagccggtgcctccaggaccagcaccatcttcctcaacggcaaccgcgagcggcccctgatcgtgttttgcgacatggagactgatgggggcggctggctggtgttccagcgccgcatggatggacagacagacttctggagggactgggaggactatgcccatggttttgggaacatctctggagagttctggctgggcaatgaggccctgcacagcctgacacaggcaggtgactactccatgcgcgtggacctgcgggctggggacgaggctgtgttcgcccagtacgactccttccacgtagactcggctgcggagtactaccgcctccacttggagggctaccacggcaccgcaggggactccatgagctaccacagcggcagtgtcttctctgcccgtgatcgggaccccaacagcttgctcatctcctgcgctgtctcctaccgaggggcctggtggtacaggaactgccactacgccaacctcaacgggctctacgggagcacagtggaccatcagggagtgagctggtaccactggaagggcttcgagttctcggtgcccttcacggaaatgaagctgagaccaagaaactttcgctccccagcggggggaggctgagctgctgcccacctctctcgcaccccagtatgactgccgagcactgaggggtcgccccgagagaagagccagggtccttcaccacccagccgctggaggaagccttctctgccagcgatctcgcagcactgtgtttacaggggggaggggaggggttcgtacgggagcaataaaggagaaactgaggtacccggc

SEQ ID NO: 31287 - DNA, 651 bp, Homo sapiens
  source 1..651: mol_type = unassigned DNA
gccccaggaaaggatgaagaaatggccccagcctcgacagaacctcccacccctgaaccccccatcaagcctcgcctggaggagctgaccgtgacagatgcgacccctgactccctcagcctgtcctggacggttcccgagggacagtttgaccacttcctggtccagtacaagaatggggatgggcagcccaaggcaacacgggtgccaggacatgaggacagggtcaccatctccggcctggagccagacaacaagtacaagatgaacctgtacggcttccacggtggccagcgtgtgggccccgtgtctgccatcggggtgacagctgcagaggaagagacccccagccccacagaacccagcatggaggccccggagccccctgaggagccgctcctgggggagctaacagtgacaggatcctcccctgactcgctgagcctctcctggaccgtcccccagggccgcttcgactccttcaccgtgcagtacaaggacagggacgggcggccccaggtggtgcgtgttgggggcgaggagagcgaggtcaccgtggggggcctggagcctgggcgcaaatacaagatgcacctgtatggcctccacgaggggcggcgcgtgggcccggtgtccaccgtgggcgtgact

SEQ ID NO: 31288 - DNA, 13125 bp, Homo sapiens
  source 1..13125: mol_type = unassigned DNA
tcctccccttctcctcccctgctcgctgcagactccctcctcactgtcgctgccgagatccacagtcggttgtggctcagcccctgttgcaggggacaagtgagggagacttccctgtcctgccctgagacgccgccctcccggggttggggacagagcaggtgcagaggcactgcagctgctcggttgcccagcctcctgaatgatgccagcccagtatgctctaacctccagcctggttctcctggtgctgctgagcacagccagagcaggccccttctcttcacggtccaatgtgacactgccagccccccggccccctccccagccagggggccacacagtgggggctggagtgggaagcccctcttctcagctttacgagcacacagtggaaggaggggagaagcaggtggtattcacccaccgcattaacctgcccccttccactggctgtggctgtcccccaggcaccgagcccccagtccttgcttcagaggtacaggccctgagggtccgtctagagatcctggaggagttggtgaaggggctcaaggaacagtgcactgggggatgttgtcctgcctctgcccaagctggcacaggtcagacagatgtgcggaccctctgcagtctccatggtgtgtttgatctgagccgctgcacctgttcctgtgagccaggctggggtgggcccacctgctcagaccccacagatgctgagatccctccctcttccccaccctcagcctcggggtcctgcccagatgactgcaatgatcagggtcgctgtgtccgtggtcgttgcgtgtgctttcccggctacactggccccagctgtggctggccatcctgtcccggggactgccaaggccgtgggcgctgcgtgcagggcgtgtgtgtgtgccgggcaggcttctcaggccccgactgcagccagcgctcctgccctcgaggttgcagccagaggggacgctgtgagggtgggcgctgcgtgtgtgacccaggctacactggtgacgactgtggcatgaggagctgccctcgcggttgcagtcagagggggcgctgtgagaatgggcgctgcgtgtgtaaccccggctacactggcgaggactgtggggtgaggagctgccctcggggctgcagccagcggggacgctgcaaggacgggcgctgcgtgtgtgaccccggctacactggcgaggactgtggtacgcggagctgcccctgggactgtggcgagggcgggcgctgcgtggacggccgctgcgtgtgctggcccgggtacacaggcgaggactgcagcacgcggacatgtccgagggactgccggggccgcgggcgctgcgaggacggcgaatgcatttgcgacacgggctacagcggggacgactgcggcgtgcgcagctgccctggcgactgcaaccaaaggggccgctgcgaggacggccgctgcgtgtgctggccggggtacactggaaccgattgcggctcgcgcgcctgcccacgcgactgtagaggtcgcgggcgctgcgagaacggcgtgtgtgtttgcaatgcgggctacagcggcgaggactgcggtgtgcgcagctgtcctggggactgtcgtggccggggccgctgtgagagtggccgctgcatgtgttggccggggtacacaggccgggactgcggcacgcgcgcctgtcctggcgactgtcgcgggcgcgggcgctgcgtggatggccgctgcgtgtgcaacccgggcttcaccggtgaggactgtgggagccgtcgctgtcccggggactgccgtgggcacggcctttgcgaggatggcgtgtgcgtgtgtgacgcaggctactcaggggaagactgcagcacgcgcagctgccccgggggctgccgaggccgcggccagtgcctagatgggcggtgtgtgtgcgaggacggctactctggcgaggattgcggtgtgaggcagtgcccgaatgactgcagccagcacggcgtgtgccaggacggtgtgtgcatctgttgggaaggctacgtgagtgaggactgcagcatccgcacctgcccctccaactgccacgggaggggccgctgtgaggaagggcgctgcctgtgcgacccaggctacaccggccctacctgtgccacccgcatgtgcccggctgactgccggggacgtgggcggtgtgtgcaaggagtgtgcctgtgccacgtgggctatggcggtgaggactgcgggcaggaagagcctccagccagcgcctgccctggaggctgcgggccccgggaactgtgccgggcaggccagtgtgtgtgtgtagagggcttccgaggccctgactgtgccatccagacatgcccaggggactgccgtggccgaggagagtgtcacgatggcagctgtgtctgcaaagatgggtatgctggcgaagactgcggagaagaggtgccaaccattgagggcatgaggatgcatctcttggaggagacaacagttcggacagagtggaccccggctcctggccccgtggatgcctatgaaattcagttcatccccacgacagagggggcgagccccccattcacagcacgggttccaagctctgcctcagcctatgaccagagaggactggcccctggacaggagtaccaggtcactgtccgagcccttcgagggaccagctggggccttcctgcctccaagaccatcaccaccatgatcgatgggccccaggacctccgagtggtggctgtgacaccgacaacactggagcttggctggctgcgtccccaggctgaggtggaccgatttgtggtgtcctacgtcagtgccggcaaccagagggtgaggctggaagtgccccctgaagcagacgggacgctgctgactgacctgatgccaggcgtagaatatgtggtgactgtcacagcggagcggggccgggcagtcagctacccagcttctgtcagggccaacacagggtcctcacccttgggcctcttggggactaccgatgagcctcctccctcaggcccctcgacgacgcaaggggcccaggctcctctcctgcagcagcgcccccaggagctgggagagttgagggtgctgggcagagatgagacagggcgcctccgtgtggtctggaccgcccagcctgacacctttgcctacttccaactgcgcatgcgggtgcccgaggggccgggggcacatgaggaagtgctgccaggggacgtccgccaggctctggtgcctccaccccctcctggaaccccgtatgagctgtcacttcatggggtccctcctgggggcaagccctctgaccccatcatctaccaaggcattatggacaaggatgaggagaagcctgggaagtcctcaggcccaccacgcctgggtgagctgacggtgacagacaggacctccgactccttgctcctgcgctggacggtccccgagggcgagtttgactccttcgtgatccagtacaaagacagggacgggcagccccaggtggtgcccgtggaaggaccccagcgctcggccgtcatcacctccctggatcctggccgcaagtacaaatttgtcctgtatgggtttgttggcaagaagaggcatggtccgctggtggctgaagccaagatcttgcctcagagtgacccaagtccagggactccaccccgcctgggaaacctgtgggtgacagaccctaccccagattcactgcacctctcctggactgtccctgagggccagtttgacaccttcatggtccagtacagggacagggatggacggccccaggtggtacctgtggaagggcccgagcgttcatttgttgtctcctcactggaccctgaccacaagtacagattcactctgtttggaattgcgaacaagaagcggtatggccccctcacggccgatggcaccactgctccagagaggaaagaggagcccccccgccctgagttcctggagcagcccctcctgggggaactgacagtgaccggcgtgaccccagactccttgcgtctctcatggacagtggcccagggccccttcgactcattcatggtccagtacaaggatgcacaggggcagccccaggcagtgcctgttgcgggggatgagaatgaggttactgtccccggcctggatcccgaccggaagtataagatgaacctctacgggcttcgtggcaggcagcgtgtggggcccgagtctgtggtggccaagactgctcctcaggaggatgtggacgagacccccagccccacagaactgggcacggaggccccggagtcccccgaggagccgctcctgggggagctgacagtgacaggatcctcccctgattcgctgagcctcttctggaccgtcccccagggcagcttcgactctttcaccgtgcagtacaaggacagggatgggcggccccgggcggtgcgtgttgggggcaaggagagtgaggtcaccgtgggaggcctagagcccgggcacaagtacaagatgcacctgtacggcctccacgaggggcagcgcgtgggcccggtgtccgccgtgggcgtgacagccccacaacaagaagagacccctccagccactgagtccccgctggagccacgcctaggagagctgacagtgacagatgtgacccccaactctgtgggcctctcctggacagtccccgagggccagtttgactccttcatagtccagtacaaggacaaggacgggcagccccaggtggtgccggtggcggcagaccagcgagaggtcacagtctacaacctggagcctgagagaaaatataagatgaacatgtatggactacatgatgggcaacgcatgggccccctgtctgtggtcatcgtgacggctcccctcccaccagccccagccacagaggcctccaagcctcccctggagccacgcctaggggagctgacagtgacggatataacccctgactctgtgggcctctcatggacagtccctgagggtgaattcgactcctttgtggttcagtacaaggacagggacgggcagccccaggtggtgcccgtggctgcagatcagcgggaggtcactatccctgacctggaaccctcccgcaagtacaagttcctgctctttgggatccaggatgggaaacgacgcagcccagtctctgtggaggcaaagacggttgcccgaggtgacgccagcccaggggccccaccccgccttggggagctgtgggtgacagaccccaccccagactcactgcgcctctcctggacggttcctgagggccagttcgactcttttgtggtccagttcaaggacaaagacgggccccaggtggtgcccgtggagggccatgagcgctctgtcactgtcacccctctggatgccggccgcaagtacagattcctcctctatggcctcctgggcaagaagcgccatggccctctcactgccgacggcaccacggaagcccggagtgctatggatgatactggaacaaagcgtcccccaaaaccccgtctgggggaggagctgcaggtgaccaccgtgacccagaactccgtgggcctctcctggacagtccctgagggccagtttgactcctttgtggtccagtacaaagacagggacgggcagccccaggtggtgcccgtggagggcagcctcagggaggtcagcgtgccgggcctggaccctgcccacaggtacaagctgctgctctacgggctgcaccacggcaagcgtgtgggccccatctcggccgtcgccattactgccggcagggaagaaacggaaactgagaccacggccccgacccctccagcgcctgagccccacctcggggagttgacagtggaggaggccacgtcacacaccctgcatctctcctggatggtgactgagggagaatttgactccttcgaaatccagtacacagatagagacgggcaactccaaatggtccgcataggaggtgaccggaatgacatcaccctctctggcctggaatccgaccacagatacctggtgaccctgtatggtttcagtgatgggaagcatgtaggtcctgtccatgtcgaggccctgacagtcccggaggaggagaagccttcagaacctcccaccgcaacccccgagccccccatcaagcctcgcctgggggagctgaccgtgacagatgccacccctgactccctcagcctgtcctggacagttcccgagggacagtttgaccacttcctggtccagtacaggaatggagatgggcagcccaaggcagtgagggtgccagggcacgaggaaggggtcaccatctcgggcctggagccagaccataaatacaagatgaacctgtacggcttccacggtggccagcgcatgggccctgtgtctgtcgtcggggtgacagctgcagaggaagagacccccagccccacagaacccagcatggaggccccggagcccgctgaggagccgctcctgggggagctaacagtgacaggatcctcccctgactcgctgagcctctcctggaccgtcccccagggccgcttcgactccttcaccgtgcagtacaaggacagggacgggcggccccaggtggtgcgtgttgggggcgaggagagtgaagtcaccgtggggggcctggagcctgggcgcaagtacaagatgcacctgtacggcctccacgaggggcggcgcgtgggcccagtgtctgctgtgggcgtcacggcccccgaagaggagtcccctgatgctcctcttgcaaagctgcgcctagggcagatgacagtgagagacatcacctccgactccctcagcctctcctggacagtccccgagggccagtttgaccatttcttggtccagtttaagaatggggatgggcagcccaaggcggtgcgggtgccgggacacgaggatggggtcaccatctcgggcctggagccagaccacaagtacaagatgaacctgtacggcttccacggtggccagcgcgtgggccccgtgtctgctgttggtttaactgccccaggaaaggatgaagaaatggccccagcctcgacagaacctcccacccctgaaccccccatcaagcctcgcctggaggagctgaccgtgacagatgcgacccctgactccctcagcctgtcctggacggttcccgagggacagtttgaccacttcctggtccagtacaagaatggggatgggcagcccaaggcaacacgggtgccaggacatgaggacagggtcaccatctccggcctggagccagacaacaagtacaagatgaacctgtacggcttccacggtggccagcgtgtgggccccgtgtctgccatcggggtgacagctgcagaggaagagacccccagccccacagaacccagcatggaggccccggagccccctgaggagccgctcctgggggagctgacagtgacaggatcctcccctgactcgctgagcctctcctggaccgtcccccagggccgcttcgactccttcaccgtgcagtacaaggacagggacgggcggccccaggtggtgcgtgttgggggcgaggagagcgaggtcaccgtggggggcctggagcctgggcgcaaatacaagatgcacctgtacggcctccacgaggggcggcgcgtgggcccggtgtccaccgtgggcgtgactgccccacaagaggatgtggacgagacccccagccctacagaaccaggcacagaggccccagagccccccgaggagcctctcctgggggagctgacagtgacaggatcctcccctgactcgctgagcctttcctggaccgtcccccagggccgctttgactccttcaccgtgcagtacaaggacagggacgggcggccccaggcggtgcgtgttgggggccaggagagcaaggtcactgtgaggggcctggagcctgggcgcaagtacaagatgcacctgtacggcctccacgaggggcggcgcctgggcccggtgtctgccgtgggcgtcacagaggatgaagccgagaccacccaagcagtgcctaccatgacccctgagccccccatcaagcctcgcctgggggagctgaccatgacagatgccacccctgactccctcagcctgtcctggacggttcccgagggccagtttgaccacttcctggtccagtacaggaatggggatgggcagcccaaggcggtgcgggtgccggggcacgaggacggggtcaccatctcaggcctggagccagaccataaatacaagatgaacctgtacggcttccacggtggccagcgcgtgggccccatctctgtcattggggtgacggctgcagaggaagagacccccagccccacggaactcagcactgaggccccggagccccctgaggagccgctcctgggggagctgacagtgacaggatcctcccctgactcgctgagcctctcctggaccatcccccagggccacttcgactccttcaccgtgcagtacaaggacagggacgggcggccccaggtgatgcgtgtcaggggcgaggagagcgaggtcaccgtggggggcctggagcccgggcgcaaatacaagatgcacctgtacggcctccacgaggggcggcgtgtgggcccggtgtccaccgtgggtgtgacagaggatgaagcagagaccacccaagcagtgcccaccacaacccctgagccccccaacaagcctcgcctcggggagctgaccgtgacagatgccacccctgactccctcagcctgtcctggatggtccccgagggccagtttgaccacttcctggtccagtacaggaatggggatgggcagcccaaggtggtgcgggtgccggggcacgaggacggggtcaccatctcaggcctggagccagaccacaagtacaagatgaacctgtacggcttccacggtggccagcgcgtgggccccatctctgtcattggggtgacagctgcagaggaagaaactcccgcccccacagaacccagcacggaggccccggagccccctgaggagccgctcctgggggagctgacagtgacaggatcctcccctgactcgctgagcctctcctggaccatcccccagggccgcttcgactccttcactgtgcagtacaaggacagggacgggcggccccaggtggtgcgtgtcaggggcgaggagagcgaggtcaccgtggggggcctggagcccgggtgcaaatacaagatgcacctgtacggcctccacgaggggcagcgcgtgggcccagtgtccgctgtgggtgtgacagctccaaaggatgaagccgagaccacccaagcagtgcctaccatgacccctgagccccccatcaagcctcgcctgggggagctgaccgtgacagatgccacccccgactccctcagcctgtcctggatggttcccgagggccagtttgaccacttcctggtccagtacaggaatggggatgggcagcccaaggcggtgcgggtgccggggcacgaggacggggtcaccatctcaggcctggagccagaccataaatacaagatgaacctgtacggcttccacggtggccagcgcgtaggccctgtgtctgccattggggtgacggaggaagagacccccagccccacagaacccagcactgaggccccggaggcccctgaggagccgctcctgggggagttgacagtgacaggatcctcccctgactcgctgagcctctcctggaccgtcccccagggccgcttcgactccttcaccgtgcagtacaaggacagggacgggcagccccaggtggtgcgtgtcaggggcgaggagagcgaggtcaccgtggggggcctggagcccgggcgcaaatacaagatgcatctgtacggcctccacgaggggcagcgcgtgggcccagtgtccaccgtgggcatcacggcgcccctgcccacaccactgccggtggagccccgcctgggggagctggcggtggcggccgtgacctcggactcagtgggcctctcatggacggtggcccagggcccctttgactccttcctggtacagtacagggacgcgcaggggcagccccaggcagtgcctgtgagcggagacctccgagcggtcgccgtctcggggctggacccggcccgcaagtacaagttcctgctctttggactccagaatgggaaacgccacggcccagtccctgtggaggccaggaccgccccagacaccaaaccgtctccccgcctgggggagctgactgtgacagatgcgacccctgactccgtgggcctctcgtggacggtccctgagggcgaattcgactccttcgtggtccagtacaaggataaggatggtcggctccaggtggtgccggtggcagccaaccagcgggaggtcacagtccagggcctggagcccagtaggaaatacaggttcctgctctatggtctgtcaggcaggaaacgactgggccccatctctgctgacagcaccacagctcccctggagaaggagctacctccccacctgggggaactgaccgtggctgaggagacctccagctctctgcgcctgtcctggacggtagcccagggcccctttgactccttcgtggtccagtacagggacacggacgggcagcccagggcagtgcctgtggccgcagaccagcgcacagtcaccgtagaggacctggagcctggcaagaaatacaagtttctgctctacgggctccttgggggaaagcgcctgggcccggtctctgccctgggaatgacagccccagaagaggacacaccagccccagagttagccccagaggcccctgagcctcctgaagagccccgcctaggagtgctgaccgtgaccgacacaaccccagactccatgcgcctctcgtggagcgtggcccagggcccctttgattccttcgtggtccagtatgaggacacgaacgggcagccccaggccttgctcgtggacggcgaccagagcaagatcctcatctcaggcctggagcccagcaccccctacaggttcctcctctatggcctccatgaagggaagcgcctggggcccctctcagctgagggcaccacagggctggctcctgctggtcagacctcagaggagtcaaggccccgcctgtcccagctgtctgtgactgacgtgaccaccagttcactgaggctcaactgggaggccccaccgggggccttcgactccttcctgctccgctttggggttccatcaccaagcacactggagccgcatccgcgtccactgctgcagcgcgagctgatggtgccggggacgcggcactcggccgtgctccgggacctgcgttccgggactctgtacagcctgacactgtatgggctgcgaggaccccacaaggccgacagcatccagggaaccgcccgcaccctcagcccagttctggagagcccccgtgacctccaattcagtgaaatcagggagacctcagccaaggtcaactggatgcccccaccatcccgggcggacagcttcaaagtctcctaccagctggcggacggaggggagcctcagagtgtgcaggtggatggccaggcccggacccagaaactccaggggctgatcccaggcgctcgctatgaggtgaccgtggtctcggtccgaggctttgaggagagtgagcctctcacaggcttcctcaccacggttcctgacggtcccacacagttgcgtgcactgaacttgaccgagggattcgccgtgctgcactggaagcccccccagaatcctgtagacacctatgacatccaggtcacagcccctggggccccgcctctgcaggcggagaccccaggcagcgcggtggactaccccctgcatgaccttgtcctccacaccaactacaccgccacagtgcgtggcctgcggggccccaacctcacttccccagccagcatcaccttcaccacagggctagaggcccctcgggacttggaggccaaggaagtgaccccccgcaccgccctgctcacttggactgagcccccagtccggcccgcaggctacctgctcagcttccacacccctggtggacagacccaggagatcctgctcccaggagggatcacatctcaccagctccttggcctctttccctccacctcctacaatgcacggctccaggccatgtggggccagagcctcctgccgcccgtgtccacctctttcaccacgggtgggctgcggatccccttccccagggactgcggggaggagatgcagaacggagccggtgcctccaggaccagcaccatcttcctcaacggcaaccgcgagcggcccctgatcgtgttttgcgacatggagactgatgggggcggctggctggtgttccagcgccgcatggatggacagacagacttctggagggactgggaggactatgcccatggttttgggaacatctctggagagttctggctgggcaatgaggccctgcacagcctgacacaggcaggtgactactccatgcgcgtggacctgcgggctggggacgaggctgtgttcgcccagtacgactccttccacgtagactcggctgcggagtactaccgcctccacttggagggctaccacggcaccgcaggggactccatgagctaccacagcggcagtgtcttctctgcccgtgatcgggaccccaacagcttgctcatctcctgcgctgtctcctaccgaggggcctggtggtacaggaactgccactacgccaacctcaacgggctctacgggagcacagtggaccatcagggagtgagctggtaccactggaagggcttcgagttctcggtgcccttcacggaaatgaagctgagaccaagaaactttcgctccccagcggggggaggctgagctgctgcccacctctctcgcaccccagtatgactgccgagcactgaggggtcgccccgagagaagagccagggtccttcaccacccagccgctggaggaagccttctctgccagcgatctcgcagcactgtgtttacaggggggaggggaggggttcgtacgggagcaataaaggagaaactgaggtacccgg

SEQ ID NO: 31289 - DNA, 13125 bp, Homo sapiens
  source 1..13125: mol_type = unassigned DNA
tcctccccttctcctcccctgctcgctgcagactccctcctcactgtcgctgccgagatccacagtcggttgtggctcagcccctgttgcaggggacaagtgagggagacttccctgtcctgccctgagacgccgccctcccggggttggggacagagcaggtgcagaggcactgcagctgctcggttgcccagcctcctgaatgatgccagcccagtatgctctaacctccagcctggttctcctggtgctgctgagcacagccagagcaggccccttctcttcacggtccaatgtgacactgccagccccccggccccctccccagccagggggccacacagtgggggctggagtgggaagcccctcttctcagctttacgagcacacagtggaaggaggggagaagcaggtggtattcacccaccgcattaacctgcccccttccactggctgtggctgtcccccaggcaccgagcccccagtccttgcttcagaggtacaggccctgagggtccgtctagagatcctggaggagttggtgaaggggctcaaggaacagtgcactgggggatgttgtcctgcctctgcccaagctggcacaggtcagacagatgtgcggaccctctgcagtctccatggtgtgtttgatctgagccgctgcacctgttcctgtgagccaggctggggtgggcccacctgctcagaccccacagatgctgagatccctccctcttccccaccctcagcctcggggtcctgcccagatgactgcaatgatcagggtcgctgtgtccgtggtcgttgcgtgtgctttcccggctacactggccccagctgtggctggccatcctgtcccggggactgccaaggccgtgggcgctgcgtgcagggcgtgtgtgtgtgccgggcaggcttctcaggccccgactgcagccagcgctcctgccctcgaggttgcagccagaggggacgctgtgagggtgggcgctgcgtgtgtgacccaggctacactggtgacgactgtggcatgaggagctgccctcgcggttgcagtcagagggggcgctgtgagaatgggcgctgcgtgtgtaaccccggctacgctggcgaggactgtggggtgaggagctgccctcggggctgcagccagcggggacgctgcaaggacgggcgctgcgtgtgtgaccccggctacactggcgaggactgtggtacgcggagctgcccctgggactgtggcgagggcgggcgctgcgtggacggccgctgcgtgtgctggcccgggtacacaggcgaggactgcagcacgcggacatgtccgagggactgccggggccgcgggcgctgcgaggacggcgaatgcatttgcgacacgggctacagcggggacgactgcggcgtgcgcagctgccctggcgactgcaaccaaaggggccgctgcgaggacggccgctgcgtgtgctggccggggtacactggaaccgattgcggctcgcgcgcctgcccacgcgactgtagaggtcgcgggcgctgcgagaacggcgtgtgtgtttgcaatgcgggctacagcggcgaggactgcggtgtgcgcagctgtcctggggactgtcgtggccggggccgctgtgagagtggccgctgcatgtgttggccggggtacacaggccgggactgcggcacgcgcgcctgtcctggcgactgtcgcgggcgcgggcgctgcgtggatggccgctgcgtgtgcaacccgggcttcaccggtgaggactgtgggagccgtcgctgtcccggggactgccgtgggcacggcctttgcgaggatggcgtgtgcgtgtgtgacgcaggctactcaggggaagactgcagcacgcgcagctgccccgggggctgccgaggccgcggccagtgcctagatgggcggtgtgtgtgcgaggacggctactctggcgaggattgcggtgtgaggcagtgcccgaatgactgcagccagcacggcgtgtgccaggacggtgtgtgcatctgttgggaaggctacgtgagtgaggactgcagcatccgcacctgcccctccaactgccacgggaggggccgctgtgaggaagggcgctgcctgtgcgacccaggctacaccggccctacctgtgccacccgcatgtgcccggctgactgccggggacgtgggcggtgtgtgcaaggagtgtgcctgtgccacgtgggctatggcggtgaggactgcgggcaggaagagcctccagccagcgcctgccctggaggctgcgggccccgggaactgtgccgggcaggccagtgtgtgtgtgtagagggcttccgaggccctgactgtgccatccagacatgcccaggggactgccgtggccgaggagagtgtcacgatggcagctgtgtctgcaaagatgggtatgctggcgaagactgcggagaagaggtgccaaccattgagggcatgaggatgcatctcttggaggagacaacagttcggacagagtggaccccggctcctggccccgtggatgcctatgaaattcagttcatccccacgacagagggggcgagccccccattcacagcacgggttccaagctctgcctcagcctatgaccagagaggactggcccctggacaggagtaccaggtcactgtccgagcccttcgagggaccagctggggccttcctgcctccaagaccatcaccaccatgatcgatgggccccaggacctccgagtggtggctgtgacaccgacaacactggagcttggctggctgcgtccccaggctgaggtggaccgatttgtggtgtcctacgtcagtgccggcaaccagagggtgaggctggaagtgccccctgaagcagacgggacgctgctgactgacctgatgccaggcgtagaatatgtggtgactgtcacagcggagcggggccgggcagtcagctacccagcttctgtcagggccaacacagggtcctcacccttgggcctcttggggactaccgatgagcctcctccctcaggcccctcgacgacgcaaggggcccaggctcctctcctgcagcagcgcccccaggagctgggagagttgagggtgctgggcagagatgagacagggcgcctccgtgtggtctggaccgcccagcctgacacctttgcctacttccaactgcgcatgcgggtgcccgaggggccgggggcacatgaggaagtgctgccaggggacgtccgccaggctctggtgcctccaccccctcctggaaccccgtatgagctgtcacttcatggggtccctcctgggggcaagccctctgaccccatcatctaccaaggcattatggacaaggatgaggagaagcctgggaagtcctcaggcccaccacgcctgggtgagctgacggtgacagacaggacctccgactccttgctcctgcgctggacggtccccgagggcgagtttgactccttcgtgatccagtacaaagacagggacgggcagccccaggtggtgcccgtggaaggaccccagcgctcggccgtcatcacctccctggatcctggccgcaagtacaaatttgtcctgtatgggtttgttggcaagaagaggcatggtccgctggtggctgaagccaagatcttgcctcagagtgacccaagtccagggactccaccccacctgggaaacctgtgggtgacagaccctaccccagattcactgcacctctcctggactgtccctgagggccagtttgacaccttcatggtccagtacagggacagggatggacggccccaggtggtacctgtggaagggcccgagcgttcatttgttgtctcctcactggaccctgaccacaagtacagattcactctgtttggaattgcgaacaagaagcggtatggccccctcacggccgatggcaccactgctccagagaggaaagaggagcccccccgccctgagttcctggagcagcccctcctgggggaactgacagtgaccggcgtgaccccagactccttgcgtctctcatggacagtggcccagggccccttcgactcattcatggtccagtacaaggatgcacaggggcagccccaggcagtgcctgttgcgggggatgagaatgaggttactgtccccggcctggatcccgaccggaagtataagatgaacctctacgggcttcgtggcaggcagcgtgtggggcccgagtctgtggtggccaagactgctcctcaggaggatgtggacgagacccccagccccacagaactgggcacggaggccccggagtcccccgaggagccgctcctgggggagctgacagtgacaggatcctcccctgattcgctgagcctcttctggaccgtcccccagggcagcttcgactctttcaccgtgcagtacaaggacagggatgggcggccccgggcggtgcgtgttgggggcaaggagagtgaggtcaccgtgggaggcctagagcccgggcacaagtacaagatgcacctgtacggcctccacgaggggcagcgcgtgggcccggtgtccgccgtgggcgtgacagccccacaacaagaagagacccctccagccactgagtccccgctggagccacgcctaggagagctgacagtgacagatgtgacccccaactctgtgggcctctcctggacagtccccgagggccagtttgactccttcatagtccagtacaaggacaaggacgggcagccccaggtggtgccggtggcggcagaccagcgagaggtcacagtctacaacctggagcctgagagaaaatataagatgaacatgtatggactacatgatgggcaacgcatgggccccctgtctgtggtcatcgtgacggctcccctcccaccagccccagccacagaggcctccaagcctcccctggagccacgcctaggggagctgacagtgacggatataacccctgactctgtgggcctctcatggacagtccctgagggtgaattcgactcctttgtggttcagtacaaggacagggacgggcagccccaggtggtgcccgtggctgcagatcagcgggaggtcactatccctgacctggaaccctcccgcaagtacaagttcctgctctttgggatccaggatgggaaacgacgcagcccagtctctgtggaggcaaagacggttgcccgaggtgacgccagcccaggggccccaccccgccttggggagctgtgggtgacagaccccaccccagactcactgcgcctctcctggacggttcctgagggccagttcgactcttttgtggtccagttcaaggacaaagacgggccccaggtggtgcccgtggagggccatgagcgctctgtcactgtcacccctctggatgccggccgcaagtacagattcctcctctatggcctcctgggcaagaagcgccatggccctctcactgccgacggcaccacggaagcccggagtgctatggatgatactggaacaaagcgtcccccaaaaccccgtctgggggaggagctgcaggtgaccaccgtgacccagaactccgtgggcctctcctggacagtccctgagggccagtttgactcctttgtggtccagtacaaagacagggacgggcagccccaggtggtgcccgtggagggcagcctcagggaggtcagcgtgccgggcctggaccctgcccacaggtacaagctgctgctctacgggctgcaccacggcaagcgtgtgggccccatctcggccgtcgccattactgccggcagggaagaaacggaaactgagaccacggccccgacccctccagcgcctgagccccacctcggggagttgacagtggaggaggccacgtcacacaccctgcatctctcctggatggtgactgagggagaatttgactccttcgaaatccagtacacagatagagacgggcaactccaaatggtccgcataggaggtgaccggaatgacatcaccctctctggcctggaatccgaccacagatacctggtgaccctgtatggtttcagtgatgggaagcatgtaggtcctgtccatgtcgaggccctgacagtcccggaggaggagaagccttcagaacctcccaccgcaacccccgagccccccatcaagcctcgcctgggggagctgaccgtgacagatgccacccctgactccctcagcctgtcctggacagttcccgagggacagtttgaccacttcctggtccagtacaggaatggagatgggcagcccaaggcagtgagggtgccagggcacgaggaaggggtcaccatctcgggcctggagccagaccataaatacaagatgaacctgtacggcttccacggtggccagcgcatgggccctgtgtctgtcgtcggggtgacagctgcagaggaagagacccccagccccacagaacccagcatggaggccccggagcccgctgaggagccactcctgggggagctaacagtgacaggatcctcccctgactcgctgagcctctcctggaccgtcccccagggccgcttcgactccttcaccgtgcagtacaaggacagggacgggcggccccaggtggtgcgtgttgggggcgaggagagtgaagtcaccgtggggggcctggagcctgggcgcaagtacaagatgcacctgtacggcctccacgaggggcggcgcgtgggcccagtgtctgctgtgggcgtcacggcccccgaagaggagtcccctgatgctcctcttgcaaagctgcgcctagggcagatgacagtgagagacatcacctccgactccctcagcctctcctggacagtccccgagggccagtttgaccatttcttggtccagtttaagaatggggacgggcagcccaaggcggtgcgggtgccgggacacgaggatggggtcaccatctcgggcctggagccagaccacaagtacaagatgaacctgtacggcttccacggtggccagcgcgtgggccccgtgtctgctgttggtttaactgccccaggaaaggatgaagaaatggccccagcctcgacagaacctcccacccctgaaccccccatcaagcctcgcctggaggagctgaccgtgacagatgcgacccctgactccctcagcctgtcctggacggttcccgagggacagtttgaccacttcctggtccagtacaagaatggggatgggcagcccaaggcaacacgggtgccaggacatgaggacagggtcaccatctccggcctggagccagacaacaagtacaagatgaacctgtacggcttccacggtggccagcgtgtgggccccgtgtctgccatcggggtgacagctgcagaggaagagacccccagccccacagaacccagcatggaggccccggagccccctgaggagccgctcctgggggagctaacagtgacaggatcctcccctgactcgctgagcctctcctggaccgtcccccagggccgcttcgactccttcaccgtgcagtacaaggacagggacgggcggccccaggtggtgcgtgttgggggcgaggagagcgaggtcaccgtggggggcctggagcctgggcgcaaatacaagatgcacctgtacggcctccacgaggggcggcgtgtgggcccggtgtccaccgtgggcgtgactgccccacaagaggatgtggacgagacccccagccctacagaaccaggcacagaggccccagagccccccgaggagcctctcctgggggagctgacagtgacaggatcctcccctgactcgctgagcctttcctggaccgtcccccagggccgctttgactccttcaccgtgcagtacaaggacagggacgggcggccccaggcggtgcgtgttgggggccaggagagcaaggtcactgtgaggggcctggagcctgggcgcaagtacaagatgcacctgtacggcctccacgaggggcggcgcctaggcccggtgtctgccgtgggcgtcacagaggatgaagccgagaccacccaagcagtgcctaccatgacccctgagccccccatcaagcctcgcctgggggagctgaccatgacagatgccacccctgactccctcagcctgtcctggacggttcccgagggccagtttgaccacttcctggtccagtacaggaatggggatgggcagcccaaggcggtgcgggtgccggggcacgaggacggggtcaccatctcaggcctggagccagaccataaatacaagatgaacctgtacggcttccacggtggccagcgcgtgggccccatctctgtcattggggtgacggctgcagaggaagagacccccagccccacggaactcagcactgaggccccggagccccctgaggagccgctcctgggggagctgacagtgacaggatcctcccctgactcgctgagcctctcctggaccatcccccagggccacttcgactccttcaccgtgcagtacaaggacagggacgggcggccccaggtgatgcgtgtcaggggcgaggagagcgaggtcaccgtggggggcctggagcccgggcgcaaatacaagatgcacctgtacggcctccacgaggggcggcgtgtgggcccggtgtccaccgtgggtgtgacagaggatgaagcagagaccacccaagcagtgcccaccacaacccctgagccccccaacaagcctcgcctcggggagctgaccgtgacagatgccacccctgactccctcagcctgtcctggatggtccccgagggccagtttgaccacttcctggtccagtacaggaatggggatgggcagcccaaggtggtgcgggtgccggggcacgaggacggggtcaccatctcaggcctggagccagaccacaagtacaagatgaacctgtacggcttccacggtggccagcgcgtgggccccatctctgtcattggggtgacagctgcagaggaagaaactcccgcccccacagaacccagcacggaggccccggagccccctgaggagccgctcctgggggagctgacagtgacaggatcctcccctgactcgctgagcctctcctggaccatcccccagggccgcttcgactccttcactgtgcagtacaaggacagggacgggcggccccaggtggtgcgtgtcaggggcgaggagagcgaggtcaccgtggggggcctggagcccgggtgcaaatacaagatgcacctgtacggcctccacgaggggcagcgcgtgggcccagtgtccgctgtgggtgtgacagctccaaaggatgaagccgagaccacccaagcagtgcctaccatgacccctgagccccccatcaagcctcgcctgggggagctgaccgtgacagatgccacccccgactccctcagcctgtcctggatggttcccgagggccagtttgaccacttcctggtccagtacaggaatggggatgggcagcccaaggcggtgcgggtgccggggcacgaggacggggtcaccatctcaggcctggagccagaccataaatacaagatgaacctgtacggcttccacggtggccagcgcgtaggccctgtgtctgccattggggtgacggaggaagagacccccagccccacagaacccagcactgaggccccggaggcccctgaggagccgctcctgggggagttgacagtgacaggatcctcccctgactcgctgagcctctcctggaccgtcccccagggccgcttcgactccttcaccgtgcagtacaaggacagggacgggcagccccaggtggtgcgtgtcaggggcgaggagagcgaggtcaccgtggggggcctggagcccgggcgcaaatacaagatgcatctgtacggcctccacgaggggcagcgcgtgggcccagtgtccaccgtgggcatcacggcgcccctgcccacaccactgccggtggagccccgcctgggggagctggcggtggcggccgtgacctcggactcagtgggcctctcatggacggtggcccagggcccctttgactccttcctggtacagtacagggacgcgcaggggcagccccaggcagtgcctgtgagcggagacctccgagcggtcgccgtctcggggctggacccggcccgcaagtacaagttcctgctctttggactccagaatgggaaacgccacggcccagtccctgtggaggccaggaccgccccagacaccaaaccgtctccccgcctgggggagctgactgtgacagatgcgacccctgactccgtgggcctctcgtggacggtccctgagggcgaattcgactccttcgtggtccagtacaaggataaggatggtcggctccaggtggtgccggtggcagccaaccagcgggaggtcacagtccagggcctggagcccagtaggaaatacaggttcctgctctatggtctgtcaggcaggaaacgactgggccccatctctgctgacagcaccacagctcccctggagaaggagctacctccccacctgggggaactgaccgtggctgaggagacctccagctctctgcgcctgtcctggacggtagcccagggcccctttgactccttcgtggtccagtacagggacacggacgggcagcccagggcagtgcctgtggccgcagaccagcgcacagtcaccgtagaggacctggagcctggcaagaaatacaagtttctgctctacgggctccttgggggaaagcgcctgggcccggtctctgccctgggaatgacagccccagaagaggacacaccagccccagagttagccccagaggcccctgagcctcctgaagagccccgcctaggagtgctgaccgtgaccgacacaaccccagactccatgcgcctctcgtggagcgtggcccagggcccctttgattccttcgtggtccagtatgaggacacgaacgggcagccccaggccttgctcgtggacggcgaccagagcaagatcctcatctcaggcctggagcccagcaccccctacaggttcctcctctatggcctccatgaagggaagcgcctggggcccctctcagctgagggcaccacagggctggctcctgctggtcagacctcagaggagtcaaggccccgcctgtcccagctgtctgtgactgacgtgaccaccagttcactgaggctcaactgggaggccccaccgggggccttcgactccttcctgctccgctttggggttccatcaccaagcactctggagccgcatccgcgtccactgctgcagcgcgagctgatggtgccggggacgcggcactcggccgtgctccgggacctgcgttccgggactctgtacagcctgacactgtatgggctgcgaggaccccacaaggccgacagcatccagggaaccgcccgcaccctcagcccagttctggagagcccccgtgacctccaattcagtgaaatcagggagacctcagccaaggtcaactggatgcccccaccatcccgggcggacagcttcaaagtctcctaccagctggcggacggaggggagcctcagagtgtgcaggtggatggccaggcccggacccagaaactccaggggctgatcccaggcgctcgctatgaggtgaccgtggtctcggtccgaggctttgaggagagtgagcctctcacaggcttcctcaccacggttcctgacggtcccacacagttgcgtgcactgaacttgaccgagggattcgccgtgctgcactggaagcccccccagaatcctgtggacacctatgacgtccaggtcacagcccctggggccccgcctctgcaggcggagaccccaggcagcgcggtggactaccccctgcatgaccttgtcctccacaccaactacaccgccacagtgcgtggcctgcggggccccaacctcacttccccagccagcatcaccttcaccacagggctagaggcccctcgggacttggaggccaaggaagtgaccccccgcaccgccctgctcacttggactgagcccccagtccggcccgcaggctacctgctcagcttccacacccctggtggacagaaccaggagatcctgctcccaggagggatcacatctcaccagctccttggcctctttccctccacctcctacaatgcacggctccaggccatgtggggccagagcctcctgccgcccgtgtccacctctttcaccacgggtgggctgcggatccccttccccagggactgcggggaggagatgcagaacggagccggtgcctccaggaccagcaccatcttcctcaacggcaaccgcgagcggcccctgaacgtgttttgcgacatggagactgatgggggcggctggctggtgttccagcgccgcatggatggacagacagacttctggagggactgggaggactatgcccatggttttgggaacatctctggagagttctggctgggcaatgaggccctgcacagcctgacacaggcaggtgactactccatgcgcgtggacctgcgggctggggacgaggctgtgttcgcccagtacgactccttccacgtagactcggctgcggagtactaccgcctccacttggagggctaccacggcaccgcaggggactccatgagctaccacagcggcagtgtcttctctgcccgtgatcgggaccccaacagcttgctcatctcctgcgctgtctcctaccgaggggcctggtggtacaggaactgccactacgccaacctcaacgggctctacgggagcacagtggaccatcagggagtgagctggtaccactggaagggcttcgagttctcggtgcccttcacggaaatgaagctgagaccaagaaactttcgctccccagcggggggaggctgagctgctgcccacctctctcgcaccccagtatgactgccgagcactgaggggtcgccccgagagaagagccagggtccttcaccacccagccgctggaggaagccttctctgccagcgatctcgcagcactgtgtttacaggggggaggggaggggttcgtacaggagcaataaaggagaaactgaggtacccgg

SEQ ID NO: 31290 - DNA, 2597 bp, Homo sapiens
  source 1..2597: mol_type = unassigned DNA
ctctacgggcttcgtggcaggcagcgtgtggggcccgagtctgtggtggccaagactgctcctcaggaggatgtggacgagacccccagccccacagaactgggcacggaggccccggagtcccccgaggagccgctcctgggggagctgacagtgacaggatcctcccctgattcgctgagcctcttctggaccgtcccccagggcagcttcgactctttcaccgtgcagtacaaggacagggatgggcggccccaggcggtgcgtgttgggggcaaggagagtgaggtcaccgtgggaggcctagagcccgggcacaagtacaagatgcacctgtacggcctccacgaggggcagcgcgtgggcccggtgtccgccgtgggcgtgacagccccacaacaagaagagacccctccagccactgagtccccgctggagccacgcctaggagagctgacagtgacagatgtgacccccaactctgtgggcctctcctggacagtccccgagggccagtttgactccttcatagtccagtacaaggacaaggacgggcagccccaggtggtgccggtggcggcagaccagcgagaggtcacagtctacaacctggagcctgagagaaaatataagatgaacatgtatggactacatgatgggcaacgcatgggccccctgtctgtggtcatcgtgacggctcccctcccaccagccccagccacagaggcctccaagcctcccctggagccacgcctaggggagctgacagtgacggatataacccctgactctgtgggcctctcatggacagtccctgagggtgaattcgactcctttgtggttcagtacaaggacagggacgggcagccccaggtggtgcccgtggctgcagatcagcgggaggtcactatccctgacctggaaccctcccgcaagtacaagttcctgctctttgggatccaggatgggaaacgacgcagcccagtctctgtggaggcaaagacggttgcccgaggtgacgccagcccaggggccccaccccgccttggggagctgtgggtgacagaccccaccccagactcactgcgcctctcctggacggttcctgagggccagttcgactcttttgtggtccagttcaaggacaaagacgggccccaggtggtgcccgtggagggccatgagcgctctgtcactgtcacccctctggatgccggccgcaagtacagattcctcctctatggcctcctgggcaagaagcgccatggccctctcactgccgacggcaccacggaagcccggagtgctatggatgatactggaacaaagcgtcccccaaaaccccgtctgggggaggagctgcaggtgaccaccgtgacccagaactccgtgggcctctcctggacagtccctgagggccagtttgactcctttgtggtccagtacaaagacagggacgggcagccccaggtggtgcccgtggagggcagcctcagggaggtcagcgtgccgggcctggaccctgcccacaggtacaagctgctgctctacgggctgcaccacggcaagcgtgtgggccccatctcggccgtcgccattactgccggcagggaagaaacggaaactgagaccacggccccgacccctccagcgcctgagccccacctcggggagttgacagtggaggaggccacgtcacacaccctgcatctctcctggatggtgactgagggagaatttgactccttcgaaatccagtacacagatagagacgggcaactccaaatggtccgcataggaggtgaccggaatgacatcaccctctctggcctggaatccgaccacagatacctggtgaccctgtatggtttcagtgatgggaagcatgtaggtcctgtccatgtcgaggccctgacagtcccggaggaggagaagccttcagaacctcccaccgcaacccccgagccccccatcaagcctcgcctgggggagctgaccgtgacagatgccacccctgactccctcagcctgtcctggacagttcccgagggacagtttgaccacttcctggtccagtacaggaatggagatgggcagcccaaggcagtgagggtgccagggcacgaggaaggggtcaccatctcgggcctggagccagaccataaatacaagatgaacctgtacggcttccacggtggccagcgcatgggccctgtgtctgtcgtcggggtgacagctgcagaggaagagacccccagccccacagaacccagcatggaggccccggagcccgctgaggagccgctcctgggggagctaacagtgacaggatcctcccctgactcgctgagcctctcctggaccgtcccccagggccgcttcgactccttcaccgtgcagtacaaggacagggacgggcggccccaggtggtgcgtgttgggggcgaggagagtgaagtcaccgtggggggcctggagcctgggcgcaagtacaagatgcacctgtacggcctccacgaggggcggcgcgtgggcccagtgtctgctgtgggcgtcacggcccccgaagaggagtcccctgatgctcctcttgcaaa

SEQ ID NO: 31291 - DNA, 13125 bp, Homo sapiens
  source 1..13125: mol_type = unassigned DNA
tcctccccttctcctcccctgctcgctgcagactccctcctcactgtcgctgccgagatccacagtcggttgtggctcagcccctgttgcaggggacaagtgagggagacttccctgtcctgccctgagacgccgccctcccggggttggggacagagcaggtgcagaggcactgcagctgctcggttgcccagcctcctgaatgatgccagcccagtatgctctaacctccagcctggttctcctggtgctgctgagcacagccagagcaggccccttctcttcacggtccaatgtgacactgccagccccccggccccctccccagccagggggccacacagtgggggctggagtgggaagcccctcttctcagctttacgagcacacagtggaaggaggggagaagcaggtggtattcacccaccgcattaacctgcccccttccactggctgtggctgtcccccaggcaccgagcccccagtccttgcttcagaggtacaggccctgagggtccgtctagagatcctggaggagttggtgaaggggctcaaggaacagtgcactgggggatgttgtcctgcctctgcccaagctggcacaggtcagacagatgtgcggaccctctgcagtctccatggtgtgtttgatctgagccgctgcacctgttcctgtgagccaggctggggtgggcccacctgctcagaccccacagatgctgagatccctccctcttccccaccctcagcctcggggtcctgcccagatgactgcaatgatcagggtcgctgtgtccgtggtcgttgcgtgtgctttcccggctacactggccccagctgtggctggccatcctgtcccggggactgccaaggccgtgggcgctgcgtgcagggcgtgtgtgtgtgccgggcaggcttctcaggccccgactgcagccagcgctcctgccctcgaggttgcagccagaggggacgctgtgagggtgggcgctgcgtgtgtgacccaggctacactggtgacgactgtggcatgaggagctgccctcgcggttgcagtcagagggggcgctgtgagaatgggcgctgcgtgtgtaaccccggctacactggcgaggactgtggggtgaggagctgccctcggggctgcagccagcggggacgctgcaaggacgggcgctgcgtgtgtgaccccggctacactggcgaggactgtggtacgcggagctgcccctgggactgtggcgagggcgggcgctgcgtggacggccgctgcgtgtgctggcccgggtacacaggcgaggactgcagcacgcggacatgtccgagggactgccggggccgcgggcgctgcgaggacggcgaatgcatttgcgacacgggctacagcggggacgactgcggcgtgcgcagctgccctggcgactgcaaccaaaggggccgctgcgaggacggccgctgcgtgtgctggccggggtacactggaaccgattgcggctcgcgcgcctgcccacgcgactgtagaggtcgcgggcgctgcgagaacggcgtgtgtgtttgcaatgcgggctacagcggcgaggactgcggtgtgcgcagctgtcctggggactgtcgtggccggggccgctgtgagagtggccgctgcatgtgttggccggggtacacaggccgggactgcggcacgcgcgcctgtcctggcgactgtcgcgggcgcgggcgctgcgtggatggccgctgcgtgtgcaacccgggcttcaccggtgaggactgtgggagccgtcgctgtcccggggactgccgtgggcacggcctttgcgaggatggcgtgtgcgtgtgtgacgcaggctactcaggggaagactgcagcacgcgcagctgccccgggggctgccgaggccgcggccagtgcctagatgggcggtgtgtgtgcgaggacggctactctggcgaggattgcggtgtgaggcagtgcccgaatgactgcagccagcacggcgtgtgccaggacggtgtgtgcatctgttgggaaggctacgtgagtgaggactgcagcatccgcacctgcccctccaactgccacgggaggggccgctgtgaggaagggcgctgcctgtgcgacccaggctacaccggccctacctgtgccacccgcatgtgcccggctgactgccggggacgtgggcggtgtgtgcaaggagtgtgcctgtgccacgtgggctatggcggtgaggactgcgggcaggaagagcctccagccagcgcctgccctggaggctgcgggccccgggaactgtgccgggcaggccagtgtgtgtgtgtagagggcttccgaggccctgactgtgccatccagacatgcccaggggactgccgtggccgaggagagtgtcacgatggcagctgtgtctgcaaagatgggtatgctggcgaagactgcggagaagaggtgccaaccattgagggcatgaggatgcatctcttggaggagacaacagttcggacagagtggaccccggctcctggccccgtggatgcctatgaaattcagttcatccccacgacagagggggcgagccccccattcacagcacgggttccaagctctgcctcagcctatgaccagagaggactggcccctggacaggagtaccaggtcactgtccgagcccttcgagggaccagctggggccttcctgcctccaagaccatcaccaccatgatcgatgggccccaggacctccgagtggtggctgtgacaccgacaacactggagcttggctggctgcgtccccaggctgaggtggaccgatttgtggtgtcctacgtcagtgccggcaaccagagggtgaggctggaagtgccccctgaagcagacgggacgctgctgactgacctgatgccaggcgtagaatatgtggtgactgtcacagcggagcggggccgggcagtcagctacccagcttctgtcagggccaacacagggtcctcacccttgggcctcttggggactaccgatgagcctcctccctcaggcccctcgacgacgcaaggggcccaggctcctctcctgcagcagcgcccccaggagctgggagagttgagggtgctgggcagagatgagacagggcgcctccgtgtggtctggaccgcccagcctgacacctttgcctacttccaactgcgcatgcgggtgcccgaggggccgggggcacatgaggaagtgctgccaggggacgtccgccaggctctggtgcctccaccccctcctggaaccccgtatgagctgtcacttcatggggtccctcctgggggcaagccctctgaccccatcatctaccaaggcattatggacaaggatgaggagaagcctgggaagtcctcaggcccaccacgcctgggtgagctgacggtgacagacaggacctccgactccttgctcctgcgctggacggtccccgagggcgagtttgactccttcgtgatccagtacaaagacagggacgggcagccccaggtggtgcccgtggaaggaccccagcgctcggccgtcatcacctccctggatcctggccgcaagtacaaatttgtcctgtatgggtttgttggcaagaagaggcatggtccgctggtggctgaagccaagatcttgcctcagagtgacccaagtccagggactccaccccgcctgggaaacctgtgggtgacagaccctaccccagattcactgcacctctcctggactgtccctgagggccagtttgacaccttcatggtccagtacagggacagggatggacggccccaggtggtacctgtggaagggcccgagcgttcatttgttgtctcctcactggaccctgaccacaagtacagattcactctgtttggaattgcgaacaagaagcggtatggccccctcacggccgatggcaccactgctccagagaggaaagaggagcccccccaccctgagttcctggagcagcccctcctgggggaactgacagtgaccggcgtgaccccagactccttgcgtctctcatggacagtggcccagggccccttcgactcattcatggtccagtacaaggatgcacaggggcagccccaggcagtgcctgttgcgggggatgagaatgaggttactgtccccggcctggatcccgaccggaagtataagatgaacctctacgggcttcgtggcaggcagcgtgtggggcccgagtctgtggtggccaagactgctcctcaggaggatgtggacgagacccccagccccacagaactgggcacggaggccccggagtcccccgaggagccgctcctgggggagctgacagtgacaggatcctcccctgattcgctgagcctcttctggaccgtcccccagggcagcttcgactctttcaccgtgcagtacaaggacagggatgggcggccccgggcggtgcgtgttgggggcaaggagagtgaggtcaccgtgggaggcctagagcccgggcacaagtacaagatgcacctgtacggcctccacgaggggcagcgcgtgggcccggtgtccgccgtgggcgtgacagccccacaacaagaagagacccctccagccactgagtccccgctggagccacgcctaggagagctgacagtgacagatgtgacccccaactctgtgggcctctcctggacagtccccgagggccagtttgactccttcatagtccagtacaaggacaaggacgggcagccccaggtggtgccggtggcggcagaccagcgagaggtcacagtctacaacctggagcctgagagaaaatataagatgaacatgtatggactacatgatgggcaacgcatgggccccctgtctgtggtcatcgtgacggctcccctcccaccagccccagccacagaggcctccaagcctcccctggagccacgcctaggggagctgacagtgacggatataacccctgactctgtgggcctctcatggacagtccctgagggtgaattcgactcctttgtggttcagtacaaggacagggacgggcagccccaggtggtgcccgtggctgcagatcagcgggaggtcactatccctgacctggaaccctcccgcaagtacaagttcctgctctttgggatccaggatgggaaacgacgcagcccagtctctgtggaggcaaagacggttgcccgaggtgacgccagcccaggggccccaccccgccttggggagctgtgggtgacagaccccaccccagactcactgcgcctctcctggacggttcctgagggccagttcgactcttttgtggtccagttcaaggacaaagacgggccccaggtggtgcccgtggagggccatgagcgctctgtcactgtcacccctctggatgccggccgcaagtacagattcctcctctatggcctcctgggcaagaagcgccatggccctctcactgccgacggcaccacggaagcccggagtgctatggatgatactggaacaaagcgtcccccaaaaccccgtctgggggaggagctgcaggtgaccaccgtgacccagaactccgtgggcctctcctggacagtccctgagggccagtttgactcctttgtggtccagtacaaagacagggacgggcagccccaggtggtgcccgtggagggcagcctcagggaggtcagcgtgccgggcctggaccctgcccacaggtacaagctgctgctctacgggctgcaccacggcaagcgtgtgggccccatctcggccgtcgccattactgccggcagggaagaaacggaaactgagaccacggccccgacccctccagcgcctgagccccacctcggggagttgacagtggaggaggccacgtcacacaccctgcatctctcctggatggtgactgagggagaatttgactccttcgaaatccagtacacagatagagacgggcaactccaaatggtccgcataggaggtgaccggaatgacatcaccctctctggcctggaatccgaccacagatacctggtgaccctgtatggtttcagtgatgggaagcatgtaggtcctgtccatgtcgaggccctgacagtcccggaggaggagaagccttcagaacctcccaccgcaacccccgagccccccatcaagcctcgcctgggggagctgaccgtgacagatgccacccctgactccctcagcctgtcctggacagttcccgagggacagtttgaccacttcctggtccagtacaggaatggagatgggcagcccaaggcagtgagggtgccagggcacgaggaaggggtcaccatctcgggcctggagccagaccataaatacaagatgaacctgtacggcttccacggtggccagcgcatgggccctgtgtctgtcgtcggggtgacagctgcagaggaagagacccccagccccacagaacccagcatggaggccccggagcccgctgaggagccgctcctgggggagctaacagtgacaggatcctcccctgactcgctgagcctctcctggaccgtcccccagggccgcttcgactccttcaccgtgcagtacaaggacagggacgggcggccccaggtggtgcgtgttgggggcgaggagagtgaagtcaccgtggggggcctggagcctgggcgcaagtacaagatgcacctgtacggcctccacgaggggcggcgcgtgggcccagtgtctgctgtgggcgtcacggcccccgaagaggagtcccctgatgctcctcttgcaaagctgcgcctagggcagatgacagtgagagacatcacctccgactccctcagcctctcctggacagtccccgagggccagtttgaccatttcttggtccagtttaagaatggggatgggcagcccaaggcggtgcgggtgccgggacacgaggatggggtcaccatctcgggcctggagccagaccacaagtacaagatgaacctgtacggcttccacggtggccagcgcgtgggccccgtgtctgctgttggtttaactgccccaggaaaggatgaagaaatggccccagcctcgacagaacctcccacccctgaaccccccatcaagcctcgcctggaggagctgaccgtgacagatgcgacccctgactccctcagcctgtcctggacggttcccgagggacagtttgaccacttcctggtccagtacaagaatggggatgggcagcccaaggcaacacgggtgccaggacatgaggacagggtcaccatctccggcctggagccagacaacaagtacaagatgaacctgtacggcttccacggtggccagcgtgtgggccccgtgtctgccatcggggtgacagctgcagaggaagagacccccagccccacagaacccagcatggaggccccggagccccctgaggagccgctcctgggggagctgacagtgacaggatcctcccctgactcgctgagcctctcctggaccgtcccccagggccgcttcgactccttcaccgtgcagtacaaggacagggacgggcggccccaggtggtgcgtgttgggggcgaggagagcgaggtcaccgtggggggcctggagcctgggcgcaaatacaagatgcacctgtacggcctccacgaggggcggcgcgtgggcccggtgtccaccgtgggcgtgactgccccacaagaggatgtggacgagacccccagccctacagaaccaggcacagaggccccagagccccccgaggagcctctcctgggggagctgacagtgacaggatcctcccctgactcgctgagcctttcctggaccgtcccccagggccgctttgactccttcaccgtgcagtacaaggacagggatgggcggccccaggcggtgcgtgttgggggccaggagagcaaggtcactgtgaggggcctggagcctgggcgcaagtacaagatgcacctgtacggcctccacgaggggcggcgcctgggcccggtgtctgccgtgggcgtcacagaggatgaagccgagaccacccaagcagtgcctaccatgacccctgagccccccatcaagcctcgcctgggggagctgaccatgacagatgccacccctgactccctcagcctgtcctggacggttcccgagggccagtttgaccacttcctggtccagtacaggaatggggatgggcagcccaaggcggtgcgggtgccggggcacgaggacggggtcaccatctcaggcctggagccagaccataaatacaagatgaacctgtacggcttccacggtggccagcgcgtgggccccatctctgtcattggggtgacggctgcagaggaagagacccccagccccacggaactcagcactgaggccccggagccccctgaggagccgctcctgggggagctgacagtgacaggatcctcccctgactcgctgagcctctcctggaccatcccccagggccacttcgactccttcaccgtgcagtacaaggacagggacgggcggccccaggtgatgcgtgtcaggggcgaggagagcgaggtcaccgtggggggcctggagcccgggcgcaaatacaagatgcacctgtacggcctccacgaggggcggcgtgtgggcccggtgtccaccgtgggtgtgacagaggatgaagcagagaccacccaagcagtgcccaccacaacccctgagccccccaacaagcctcgcctcggggagctgaccgtgacagatgccacccctgactccctcagcctgtcctggatggtccccgagggccagtttgaccacttcctggtccagtacaggaatggggatgggcagcccaaggtggtgcgggtgccggggcacgaggacggggtcaccatctcaggcctggagccagaccacaagtacaagatgaacctgtacggcttccacggtggccagcgcgtgggccccatctctgtcattggggtgacagctgcagaggaagaaactcccgcccccacagaacccagcacggaggccccggagccccctgaggagccgctcctgggggagctgacagtgacaggatcctcccctgactcgctgagcctctcctggaccatcccccagggccgcttcgactccttcactgtgcagtacaaggacagggacgggcggccccaggtggtgcgtgtcaggggcgaggagagcgaggtcaccgtggggggcctggagcccgggtgcaaatacaagatgcacctgtacggcctccacgaggggcagcgcgtgggcccagtgtccgctgtgggtgtgacagctccaaaggatgaagccgagaccacccaagcagtgcctaccatgacccctgagccccccatcaagcctcgcctgggggagctgaccgtgacagatgccacccccgactccctcagcctgtcctggatggttcccgagggccagtttgaccacttcctggtccagtacaggaatggggatgggcagcccaaggcggtgcgggtgccggggcacgaggacggggtcaccatctcaggcctggagccagaccataaatacaagatgaacctgtacggcttccacggtggccagcgcgtaggccctgtgtctgccattggggtgacggaggaagagacccccagccccacagaacccagcactgaggccccggaggcccctgaggagccgctcctgggggagttgacagtgacaggatcctcccctgactcgctgagcctctcctggaccatcccccagggccgcttcgactccttcaccgtgcagtacaaggacagggacgggcagccccaggtggtgcgtgtcaggggcgaggagagcgaggtcaccgtggggggcctggagcccgggcgcaaatacaagatgcatctgtacggcctccacgaggggcagcgcgtgggcccagtgtccaccgtgggcatcacggcgcccctgcccacaccactgccggtggagccccgcctgggggagctggcggtggcggccgtgacctcggactcagtgggcctctcatggacggtggcccagggcccctttgactccttcctggtacagtacagggacgcgcaggggcagccccaggcagtgcctgtgagcggagacctccgagcggtcgccgtctcggggctggacccggcccgcaagtacaagttcctgctctttggactccagaatgggaaacgccacggcccagtccctgtggaggccaggaccgccccagacaccaaaccgtctccccgcctgggggagctgactgtgacagatgcgacccctgactccgtgggcctctcgtggacggtccctgagggcgaattcgactccttcgtggtccagtacaaggataaggatggtcggctccaggtggtgccggtggcagccaaccagcgggaggtcacagtccagggcctggagcccagtaggaaatacaggttcctgctctatggtctgtcaggcaggaaacgactgggccccatctctgctgacagcaccacagctcccctggagaaggagctacctccccacctgggggaactgaccgtggctgaggagacctccagctctctgcgcctgtcctggacggtagcccagggcccctttgactccttcgtggtccagtacagggacacggacgggcagcccagggcagtgcctgtggccgcagaccagcgcacagtcaccgtagaggacctggagcctggcaagaaatacaagtttctgctctacgggctccttgggggaaagcgcctgggcccggtctctgccctgggaatgacagccccagaagaggacacaccagccccagagttagccccagaggcccctgagcctcctgaagagccccgcctaggagtgctgaccgtgaccgacacaaccccagactccatgcgcctctcgtggagcgtggcccagggcccctttgattccttcgtggtccagtatgaggacacgaacgggcagccccaggccttgctcgtggacggcgaccagagcaagatcctcatctcaggcctggagcccagcaccccctacaggttcctcctctatggcctccatgaagggaagcgcctggggcccctctcagctgagggcaccacagggctggctcctgctggtcagacctcagaggagtcaaggccccgcctgtcccagctgtctgtgactgacgtgaccaccagttcactgaggctcaactgggaggccccaccgggggccttcgactccttcctgctccgctttggggttccatcaccaagcactctggagccgcatccgcgtccactgctgcagcgcgagctgatggtgccggggacgcggcactcggccgtgctccgggacctgcgttccgggactctgtacagcctgacactgtatgggctgcgaggaccccacaaggccgacagcatccagggaaccgcccgcaccctcagcccagttctggagagcccccgtgacctccaattcagtgaaatcagggagacctcagccaaggtcaactggatgcccccaccatcccgggcggacagcttcaaagtctcctaccagctggcggacggaggggagcctcagagtgtgcaggtggatggccaggcccggacccagaaactccaggggctgatcccaggcgctcgctatgaggtgaccgtggtctcggtccgaggctttgaggagagtgagcctctcacaggcttcctcaccacggttcctgacggtcccacacagttgcgtgcactgaacttgaccgagggattcgccgtgctgcactggaagcccccccagaatcctgtagacacctatgacatccaggtcacagcccctggggccccgcctctgcaggcggagaccccaggcagcgcggtggactaccccctgcatgaccttgtcctccacaccaactacaccgccacagtgcgtggcctgcggggccccaacctcacttccccagccagcatcaccttcaccacagggctagaggcccctcgggacttggaggccaaggaagtgaccccccgcaccgccctgctcacttggactgagcccccagtccggcccgcaggctacctgctcagcttccacacccctggtggacagacccaggagatcctgctcccaggagggatcacatctcaccagctccttggcctctttccctccacctcctacaatgcacggctccaggccacgtggggccagagcctcctgccgcccgtgtccacctctttcaccacgggtgggctgcggatccccttccccagggactgcggggaggagatgcagaacggagccggtgcctccaggaccagcaccatcttcctcaacggcaaccgcgagcggcccctgaacgtgttttgcgacatggagactgatgggggcggctggctggtgttccagcgccgcatggatggacagacagacttctggagggactgggaggactatgcccatggttttgggaacatctctggagagttctggctgggcaatgaggccctgcacagcctgacacaggcaggtgactactccatgcgcgtggacctgcgggctggggacgaggctgtgttcgcccagtacgactccttccacgtagactcggctgcggagtactaccgcctccacttggagggctaccacggcaccgcaggggactccatgagctaccacagcggcagtgtcttctctgcccgtgatcgggaccccaacagcttgctcatctcctgcgctgtctcctaccgaggggcctggtggtacaggaactgccactacgccaacctcaacgggctctacgggagcacagtggaccatcagggagtgagctggtaccactggaagggcttcgagttctcggtgcccttcacggaaatgaagctgagaccaagaaactttcgctccccagcggggggaggctgagctgctgcccacctctctcgcaccccagtatgactgccgagcactgaggggtcgccccgagagaagagccagggtccttcaccacccagccgctggaggaagccttctctgccagcgatctcgcagcactgtgtttacaggggggaggggaggggttcgtacgggagcaataaaggagaaactgaggtacccgg

SEQ ID NO: 31292 - DNA, 2852 bp, Homo sapiens
  source 1..2852: mol_type = unassigned DNA
agctgactgtgacagatgcgacccctgactccgtgggcctctcgtggacggtccctgagggcgaattcgactccttcgtggtccagtacaaggataaggatggtcggctccaggtggtgccggtggcagccaaccagcgggaggtcacagtccagggcctggagcccagtaggaaatacaggttcctgctctatggtctgtcaggcaggaaacgactgggccccatctctgctgacagcaccacagctcccctggagaaggagctacctccccacctgggggaactgaccgtggctgaggagacctccagctctctgcgcctgtcctggacggtagcccagggcccctttgactccttcgtggtccagtacagggacacggacgggcagcccagggcagtgcctgtggccgcagaccagcgcacagtcaccgtagaggacctggagcctggcaagaaatacaagtttctgctctacgggctccttgggggaaagcgcctgggcccggtctctgccctgggaatgacagccccagaagaggacacaccagccccagagttagccccagaggcccctgagcctcctgaagagccccgcctaggagtgctgaccgtgaccgacacaaccccagactccatgcgcctctcgtggagcgtggcccagggcccctttgattccttcgtggtccagtatgaggacacgaacgggcagccccaggccttgctcgtggacggcgaccagagcaagatcctcatctcaggcctggagcccagcaccccctacaggttcctcctctatggcctccatgaagggaagcgcctggggcccctctcagctgagggcaccacagggctggctcctgctggtcagacctcagaggagtcaaggccccgcctgtcccagctgtctgtgactgacgtgaccaccagttcactgaggctcaactgggaggccccaccgggggccttcgactccttcctgctccgctttggggttccatcaccaagcactctggagccgcatccgcgtccactgctgcagcgcgagctgatggtgccggggacgcggcactcggccgtgctccgggacctgcgttccgggactctgtacagcctgacactgtatgggctgcgaggaccccacaaggccgacagcatccagggaaccgcccgcaccctcagcccagttctggagagcccccgtgacctccaattcagtgaaatcagggagacctcagccaaggtcaactggatgcccccaccatcccgggcggacagcttcaaagtctcctaccagctggcggacggaggggagcctcagagtgtgcaggtggatggccaggcccggacccagaaactccaggggctgatcccaggcgctcgctatgaggtgaccgtggtctcggtccgaggctttgaggagagtgagcctctcacaggcttcctcaccacggttcctgacggtcccacacagttgcgtgcactgaacttgaccgagggattcgccgtgctgcactggaagcccccccagaatcctgtggacacctatgacgtccaggtcacagcccctggggccccgcctctgcaggcggagaccccaggcagcgcggtggactaccccctgcatgaccttgtcctccacaccaactacaccgccacagtgcgtggcctgcggggccccaacctcacttccccagccagcatcaccttcaccacagggctagaggcccctcgggacttggaggccaaggaagtgaccccccgcaccgccctgctcacttggactgagcccccagtccggcccgcaggctacctgctcagcttccacacccctggtggacagaaccaggagatcctgctcccaggagggatcacatctcaccagctccttggcctctttccctccacctcctacaatgcacggctccaggccatgtggggccagagcctcctgccgcccgtgtccacctctttcaccacgggtgggctgcggatccccttccccagggactgcggggaggagatgcagaacggagccggtgcctccaggaccagcaccatcttcctcaacggcaaccgcgagcggcccctgaacgtgttttgcgacatggagactgatgggggcggctggctggtgttccagcgccgcatggatggacagacagacttctggagggactgggaggactatgcccatggttttgggaacatctctggagagttctggctgggcaatgaggccctgcacagcctgacacaggcaggtgactactccatgcgcgtggacctgcgggctggggacgaggctgtgttcgcccagtacgactccttccacgtagactcggctgcggagtactaccgcctccacttggagggctaccacggcaccgcaggggactccatgagctaccacagcggcagtgtcttctctgcccgtgatcgggaccccaacagcttgctcatctcctgcgctgtctcctaccgaggggcctggtggtacaggaactgccactacgccaacctcaacgggctctacgggagcacagtggaccatcagggagtgagctggtaccactggaagggcttcgagttctcggtgcccttcacggaaatgaagctgagaccaagaaactttcgctccccagcggggggaggctgagctgctgcccacctctctcgcaccccagtatgactgccgagcactgaggggtcgccccgagagaagagccagggtccttcaccacccagccgctggaggaagccttctctgccagcgatctcgcagcactgtgtttacaggggggaggggaggggttcgtacaggagcaataaaggagaaactgaggtacccggc

SEQ ID NO: 31293 - DNA, 651 bp, Homo sapiens
  source 1..651: mol_type = unassigned DNA
gccccaggaaaggatgaagaaatggccccagcctcgacagaacctcccacccctgaaccccccatcaagcctcgcctggaggagctgaccgtgacagatgcgacccctgactccctcagcctgtcctggacggttcccgagggacagtttgaccacttcctggtccagtacaagaatggggatgggcagcccaaggcaacacgggtgccaggacatgaggacagggtcaccatctccggcctggagccagacaacaagtacaagatgaacctgtacggcttccacggtggccagcgtgtgggccccgtgtctgccatcggggtgacagctgcagaggaagagacccccagccccacagaacccagcatggaggccccggagccccctgaggagccgctcctgggggagctgacagtgacaggatcctcccctgactcgctgagcctctcctggaccgtcccccagggccgcttcgactccttcaccgtgcagtacaaggacagggacgggcggccccaggtggtgcgtgttgggggcgaggagagcgaggtcaccgtggggggcctggagcctgggcgcaaatacaagatgcacctgtacggcctccacgaggggcggcgcgtgggcccggtgtccaccgtgggcgtgact

SEQ ID NO: 31294 - DNA, 939 bp, Homo sapiens
  source 1..939: mol_type = unassigned DNA
acagaaccaggcacagaggccccagggccccccgaggagcctctcctgggggagctgacagtgacaggatcctcccctgactcgctgagcctttcctggaccgtcccccagggccgctttgactccttcaccgtgcagtacaaggacagggacgggcggccccaggcggtgcgtgttgggggccaggagagcaaggtcactgtgaggggcctggagcctgggcgcaagtacaagatgcacctgtacggcctccacgaggggcggcgcctgggcccggtgtctgccgtgggcgtcacagaggatgaagccgagaccacccaagcagtgcctaccatgacccctgagccccccatcaagcctcgcctgggggagctgaccatgacagatgccacccctgactccctcagcctgtcctggacggttcccgagggccagtttgaccacttcctggtccagtacaggaatggggatgggcagcccaaggcggtgcgggtgccggggcacgaggacggggtcaccatctcaggcctggagccagaccataaatacaagatgaacctgtacggcttccacggtggccagcgcgtgggccccatctctgtcattggggtgacggctgcagaggaagagacccccagccccacggaactcagcactgaggccccggagccccctgaggagccgctcctgggggagctgacagtgacaggatcctcccctgactcgctgagcctctcctggaccatcccccagggccacttcgactccttcaccgtgcagtacaaggacagggacgggcggccccaggtgatgcgtgtcaggggcgaggagagcgaggtcaccgtggggggcctggagcccgggcgcaaatacaagatgcacctgtacggcctccacgaggggcggcgtgtgggcccggtgtccaccgtgggtgtgaca

SEQ ID NO: 31295 - DNA, 939 bp, Homo sapiens
  source 1..939: mol_type = unassigned DNA
atgacccctgagccccccatcaagcctcgcctgggggagctgaccatgacagatgccacccctgactccctcagcctgtcctggacggttcccgagggccagtttgaccacttcctggtccagtacaggaatggggatgggcagcccaaggcggtgcgggtgccggggcacgaggacggggtcaccatctcaggcctggagccagaccataaatacaagatgaacctgtacggcttccacggtggccagcgcgtgggccccatctctgtcactggggtgacggctgcagaggaagagacccccagccccacggaactcagcactgaggccccggagccccctgaggagccgctcctgggggagctgacagtgacaggatcctcccctgactcgctgagcctctcctggaccatcccccagggccacttcgactccttcaccgtgcagtacaaggacagggacgggcggccccaggtgatgcgtgtcaggggcgaggagagcgaggtcaccgtggggggcctggagcccgggcgcaaatacaagatgcacctgtacggcctccacgaggggcggcgtgtgggcccggtgtccaccgtgggtgtgacagctccagaggatgaagaggaagaaactcccgcccccacagaacccagcacggaggccccggagccccctgaggagccgctcctgggggagctgacagtgacaggatcctcccctgactcgctgagcctctcctggaccatcccccagggccgcttcgactccttcactgtgcagtacaaggacagggacgggcggccccaggtggtgcgtgtcaggggcgaggagagcgaggtcaccgtggggggcctggagcccgggtgcaaatacaagatgcacctgtacggcctccacgaggggcagcgcgtgggcccagtgtccgctgtgggtgtgaca

SEQ ID NO: 31296 - DNA, 1281 bp, Homo sapiens
  source 1..1281: mol_type = unassigned DNA
atgctggcgaagactgcggagaagaggtgccaaccattgagggcatgaggatgcatctcttggaggagacaacagttcggacagagtggaccccggctcctggccccgtggatgcctatgaaattcagttcatccccacgacagagggggcgagccccccattcacagcacgggttccaagctctgcctcagcctatgaccagagaggactggcccctggacaggagtaccaggtcactgtccgagcccttcgagggaccagctggggccttcctgcctccaagaccatcaccaccatgatcgatgggccccaggacctccgagtggtggctgtgacaccgacaacactggagcttggctggctgcgtccccaggctgaggtggaccgatttgtggtgtcctacgtcagtgccggcaaccagagggtgaggctggaagtgccccctgaagcagacgggacgctgctgactgacctgatgccaggcgtagaatatgtggtgactgtcacagcggagcggggccgggcagtcagctacccagcttctgtcagggccaacacagggtcctcacccttgggcctcttggggactaccgatgagcctcctccctcaggcccctcgacgacgcaaggggcccaggctcctctcctgcagcagcgcccccaggagctgggagagttgagggtgctgggcagagatgagacagggcgcctccgtgtggtctggaccgcccagcctgacacctttgcctacttccaactgcgcatgcgggtgcccgaggggccgggggcacatgaggaagtgctgccaggggacgtccgccaggctctggtgcctccaccccctcctggaaccccgtatgagctgtcacttcatggggtccctcctgggggcaagccctctgaccccatcatctaccaaggcattatggacaaggatgaggagaagcctgggaagtcctcaggcccaccacgcctgggtgagctgacggtgacagacaggacctccgactccttgctcctgcgctggacggtccccgagggcgagtttgactccttcgtgatccagtacaaagacagggacgggcagccccaggtggtgcccgtggaaggaccccagcgctcggccgtcatcacctccctggatcctggccgcaagtacaaatttgtcctgtatgggtttgttggcaagaagaggcatggtccgctggtggctgaagccaagatcttgcctcagagtgacccaagtccagggactccaccccacctgggaaacctgtggg

SEQ ID NO: 31297 - DNA, 2597 bp, Homo sapiens
  source 1..2597: mol_type = unassigned DNA
ctctacgggcttcgtggcaggcagcgtgtggggcccgagtctgtggtggccaagactgctcctcaggaggatgtggacgagacccccagccccacagaactgggcacggaggccccggagtcccccgaggagccgctcctgggggagctgacagtgacaggatcctcccctgattcgctgagcctcttctggaccgtcccccagggcagcttcgactctttcaccgtgcagtacaaggacagggatgggcggccccgggcggtgcgtgttgggggcaaggagagtgaggtcaccgtgggaggcctagagcccgggcacaagtacaagatgcacctgtacggcctccacgaggggcagcgcgtgggcccggtgtccgccgtgggcgtgacagccccacaacaagaagagacccctccagccactgagtccccgctggagccacgcctaggagagctgacagtgacagatgtgacccccaactctgtgggcctctcctggacagtccccgagggccagtttgactccttcatagtccagtacaaggacaaggacgggcagccccaggtggtgccggtggcggcagaccagcgagaggtcacagtctacaacctggagcctgagagaaaatataagatgaacatgtatggactacatgatgggcaacgcatgggccccctgtctgtggtcatcgtgacggctcccctcccaccagccccagccacagaggcctccaagcctcccctggagccacgcctaggggagctgacagtgacggatataacccctgactctgtgggcctctcatggacagtccctgagggtgaattcgactcctttgtggttcagtacaaggacagggacgggcagccccaggtggtgcccgtggctgcagatcagcgggaggtcactatccctgacctggaaccctcccgcaagtacaagttcctgctctttgggatccaggatgggaaacgacgcagcccagtctctgtggaggcaaagacggttgcccgaggtgacgccagcccaggggccccaccccgccttggggagctgtgggtgacagaccccaccccagactcactgcgcctctcctggacggttcctgagggccagttcgactcttttgtggtccagttcaaggacaaagacgggccccaggtggtgcccgtggagggccatgagcgctctgtcactgtcacccctctggatgccggccgcaagtacagattcctcctctatggcctcctgggcaagaagcgccatggccctctcactgccgacggcaccacggaagcccggagtgctatggatgatactggaacaaagcgtcccccaaaaccccgtctgggggaggagctgcaggtgaccaccgtgacccagaactccgtgggcctctcctggacagtccctgagggccagtttgactcctttgtggtccagtacaaagacagggacgggcagccccaggtggtgcccgtggagggcagcctcagggaggtcagcgtgccgggcctggaccctgcccacaggtacaagctgctgctctacgggctgcaccacggcaagcgtgtgggccccatctcggccgtcgccattactgccggcagggaagaaacggaaactgagaccacggccccgacccctccagcgcctgagccccacctcggggagttgacagtggaggaggccacgtcacacaccctgcatctctcctggatggtgactgagggagaatttgactccttcgaaatccagtacacagatagagacgggcaactccaaatggtccgcataggaggtgaccggaatgacatcaccctctctggcctggaatccgaccacagatacctggtgaccctgtatggtttcagtgatgggaagcatgtaggtcctgtccatgtcgaggccctgacagtcccggaggaggagaagccttcagaacctcccaccgcaacccccgagccccccatcaagcctcgcctgggggagctgaccgtgacagatgccacccctgactccctcagcctgtcctggacagttcccgagggacagtttgaccacttcctggtccagtacaggaatggagatgggcagcccaaggcagtgagggtgccagggcacgaggaaggggtcaccatctcgggcctggagccagaccataaatacaagatgaacctgtacggcttccacggtggccagcgcatgggccctgtgtctgtcgtcggggtgacagctgcagaggaagagacccccagccccacagaacccagcatggaggccccggagcccgctgaggagccgctcctgggggagctaacagtgacaggatcctcccctgactcgctgagcctctcctggaccgtcccccagggccgcttcgactccttcaccgtgcagtacaaggacagggacgggcggccccaggtggtgcgtgttgggggcgaggagagtgaagtcaccgtggggggcctggagcctgggcgcaagtacaagatgcacctgtacggcctccacgaggggcggcgcgtgggcccagtgtctgctgtgggcgtcacggcccccgaagaggagtcccctgatgctcctcttgcaaa

SEQ ID NO: 31298 - DNA, 10331 bp, Homo sapiens
  source 1..10331: mol_type = unassigned DNA
gttggcccgccccctgggctggcctgggagggaacccgactagcagagccctctgctcagttgctcccagcagtggccctgggaccagctctgctccttgcaccccgctccctgcctggacacaggctcactcgctgccttcttctgggggaaaccagcttcttgccagccacagctgctgcctccgccactggccaccgcccctgtcctgggagtcccttggcccagacacccacctgacttagtggctcctctgcaggaaaggtggctgccccctgcgttcctccatccaaccatgagctggtgcccatcaccactgagaatgcaccaaagaatgtagtggacaagggagaaggagcctcccggggtggaaacacacggaaaagcctcgaggacaacggctccaccagggtcaccccgagtgtccagccccacctccagcccatcagaaacatgagtgtgagccggaccatggaggacagctgtgagctggacctggtgtacgtcacagagaggatcatcgctgtctccttccccagcacagccaatgaggagaacttccggagcaacctccgtgaggtggcgcagatgctcaagtccaaacatggaggcaactacctgctgttcaacctctctgagcggagacctgacatcacgaagctccatgccaaggtactggaatttggctggcccgacctccacaccccagccctggagaagatctgcagcatctgtaaggccatggacacatggctcaatgcagaccctcacaatgtcgttgttctacacaacaagggaaaccgaggcaggataggagttgtcatcgcggcttacatgcactacagcaacatttctgccagtgcggaccaggctctggaccggtttgcaatgaagcggttctatgaggataagattgtgcccattggccagccatcccaaagaaggtacgtgcattacttcagtggcctgctctccggctccatcaaaatgaacaacaagcccttgtttctgcaccacgtgatcatgcacggcatccccaactttgagtctaaaggaggatgtcggccatttctccgcatctaccaggccatgcaacctgtgtacacatctggcatctacaacatcccaggagacagccagactagcgtctgcatcaccatcgagccaggactgctcttgaagggagacatcttgctgaagtgctaccacaagaagttccgaagcccagcccgagacgtcatcttccgtgtgcagttccacacctgtgccatccatgacctgggggttgtctttgggaaggaggaccttgatgatgctttcaaagatgatcgatttccagagtatggcaaagtggagtttgtattttcttatgggccagagaaaattcaaggcatggagcacctggagaacgggccgagcgtgtctgtggactataacacctccgaccccctcatccgctgggactcctacgacaacttcagtgggcatcgagatgacggcatggaggaggtggtgggacacacgcaggggccactagatgggagcctgtatgctaaggtgaagaagaaagactccctgcacggcagcaccggggctgttaatgccacacgtcctacactgtcggccacccccaaccacgtggaacacacgctttctgtgagcagcgactcgggcaactccacagcctccaccaagaccgacaagaccgacgagcctgtccccggggcctccagtgccactgctgccttgagtccccaggagaagcgggagctggaccgcctgctgagtggctttggcttagagcgagagaagcaaggcgccatgtaccacacccagcacctcaggtcccgcccagcagggggctcggctgtgccctcctctggacgccacgttgtcccagcccaggttcatgtcaatggtggggcgttagcatctgagcgggagacagacatcctggacgatgaattgccaaaccaggatggtcacagtgcgggcagcatgggcacactctcttctctggacggggtcaccaacaccagtgaggggggctacccagaggccctgtccccactgaccaacggtctggacaagtcctaccccatggagcctatggtcaatggaggaggctacccctacgagtctgccagccgggcggggcctgcccatgctggccacacggcccccatgcggccctcctactctgcacaggagggtttagctggctaccagagggaggggccccacccagcctggccacagccagtgaccacctcccactatgcccatgaccccagcggtatgttccgctctcaatccttttcggaagctgaaccccagctgcccccagctccggtccgagggggaagcagccgggaggctgtgcaaaggggactgaattcgtggcagcagcagcagcagcagcagcagcagcctcgcccacctccacgccagcaggaaagagcccacttggagagtcttgtagccagcaggcccagccctcagccattggcagagacccccatccccagtctccctgagttcccgcgagcagcctcccagcaggagattgaacagtccatcgaaacactcaatatgctgatgctggacctggagccagcctccgctgctgccccactacacaagtcccagagtgtccccggggcctggccaggggcttctccactctcctcccagcccctctctggatcctcccgtcagtcccatccactgacccagtccagatctggctatatccccagtgggcattcgttgggaacccctgagccagccccacgggcctctctggagtctgtccctcctggcaggtcttactcaccttatgactatcagccatgtttggctgggcctaaccaggatttccattcaaagagcccagcctcttcctccttgcctgccttccttccgaccacccacagccctccagggcctcagcaacccccagcctctctccctggcctcactgctcagcctctgctctcaccaaaggaagcgacttcagacccctcccggactccagaggaggagccattgaatttagaagggctggtggcccacagggtagcaggggtacaggctcgggagaagcagcctgcagagcccccagcccctctgcggaggcgggcggccagtgatggacagtatgagaaccagtctccagaagccacatcccctcgtagccctggggttcgctcccctgtccagtgtgtctccccggagctggctcttaccatcgctctcaatcctggagggcggcccaaagagccccatttgcacagctacaaggaggccttcgaggagatggagggaacctccccgagcagcccaccacccagtggggtgcggtcccccccgggtctggccaagacacccctgtctgctctgggcctgaaacctcacaacccagcggacatcctgttgcaccccacaggagttaccagaagacggatccagccagaggaagatgaggggaaggtggtggtcaggctgtcagaagagccccggagctatgtggagtctgtggcacggacagcggtggctggaccccgagctcaggactctgagcccaagagctttagtgctccagccacccaggcctatggccatgagatacccctgaggaacgggaccctgggtggctcctttgtctcccccagccccctctccaccagcagccccatcctcagtgctgacagcacttcagtggggagtttcccgtcgggagagagcagtgaccagggtccccggacgcccacccagcctctgttggagtctggcttccgctcaggcagcctgggacagcccagcccgtctgcccagagaaactaccagagctcttctcctctcccgactgtgggcagtagctacagcagccccgactactcacttcagcatttcagctcctctccggaaagccaggctcgagctcagttcagtgtggctggcgtccacacggtgcctgggagccctcaggcgcgccacagaacagtgggcaccaacactccccctagtcctggcttcggctggcgggccatcaatcccagcatggctgcccccagcagtcccagtttgagccatcaccagatgatgggtccaccaggcactggcttccatggtagcactgtctccagcccccagagcagtgcagcgaccaccccggggagccccagcctgtgtcggcacccagcaggggtctaccaggtttctggcctccacaacaaagtggccaccaccccggggagtcccagcctgggccggcaccctggggctcaccaaggcaacctggcctccggtcttcatagcaatgcaatagccagccctggaagccccagcctgggccgtcacctcggagggtctggatctgtggttcccggcagcccctgcttggaccggcatgtggcctatggtggctattctaccccggaggatcggagacccacactgtcccggcagagcagtgcctctggctaccaggctccttccacgccctccttccctgtctcccctgcctactaccctggcctgagcagccctgccacctccccgtcaccagactccgcagccttccggcaagggagcccaacaccagccttgccagagaagcgaaggatgtcagtgggagaccgggcaggcagcctccccaactatgccaccatcaatgggaaggtgtcttcgcctgtcgccagcggcatgtccagtcccagtgggggcagcaccgtctccttctcccacactctgcccgacttctccaagtactccatgccagacaacagcccggagacgcgggctaaagtgaagtttgtccaggacacttctaagtattggtacaagcctgagatctccagggagcaggccatcgcgctcctcaaggaccaggagccgggggccttcatcatccgcgacagtcactccttccgaggcgcgtacgggctggccatgaaggtgtcttcgccacctccaaccatcatgcagcagaataaaaaaggagacatgacccatgagctggtcaggcattttctgatagagactggccccagaggagtcaagctcaagggctgccccaatgagccaaacttcggatcgctgtctgccctggtctaccagcactccatcatcccattggccctgccttgcaagctggtcattccaaaccgagaccccacagatgaatcgaaagatagctccggccctgccaactcaactgcagacctgctgaaacaaggggcagcctgcaatgtgctcttcgtcaactctgtggacatggagtcactcactgggccacaggccatctctaaagccacatctgagacgttggctgcagaccccacgccagctgccaccatcgttcacttcaaagtctctgcccagggaatcactctgactgacaaccagagaaagctctttttcagacgccactaccctctcaacactgtcaccttctgtgacctggatccacaggaaagaaagtggatgaaaacagagggtggtgcccctgctaagctcttcggcttcgtggcccggaagcagggcagcaccacggacaacgcctgccacctctttgctgagcttgaccccaaccagccggcctctgccatcgtcaacttcgtctccaaggtcatgctgaatgccggccaaaagagatgaaccctgccccttgcccagggccagtgccatggggaaggggcttgtggggaggggacccatgaatcctgaccactcttgaacccagaaggaggactttgggccaatttcggaggagagaagaaagtgcaacgtggggagagggaagtgaattgcagaggggagggggaaaagagagagagagagagagagagagagagagagaaagatggaggagaagaacttggattcccctgggtagatggaaactgcaaaaacccaaagcctccaaaactaaccaggtccacctaacaccccctccctcccctaagaagatggatgtcctcaaaagagaaggaacaaacctccttgggaatccacattttttgggggaatggaaaagctctgtctccctaactcaactgctttgcaaggggaaatcaagctgggagaatctttttctggccacctgtggggtaggttgtcaaaccaaacagagccaccgtgggacatcaagtggaagaacttgtttgcttgaaagtatctcagacccaaggcacctcaggtctctttgctgtgcctccactatattgtcgtgtgggtgtgtgtctgcacccacatcctcacacattgatctagatctgcctttatccactcgaattataaacagctcggcttgtccttgtcccatgtgtttgtagacacacatgcatactgtccaaagattagggttggtggtggcagtgcagcaggggagggacaaacaaccaagctatgggtgacagaggctctctcctggtgcctgcacctgcactctagtgaccctgggtgccgccagacccttctcttctacaaagaccccagcaggagtgggagggtctgcaatggcatcgccctgtcctgccttggccagaagcctggagctttggtttgaggaggtagagatatgtgtatccataggaagagatctgtcagaacaggcagctgttgagctcggggtgtcttccccaaggcatgtggctcagcagcaagaaaggcaagttgctcctgctggggccctggactctgccttagctcccacctctcagccttgttattgggtttcatgcccctggaccagccttatctcagacctgcttacctgcatgatgcctttttgggggctggggattgagtcttgctgctctgcccagccctgttctattctgcagggtccctgtgttggaattctccctggggaacctactttctgctcagtgaggctccggccagaaacctggagtccttatcctcccctctgtaagtgttttagggtctggcttttgcaggcaccctctgacctcagcagagctcctgggcctgctgcctgcacaccacatcgcctacctacaatgccaaagcctcactgtcaccctttctgccttggtttccctagctgagccacgctgcccatgcagcagagggcagaaggcttgcacttgggccaaagggcctaaggtccactggacagttgggaaaacacctgaccaccatttaaggactctaagccagaatggaaaattcaccaggactccattcttaagcctatgcgagtcccctagagagaggcattgtactgatatataaatattatataatatatacatgagacatactgacagaatctgtaagctaataaaatgtaagaaaaggttaaaaaaagaataggtaaattgacaagaagtatttattgtttttccatattgctttattgccttccttggggataaaccaattcctatccttttttatatgtgtaagtaaagcctgaagtgtagggggcctttgttcttgaagcagccagggtctccttgccctggccttggccttccctagactgtgtggggctcagcattgggaggggttgcacatgtcccagcctttggcccccttacttttcagcaagccaggggcccagcagtcagctcccaggatgtgtggggagctgtccctgactctgcaggcctgagcgagtgtgtgagcatgcggggacatgggtgtgtatggcacacataggtgcgtgtgtgtcttttgtattttttctcctccaaggagctgtgtcagtgtggacgttctgtttcagggagttggaaaggagggtgtctgcagaaggtggagagcaggggcagaggccccactggccaccccctgcttcccagagtgaaaccttgtgcctggtgaccaaagtccctccaaagtgctcttccttctgggttattcaagccaaatatctgggtttccccctctcctcattccctagcaaaccccaattatcttccaagataggagatatttcccatccccttcctttgtaaatatctcatctcccactggagagcccaggagcctattcctggcatggatgttctgtccacacttgaggctgggcggtgtatcagacccttcaagcagcctggctggggcccaggactgagtctggggtcagctttcacggtcgcttttcccttcctcaccacccaccacagcccaccttgcatgcatggccagcccctccactccagcctgagccatgtgtgcccctgcgggaggacccattcatgccagaaagctggtaactccctcccagcatccctgcggaaggagtcagtttctgagagtgtgacttttcaaggcgaatgatggggaagggttccccagtccccacagtggccccacctctgggccctgcaccagagcccttctgtgtcacggcgggctgtgcacccatgcacacacctacgcacacacaacactccgcactgcagtatattcttgccaaagatttcctttaaaagcaagcacttttactaattattattttgtaaatgtttatcttcttctgtcttctccctccctgaatctattttactgttgtttattgttgaatctgtgtgtcagccaggagagcgctgtctggccttgaacatgggctgggatgggaaagggtctgggagaagatgggcaacaaagagccagggagtcatggacatcgcagcgacgcagaccccagcaggttcagtcccgtgctgccaccagctgtccagctgggtgtctggagggaagagggcagaggagggtcatgtcccttcagctgggggaggggcccagtgagctccacgtggctttttcccaaagggagcaagagggaaggattgggcgagaaaacaatggagaggggacctgcgaaggaaaacagggaggaagtgagcggtttgatcagcctgctatcacggtgttctggctctcttatttagccaggcgcttaagggacagatacatcacatcctaagtttgggaaaggcctttgacccatgtcatctgagcgtctcctccagtagctctgaaagctgtggacaccaatggccaggattccttctcccctggtttttgaggatccctgggtcttctgagactggccaggagagggatggtggggccagtggttgtgtgaaagcaggaggggcagccctcctggacaagtgtgatccccctataaacggctctcaggaggttagtgagtaggagattctgccttgttctgatgagcctgtgcaggggctccaggggagcatgctgtccagggggcacagaagggtggtgagtgtgatcaaatctagtctcactcccactttttagtctcactcctacttttgtccaccacccctgcctcctggatcttctcccactttttttttcagctttaggacctggggagatcctgtgagtcaaggcagacacccaatcctgcccccacactcggggtcctccaagaggttggggggcagagtcccagagcagccctttaccccaggtccaggccctggaatcctgagactcgcgtttccttggccagtggtaacacaggacgtgtgtgcgcatgtgcaagtgtggatgtatgtgtgtgcgtgtgttttgctcatttctttagggaacttgggagtcggggttggaggtgctgggcaatggaacttcaaattcaatgtcgcccagcagtgaggggagtcgggaggtgaggcctgtaggccaaccaattggtggagtctcagcgatagcccaggtgagaagtggttcacccagaggggcagggtgggggcctcgggcagatctgtccctcttggcacctctgtcctcaaatgtccaaaatgttggaggacctctgttcatatcccacgcctgggctcttgccagcagtggagttactgtagagggatgtcccaagcttgttttccaatcagtgttaagctgtttgaaactctcctgtgtctgtgttttgtttgtgcgtgtgtgtgagagcacatcagtgtgtgcaggctgtgtttccccatttctctcctcccttcagacccatcattgagaacaaatgtaagaaatcccttcccaccaccctccctgcctcccaggccctctgcgggggaaacaagatcacccagcatccttccccaccccagctgtgtatttatatagatggaaatatactttatattttgtatcatcgtgcctatagccgctgccaccgtgtataaatcctggtgtatgctccttatcctggacatgaatgtattgtacactgacgcgtccccactcctgtacagctgctttgtttctttgcaatgcattgtatggctttataaatgataaagttaaagaaaactctg

SEQ ID NO: 31299 - DNA, 1792 bp, Homo sapiens
  source 1..1792: mol_type = unassigned DNA
gagccacccagtagtgtctgagtggtgatccactcttgcctgcaatgaggaccaaggcaaaaagagttggctgaatctgcagcaggaaggatgagggttagataccaggaggaaattcctgacagtgagaaaagtaagacactctgtctgggaggctgtcgaatttcctttcatggtgccctttcagcaaaggaaggattgtgttttggagggctccaccagggtcaccccgagtgtccagccccacctccagcccatcagaaacatgagtgtgagccggaccatggaggacagctgtgagctggacctggtgtacgtcacagagaggatcatcgctgtctccttccccagcacagccaatgaggagaacttccggagcaacctccgtgaggtggcgcagatgctcaagtccaaacatggaggcaactacctgctgttcaacctctctgagcggagacctgacatcacgaagctccatgccaaggtactggaatttggctggcccgacctccacaccccagccctggagaagatctgcagcatctgtaaggccatggacacatggctcaatgcagaccctcacaatgtcgttgttctacacaacaagggaaaccgaggcaggataggagttgtcatcgcggcttacatgcactacagcaacatttctgccagtgcggaccaggctctggaccggtttgcaatgaagcggttctatgaggataagattgtgcccattggccagccatcccaaagaaggtacgtgcattacttcagtggcctgctctccggctccatcaaaatgaacaacaagcccttgtttctgcaccacgtgatcatgcacggcatccccaactttgagtctaaaggaggatgtcggccatttctccgcatctaccaggccatgcaacctgtgtacacatctggcatctacaacatcccaggagacagccagactagcgtctgcatcaccatcgagccaggactgctcttgaagggagacatcttgctgaagtgctaccacaagaagttccgaagcccagcccgagacgtcatcttccgtgtgcagttccacacctgtgccatccatgacctgggggttgtctttgggaaggaggaccttgatgatgctttcaaagatgatcgatttccagagtatggcaaagtggagtttgtattttcttatgggccagagaaaattcaaggcatggagcacctggagaacgggccgagcgtgtctgtggactataacacctccgaccccctcatccgctgggactcctacgacaacttcagtgggcatcgagatgacggcatggaggatgggaacaaacagaataccaatagccagtcaattggaagcatctcaggtggcctggaggatcaatatacctggccagacacacactggccttcccaaagttaggccctccaaaatgtcaagttgccaagccagaatccaaagctttgcactgagaacttcatgttggggctcctgtcccctcctggagccctgcctgggtgacaccccagtccttctattcaggtcctgtgttcacctctgggaagtgcaggaccctgtggggttttttctttttccttttccaagccaaggaagtgttctggctcctggactctgccctgtggaggggaaagggggagagagagggaaaaaaagatttccaccttattgttcagcagctggaaaattgttgtcatctgttctgccttccatttgctgagaatggaaaaaaaatgtggaaaatttggggaaataaatctcaataccctcata

SEQ ID NO: 31300 - DNA, 667 bp, Homo sapiens
  source 1..667: mol_type = unassigned DNA
cttccctccgtccctccttccctccttccttcccgagcgcggattgcgggctggggtgggaggagatttcgcggagtttccatttcatacctcgcggctaaaactttctttctgtgtctcgccctcttgcagtctgcagcttctcctgtcatcggaaatgccaggccaaggtggctgccccctgcgttcctccatccaaccatgagctggtgcccatcaccactgagaatgcaccaaagaatgtagtggacaagggagaaggagcctcccggggtggaaacacacggaaaagcctcgaggacaacggctccaccagggtcaccccgagtgtccagccccacctccagcccatcagaaacatgagtgtgagccggaccatggaggacagctgtgagctggacctggtgtacgtcacagagaggatcatcgctgtctccttccccagcacagccaatgaggagaacttccggagcaacctccgtgaggtggcgcagatgctcaagtccaaacatggaggcaactacctgctgttcaacctctctgagcggagacctgacatcacgaagctccatgccaaggtactggaatttggctggcccgacctccacaccccagccctggagaagatctgcagcatctgtaaggccatggacacatggctcaatgc

SEQ ID NO: 31301 - DNA, 5900 bp, Homo sapiens
  source 1..5900: mol_type = unassigned DNA
aaccatgagctggtgcccatcaccactgagaatgcaccaaagaatgtagtggacaagggagaaggagcctcccggggtggaaacacacggaaaagcctcgaggacaacggctccaccagggtcaccccgagtgtccagccccacctccagcccatcagaaacatgagtgtgagccggaccatggaggacagctgtgagctggacctggtgtacgtcacagagaggatcatcgctgtctccttccccagcacagccaatgaggagaacttccggagcaacctccgtgaggtggcgcagatgctcaagtccaaacatggaggcaactacctgctgttcaacctctctgagcggagacctgacatcacgaagctccatgccaaggtactggaatttggctggcccgacctccacaccccagccctggagaagatctgcagcatctgtaaggccatggacacatggctcaatgcagaccctcacaatgtcgttgttctacacaacaagggaaaccgaggcaggataggagttgtcatcgcggcttacatgcactacagcaacatttctgccagtgcggaccaggctctggaccggtttgcaatgaagcggttctatgaggataagattgtgcccattggccagccatcccaaagaaggtacgtgcattacttcagtggcctgctctccggctccatcaaaatgaacaacaagcccttgtttctgcaccacgtgatcatgcacggcatccccaactttgagtctaaaggaggatgtcggccatttctccgcatctaccaggccatgcaacctgtgtacacatctggcatctacaacatcccaggagacagccagactagcgtctgcatcaccatcgagccaggactgctcttgaagggagacatcttgctgaagtgctaccacaagaagttccgaagcccagcccgagacgtcatcttccgtgtgcagttccacacctgtgccatccatgacctgggggttgtctttgggaaggaggaccttgatgatgctttcaaagatgatcgatttccagagtatggcaaagtggagtttgtattttcttatgggccagagaaaattcaaggcatggagcacctggagaacgggccgagcgtgtctgtggactataacacctccgaccccctcatccgctgggactcctacgacaacttcagtgggcatcgagatgacggcatggaggaggtggtgggacacacgcaggggccactagatgggagcctgtatgctaaggtgaagaagaaagactccctgcacggcagcaccggggctgttaatgccacacgtcctacactgtcggccacccccaaccacgtggaacacacgctttctgtgagcagcgactcgggcaactccacagcctccaccaagaccgacaagaccgacgagcctgtccccggggcctccagtgccactgctgccttgagtccccaggagaagcgggagctggaccgcctgctgagtggctttggcttagagcgagagaagcaaggcgccatgtaccacacccagcacctcaggtcccgcccagcagggggctcggctgtgccctcctctggacgccacgttgtcccagcccaggttcatgtcaatggtggggcgttagcatctgagcgggagacagacatcctggacgatgaattgccaaaccaggatggtcacagtgcgggcagcatgggcacactctcttctctggacggggtcaccaacaccagtgaggggggctacccagaggccctgtccccactgaccaacggtctggacaagtcctaccccatggagcctatggtcaatggaggaggctacccctacgagtctgccagccgggcggggcctgcccatgctggccacacggcccccatgcggccctcctactctgcacaggagggtttagctggctaccagagggaggggccccacccagcctggccacagccagtgaccacctcccactatgcccatgaccccagcggtatgttccgctctcaatccttttcggaagctgaaccccagctgcccccagctccggtccgagggggaagcagccgggaggctgtgcaaaggggactgaattcgtggcagcagcagcagcagcagcagcagcagcctcgcccacctccacgccagcaggaaagagcccacttggagagtcttgtagccagcaggcccagccctcagccattggcagagacccccatccccagtctccctgagttcccgcgagcagcctcccagcaggagattgaacagtccatcgaaacactcaatatgctgatgctggacctggagccagcctccgctgctgccccactacacaagtcccagagtgtccccggggcctggccaggggcttctccactctcctcccagcccctctctggatcctcccgtcagtcccatccactgacccagtccagatctggctatatccccagtgggcattcgttgggaacccctgagccagccccacgggcctctctggagtctgtccctcctggcaggtcttactcaccttatgactatcagccatgtttggctgggcctaaccaggatttccattcaaagagcccagcctcttcctccttgcctgccttccttccgaccacccacagccctccagggcctcagcaacccccagcctctctccctggcctcactgctcagcctctgctctcaccaaaggaagcgacttcagacccctcccggactccagaggaggagccattgaatttagaagggctggtggcccacagggtagcaggggtacaggctcgggagaagcagcctgcagagcccccagcccctctgcggaggcgggcggccagtgatggacagtatgagaaccagtctccagaagccacatcccctcgtagccctggggttcgctcccctgtccagtgtgtctccccggagctggctcttaccatcgctctcaatcctggagggcggcccaaagagccccatttgcacagctacaaggaggccttcgaggagatggagggaacctccccgagcagcccaccacccagtggggtgcggtcccccccgggtctggccaagacacccctgtctgctctgggcctgaaacctcacaacccagcggacatcctgttgcaccccacaggagagccccggagctatgtggagtctgtggcacggacagcggtggctggaccccgagctcaggactctgagcccaagagctttagtgctccagccacccaggcctatggccatgagatacccctgaggaacgggaccctgggtggctcctttgtctcccccagccccctctccaccagcagccccatcctcagtgctgacagcacttcagtggggagtttcccgtcgggagagagcagtgaccagggtccccggacgcccacccagcctctgttggagtctggcttccgctcaggcagcctgggacagcccagcccgtctgcccagagaaactaccagagctcttctcctctcccgactgtgggcagtagctacagcagccccgactactcacttcagcatttcagctcctctccggaaagccaggctcgagctcagttcagtgtggctggcgtccacacggtgcctgggagccctcaggcgcgccacagaacagtgggcaccaacactccccctagtcctggcttcggctggcgggccatcaatcccagcatggctgcccccagcagtcccagtttgagccatcaccagatgatgggtccaccaggcactggcttccatggtagcactgtctccagcccccagagcagtgcagcgaccaccccggggagccccagcctgtgtcggcacccagcaggggtctaccaggtttctggcctccacaacaaagtggccaccaccccggggagtcccagcctgggccggcaccctggggctcaccaaggcaacctggcctccggtcttcatagcaatgcaatagccagccctggaagccccagcctgggccgtcacctcggagggtctggatctgtggttcccggcagcccctgcttggaccggcatgtggcctatggtggctattctaccccggaggatcggagacccacactgtcccggcagagcagtgcctctggctaccaggctccttccacgccctccttccctgtctcccctgcctactaccctggcctgagcagccctgccacctccccgtcaccagactccgcagccttccggcaagggagcccaacaccagccttgccagagaagcgaaggatgtcagtgggagaccgggcaggcagcctccccaactatgccaccatcaatgggaaggtgtcttcgcctgtcgccagcggcatgtccagtcccagtgggggcagcaccgtctccttctcccacactctgcccgacttctccaagtactccatgccagacaacagcccggagacgcgggctaaagtgaagtttgtccaggacacttctaagtattggtacaagcctgagatctccagggagcaggccatcgcgctcctcaaggaccaggagccgggggccttcatcatccgcgacagtcactccttccgaggcgcgtacgggctggccatgaaggtgtcttcgccacctccaaccatcatgcagcagaataaaaaaggagacatgacccatgagctggtcaggcattttctgatagagactggccccagaggagtcaagctcaagggctgccccaatgagccaaacttcggatcgctgtctgccctggtctaccagcactccatcatcccattggccctgccttgcaagctggtcattccaaaccgagaccccacagatgaatcgaaagatagctccggccctgccaactcaactgcagacctgctgaaacaaggggcagcctgcaatgtgctcttcgtcaactctgtggacatggagtcactcactgggccacaggccatctctaaagccacatctgagacgttggctgcagaccccacgccagctgccaccatcgttcacttcaaagtctctgcccagggaatcactctgactgacaaccagagaaagctctttttcagacgccactaccctctcaacactgtcaccttctgtgacctggatccacaggaaagaaagtggatgaaaacagagggtggtgcccctgctaagctcttcggcttcgtggcccggaagcagggcagcaccacggacaacgcctgccacctctttgctgagcttgaccccaaccagccggcctctgccatcgtcaacttcgtctccaaggtcatgctgaatgccggccaaaagagatgaaccctgccccttgcccagggccagtgccatggggaaggggcttgtggggaggggacccatgaatcctgaccactcttgaacccagaaggaggactttgggccaatttcggaggagagaagaaagtgcaacgtggggagagggaagtgaattgcagaggggagggggaaaagagagagagagagagagagagagagagagagaaagatggaggagaagaacttggattcccctgggtagatggaaactgcaaaaacccaaagcctccaaaactaaccaggtccacctaacaccccctccctcccctaagaagatggatgtcctcaaaagagaaggaacaaacctccttgggaatccacattttttgggggaatggaaaagctctgtctccctaactcaactgctttgcaaggggaaatcaagctgggagaatctttttctggccacctgtggggtaggttgtcaaaccaaacagagccaccgtgggacatcaagtggaagaacttgtttgcttgaaagtatctcagacccaaggcacctcaggtctctttgctgtgcctccactatattgtcgtgtgggtgtgtgtctgcaccc

SEQ ID NO: 31302 - DNA, 538 bp, Homo sapiens
  source 1..538: mol_type = unassigned DNA
agtagccccacttggctcttccctccttcactgctgaggagctgctcattggtccgaggcagctgggactctgggcagagccttcttccggacagctggatggagggtccccctcttagcagagctgctctaacttggggctcagctgggagctggacctcggaacccacctatcctgcctcgtaggcactgcggagccaggagaggggtgcaggggctcctcttcttggagaccccgtggtcaagccccaggttggagtgtgaatcctgcctggccgtcaacttcccagggacttgaggggctccaccagggtcaccccgagtgtccagccccacctccagcccatcagaaacatgagtgtgagccggaccatggaggacagctgtgagctggacctggtgtacgtcacagagaggatcatcgctgtctccttccccagcacagccaatgaggagaacttccggagcaacctccgtgaggtggcgcagatgctcaagtccaaacatggaggcaactacctgctgttcaacctctctg

SEQ ID NO: 31303 - DNA, 582 bp, Homo sapiens
  source 1..582: mol_type = unassigned DNA
agttgctcccagcagtggccctgggaccagctctgctccttgcaccccgctccctgcctggacacaggctcactcgctgccttcttctgggggaaaccagcttcttgccagccacagctgctgcctccgccactggccaccgcccctgtcctgggagtcccttggcccagacacccacctgacttagtggctcctctgcaggaaaggtggctgccccctgcgttcctccatccaaccatgagctggtgcccatcaccactgagaatgcaccaaagaatgtagtggacaagggagaaggagcctcccggggtggaaacacacggaaaagcctcgaggacaacgcactgcggagccaggagaggggtgcaggggctcctcttcttggagaccccgtggtcaagccccaggttggagtgtgaatcctgcctggccgtcaacttcccagggacttgaggggctccaccagggtcaccccgagtgtccagccccacctccagcccatcagaaacatgagtgtgagccggaccatggaggacagctgtgagctggacctggtgtacgtcacagagaggatcatcgctg

SEQ ID NO: 31304 - DNA, 7618 bp, Homo sapiens
  source 1..7618: mol_type = unassigned DNA
agccagccaggaggacgggcccgcccgcgcgctactcggagcccagcctcgttgcggccatcgccctgccggaccgcgcctcaggctcccccagccggaagaattaacctcgagtctgcacgcttttaagaacaaggcctttaaaaaatccaaagtgtgtggagtttgcaaacaaattattgacggtcaaggtatttcatgccgagcctgcaagtattcctgccacaagaaatgtgaagccaaggtggtgattccctgcggtgtgcaagtccgactggaacaggctccagggagttccacgctgtccagttctctctgccgtgataaacctctgcggcccgtcatcctgagtcccaccatggaggagggccatgggctggacctcacttacatcacggagcgcatcatcgctgtgtccttccctgccggctgctctgaggagtcctacctgcacaacctacaggaggtcacgcgcatgctcaagtccaagcacggggacaactacctggtattaaacctttcagaaaagagatatgaccttacgaagcttaacccaaagatcatggatgtgggctggccagagctccacgcaccgcccctggataagatgtgtaccatatgcaaggcgcaggagtcctggctgaacagcaacctccagcatgtggtcgtcattcactgcaggggcgggaaaggacgcataggagtggtcatatcatcctacatgcatttcaccaacgtctcagccagcgccgaccaggcccttgacaggtttgcaatgaagaagttttatgatgacaaagtttcagctttaatgcagccttcccaaaaacggtatgttcagttcctcagtgggctcctgtccggatcggtgaaaatgaatgcctctcccctgttcctgcattttgtcatcctccacggcacccccaacttcgacacaggtggagtgtgccggccctttctgaagctctaccaagccatgcagcctgtgtacacctccgggatctacaacgttggcccagaaaaccccagcaggatctgcatcgtcatcgagccggcccagcttctgaagggagatgtcatggtgaaatgctaccacaagaaataccgctcggccacccgtgacgtcattttccgcctgcagtttcacactggggctgtgcagggctacgggctggtgtttgggaaggaggatctggacaatgccagcaaagatgaccgttttcctgactatgggaaggttgaattagtcttctctgccacgcctgagaagattcaagggtccgaacacttgtacaacgaccacggtgtgattgtggactacaacacaacagacccactgatacgctgggactcgtacgagaacctcagtgcagatggagaagtgctacacacgcagggccctgtcgatggcagcctttacgcgaaggtgaggaagaaaagctcctcggatcctggcatcccaggtggcccccaggcaatcccggccaccaacagcccagaccacagtgaccacaccttgtctgtcagcagtgactccggccactctacagcctctgccaggacggataagacggaagagcgcctggccccaggaaccaggaggggcctgagtgcccaggagaaggcagagttggaccagctgctcagtggctttggcctggaagatcctggaagctccctcaaggaaatgactgatgctcgaagcaagtacagtgggacccgccacgtggtgccagcccaggttcacgtgaatggagacgctgctctgaaggatcgggagacagacattctggatgacgagatgccccaccacgacctgcacagtgtggacagccttgggaccctgtcctcctcggaagggcctcagtcggcccacctgggtcccttcacctgccacaagagcagccagaactcactcctatctgacggttttggcagcaacgttggtgaagatccgcagggcaccctcgttccggacctgggccttggcatggacggcccctatgagcgggagcggacttttgggagtcgagagcccaagcagccccagcccctgctgagaaagccctcagtgtccgcccagatgcaggcctatgggcagagcagctactccacacagacctgggtgcgccagcagcagatggttgtagctcaccagtatagcttcgccccagatggggaggcccggctggtgagccgctgccctgcagacaatcctggcctcgtccaggcccagcccagagtgccactcacccccacccgagggaccagcagtagggtggctgtccagaggggtgtaggcagtgggccacatccccctgacacacagcagccctctcccagcaaagcgttcaaacccaggtttccaggagaccaggttgtgaatggagccggcccagagctgagcacaggcccctccccaggctcgcccaccctggacatcgaccagtccatcgagcagctcaacaggctgatcctggagctggatcccaccttcgagcccatccctacccacatgaacgccctcggtagccaggccaatggctctgtgtctccagacagcgtgggaggtgggctccgggcaagcagcaggctgcctgacacaggagagggccccagcagggccaccgggcggcaaggctcctctgctgaacagcccctgggcgggagactcaggaagctgagcctggggcagtacgacaacgatgctggggggcagctgcccttctccaaatgtgcatggggaaaggctggtgtggactatgccccaaacctgccgccattcccctcaccagcggacgtcaaagagacgatgacccctggctatccccaggacctcgatattatcgatggcagaattttaagtagcaaggagtccatgtgttcaactccagcatttcctgtgtctccagagacaccgtatgtgaaaacagcgctgcgccatcctccgttcagcccacctgagcccccgctgagcagcccagccagtcagcacaaaggaggacgtgaaccacgaagctgccctgagacgctcactcacgctgtggggatgtcagagagccccatcggacccaaatccacgatgctccgggctgatgcgtcctcgacgccctcctttcagcaggcttttgcttcttcctgcaccatttccagcaacggccctgggcagaggagagagagctcctcttctgcagaacgccagtgggtggagagcagccccaagcccatggtttccctgctggggagcggccggcccaccggaagtcccctcagcgctgagttctccggtaccaggaaggactccccagtgctgtcctgcttcccgccgtcagagctccaggctcctttccacagccatgagctgtccctagcagagccaccggactccctggcgcctcccagcagccaggccttcctgggcttcggcaccgccccagtgggaagtggccttccgcccgaggaggacctgggggccttgctggccaattctcatggagcgtcaccgacccccagcatcccgctgacagcgacaggggctgccgacaatggcttcctgtcccacaactttctcacggtggcgcctggacacagcagccaccacagtccaggcctgcagggccagggtgtgaccctgcccgggcagccacccctccctgagaagaagcgggcctcggagggggatcgttctttgggctcagtctctccctcctccagtggcttctccagcccgcacagcgggagcaccatcagtatccccttcccaaatgtccttcccgacttttccaaggcttcagaagcggcctcacctctgccagatagtccaggtgataaacttgtgatcgtgaaatttgttcaagacacttccaagttctggtacaaggcggatatttcaagagaacaagccatcgccatgttgaaggacaaggagccgggctcattcattgttcgagacagccattccttccgaggggcctatggcctggccatgaaggtggccacgcccccaccttcagtcctgcagctgaacaagaaagctggagatttggccaatgaactcgtccggcactttttgatcgagtgtaccccgaagggagtgcggttgaaagggtgctcgaatgaaccatatttcgggagcctgacggccttggtgtgccagcattccatcacgcccttggccttgccgtgcaagctgcttatcccagagagagatccattggaggaaatagcagaaagttctccccagacggcagccaattcagcagctgagctgttgaagcagggggcagcctgcaatgtgtggtacttgaactctgtggagatggagtccctcaccggccaccaggcgatccagaaggccctgagcatcaccctggtccaggagcctccacctgtgtccacagttgtgcacttcaaggtgtcagcccagggcatcaccctgacagacaatcagaggaagctcttcttccggaggcattaccccgtgaacagtgtgattttctgtgccttggacccacaagacaggaagtggatcaaagatggcccttcctcaaaagtctttggatttgtggcccggaagcagggcagtgccacggataatgtgtgccacctgtttgcagagcatgaccctgagcagcctgccagtgccattgtcaacttcgtatcaaaggtcatgattggttccccaaagaaggtctgagaactcccctccctccctggacccaccgatgcctctcgaagccctggagacagccgttgggtgagggtggggcccccactttttaccaaactagtaaacctgacattccaggcccatgaggggaaagaggatcttccagctctgcaaaaacaagaacaaacaacatcaccgtgaattggcctttcctgaaagtgacttatctgacacatctctgtagccacatgctttttgggtagaagaagctgggcatgggtgcaccccaccccctagggtccccatgggaaagggacatgcaaggaaacagcacagaacacgaggtggtccccatgtccctggcacactagcattccgggggatgaggaatccccagcccttgaggcagaggtgccgagtgactgccatgcttcgcccgtccgcatgggcgcttctgtccagctgcacccgaggccgggggtttccctcacctcggtcttcccaagatggagatgctaacgaaactgagaagggggcgtatgtttgacgaaggtttgtgcaagtcaggcccttctggaacacagcagggcctacaacgaggggcctttgcgatgggctgtgaggatgggggtggtgggaagaattggccacgttggagaccccatgccaccccaccatggtgagtgctctgtgcctcctgctcacctgtggtgagctgggcgagctgggcgagctgggcgagctgggctggggagagcctgtgaggaccgagaggagaaatgagaagaaggaacaaaaatattatttctatgtaatttatattttacttatgccaaattatttatgataatttgccattgctatactgtaccagtgtcaaatgctgcagcctgccaagctgtgattttgtgaggcttgtccctatgtaggatgcaccgcaggcccctggccactgaaagagtgtgcagtggactgtgggtctcccatatgcggtgccgcccaaaggtggctttgcctcaagcaacctaccctgatgttttactcattggaatgtttttccccgattgtggatgacttcttttctgatggagagagtccaggagggatggaaaactcctggatttaagctcagcatcccccacatgggcttttcgatcatcttcaggcctgaagctgcacgacctgaagttcgcctgcatttatcagccctctttgtgctgctccttgccaccttggggttcctgctggggaccatgtgtggttgtggcatgtgtgagcagaagggaggatgaggaaaaagagaagaaaccccggtactgacaagctgtttttgagtgccactgtttgccatcatctaagccactgaatcaagtgtatttcaggcttatttcaacattccaatgccctggttttcctgcttgaatctgttcgtggtcaaaggtttgggggaatttgtgaccctggaacatccccagagtgaaagatggagctgggccacatcagaataaggccttggccccatcctctcacagcctaggtgctctgcaggcatgctgactgtcctgattgcgatccagcccgaaattccctcctctgctttcaaaagtcaaatcccccattcttaggccacactggtgtcacaagctcctgtcagggagctggggtttgggaatgtgctttgtgaactctgctttaaagtgaggggccgaggaaaacttagaaacaggcagagttggaagcagccaaatcacagtgggtgttgtgtgtgtgtgcgtgtgtgcatgcgtgcgtgtatgcgtgtgtgaaagcaggtggaccattccactttttagctcctattgatgcaccaaaccaagtgcctcatttctgtgccaaatgtttgccttggtcgttgtggacctccttctctaacttgcggtggcatgactgtcaggaggtgctggcattttcagcagatcctcatgtgttgaccctgatgtctttagcagaggcctctagcatctcggtttttcatccactgcaggaatgtggccacagggagcagaggtttgtactttccccaagaggtcctcatcctgagacggtctctacccatgtttaacccaaagagtgcaggccaggttccttatccttctgatgaaggatgagagagctcatttagaagtcagagcaaactagggtctcagtattgagaaacgcagcctgccagggaatcacagagacatcggggtgcccgcgatggccctcatgaagccatgcctcgacggcattcaggaagccctgcaaacgtgctttttgaactcattggccaggtgtgatttttacacaaggtaaacgtggtcaagggcatcggggaatttgctccaagcagatagctccctctgaggaaccaaaggaagcaagtttccacgatttctgaagagctggtataggaagtttctttcttccttttgtgttacatgtgcattaaacagaacaagctgtgtgtcatcacagattgtactgtgggctcagaaaccgtgagagagcccccaccgtggacaccggctctagggccacaggaaaaggaacgtttccaggcattttgtctccagggctcccgctggacaggcacgtactgccctggggagtaaatgcggagagttcacgaactgtgcccaacgcatgttatagccagggtcctactaactactcagtaaaagaacgtattgttgtattcctccagtgttaagctatagccatgttaaaagtcactgtgcatttattctcagcatcaaataccttgtaacgtcttctctgccttgttagtgcatatttttacttttctgatactgtaaagaatatatccagtatgtaaatgaatgttctataaatcttttgtatagtcattttctctgctccttaaatatcatctctattcagagtataataaaattatgaacttggtaa

SEQ ID NO: 31305 - DNA, 6905 bp, Homo sapiens
  source 1..6905: mol_type = unassigned DNA
agaatgggaaactgccttgggagaagccccaagtgagcccaagggcgcagagcagaaggaccctggagtgtaagagcctagattgcaagcctggcaggaggagccggaagaattaacctcgagtctgcacgcttttaagaacaaggcctttaaaaaatccaaagtgtgtggagtttgcaaacaaattattgacggtcaaggtatttcatgccgagcctgcaagtattcctgccacaagaaatgtgaagccaaggtggtgattccctgcggtgtgcaagtccgactggaacaggctccagggagttccacgctgtccagttctctctgccgtgataaacctctgcggcccgtcatcctgagtcccaccatggaggagggccatgggctggacctcacttacatcacggagcgcatcatcgctgtgtccttccctgccggctgctctgaggagtcctacctgcacaacctacaggaggtcacgcgcatgctcaagtccaagcacggggacaactacctggtattaaacctttcagaaaagagatatgaccttacgaagcttaacccaaagatcatggatgtgggctggccagagctccacgcaccgcccctggataagatgtgtaccatatgcaaggcgcaggagtcctggctgaacagcaacctccagcatgtggtcgtcattcactgcaggggcgggaaaggacgcataggagtggtcatatcatcctacatgcatttcaccaacgtctcagccagcgccgaccaggcccttgacaggtttgcaatgaagaagttttatgatgacaaagtttcagctttaatgcagccttcccaaaaacggtatgttcagttcctcagtgggctcctgtccggatcggtgaaaatgaatgcctctcccctgttcctgcattttgtcatcctccacggcacccccaacttcgacacaggtggagtgtgccggccctttctgaagctctaccaagccatgcagcctgtgtacacctccgggatctacaacgttggcccagaaaaccccagcaggatctgcatcgtcatcgagccggcccagcttctgaagggagatgtcatgatgccccaccacgacctgcacagtgtggacagccttgggaccctgtcctcctcggaagggcctcagtcggcccacctgggtcccttcacctgccacaagagcagccagaactcactcctatctgacggttttggcagcaacgttggtgaagatccgcagggcaccctcgttccggacctgggccttggcatggacggcccctatgagcgggagcggacttttgggagtcgagagcccaagcagccccagcccctgctgagaaagccctcagtgtccgcccagatgcaggcctatgggcagagcagctactccacacagacctgggtgcgccagcagcagatggttgtagctcaccagtatagcttcgccccagatggggaggcccggctggtgagccgctgccctgcagacaatcctggcctcgtccaggcccagcccagagtgccactcacccccacccgagggaccagcagtagggtggctgtccagaggggtgtaggcagtgggccacatccccctgacacacagcagccctctcccagcaaagcgttcaaacccaggtttccaggagaccaggttgtgaatggagccggcccagagctgagcacaggcccctccccaggctcgcccaccctggacatcgaccagtccatcgagcagctcaacaggctgatcctggagctggatcccaccttcgagcccatccctacccacatgaacgccctcggtagccaggccaatggctctgtgtctccagacagcgtgggaggtgggctccgggcaagcagcaggctgcctgacacaggagagggccccagcagggccaccgggcggcaaggctcctctgctgaacagcccctgggcgggagactcaggaagctgagcctggggcagtacgacaacgatgctggggggcagctgcccttctccaaatgtgcatggggaaaggctggtgtggactatgccccaaacctgccgccattcccctcaccagcggacgtcaaagagacgatgacccctggctatccccaggacctcgatattatcgatggcagaattttaagtagcaaggagtccatgtgttcaactccagcatttcctgtgtctccagagacaccgtatgtgaaaacagcgctgcgccatcctccgttcagcccacctgagcccccgctgagcagcccagccagtcagcacaaaggaggacgtgaaccacgaagctgccctgagacgctcactcacgctgtggggatgtcagagagccccatcggacccaaatccacgatgctccgggctgatgcgtcctcgacgccctcctttcagcaggcttttgcttcttcctgcaccatttccagcaacggccctgggcagaggagagagagctcctcttctgcagaacgccagtgggtggagagcagccccaagcccatggtttccctgctggggagcggccggcccaccggaagtcccctcagcgctgagttctccggtaccaggaaggactccccagtgctgtcctgcttcccgccgtcagagctccaggctcctttccacagccatgagctgtccctagcagagccaccggactccctggcgcctcccagcagccaggccttcctgggcttcggcaccgccccagtgggaagtggccttccgcccgaggaggacctgggggccttgctggccaattctcatggagcgtcaccgacccccagcatcccgctgacagcgacaggggctgccgacaatggcttcctgtcccacaactttctcacggtggcgcctggacacagcagccaccacagtccaggcctgcagggccagggtgtgaccctgcccgggcagccacccctccctgagaagaagcgggcctcggagggggatcgttctttgggctcagtctctccctcctccagtggcttctccagcccgcacagcgggagcaccatcagtatccccttcccaaatgtccttcccgacttttccaaggcttcagaagcggcctcacctctgccagatagtccaggtgataaacttgtgatcgtgaaatttgttcaagacacttccaagttctggtacaaggcggatatttcaagagaacaagccatcgccatgttgaaggacaaggagccgggctcattcattgttcgagacagccattccttccgaggggcctatggcctggccatgaaggtggccacgcccccaccttcagtcctgcagctgaacaagaaagctggagatttggccaatgaactcgtccggcactttttgatcgagtgtaccccgaagggagtgcggttgaaagggtgctcgaatgaaccatatttcgggagcctgacggccttggtgtgccagcattccatcacgcccttggccttgccgtgcaagctgcttatcccagagagagatccattggaggaaatagcagaaagttctccccagacggcagccaattcagcagctgagctgttgaagcagggggcagcctgcaatgtgtggtacttgaactctgtggagatggagtccctcaccggccaccaggcgatccagaaggccctgagcatcaccctggtccaggagcctccacctgtgtccacagttgtgcacttcaaggtgtcagcccagggcatcaccctgacagacaatcagaggaagctcttcttccggaggcattaccccgtgaacagtgtgattttctgtgccttggacccacaagacaggaagtggatcaaagatggcccttcctcaaaagtctttggatttgtggcccggaagcagggcagtgccacggataatgtgtgccacctgtttgcagagcatgaccctgagcagcctgccagtgccattgtcaacttcgtatcaaaggtcatgattggttccccaaagaaggtctgagaactcccctccctccctggacccaccgatgcctctcgaagccctggagacagccgttgggtgagggtggggcccccactttttaccaaactagtaaacctgacattccaggcccatgaggggaaagaggatcttccagctctgcaaaaacaagaacaaacaacatcaccgtgaattggcctttcctgaaagtgacttatctgacacatctctgtagccacatgctttttgggtagaagaagctgggcatgggtgcaccccaccccctagggtccccatgggaaagggacatgcaaggaaacagcacagaacacgaggtggtccccatgtccctggcacactagcattccgggggatgaggaatccccagcccttgaggcagaggtgccgagtgactgccatgcttcgcccgtccgcatgggcgcttctgtccagctgcacccgaggccgggggtttccctcacctcggtcttcccaagatggagatgctaacgaaactgagaagggggcgtatgtttgacgaaggtttgtgcaagtcaggcccttctggaacacagcagggcctacaacgaggggcctttgcgatgggctgtgaggatgggggtggtgggaagaattggccacgttggagaccccatgccaccccaccatggtgagtgctctgtgcctcctgctcacctgtggtgagctgggcgagctgggcgagctgggcgagctgggctggggagagcctgtgaggaccgagaggagaaatgagaagaaggaacaaaaatattatttctatgtaatttatattttacttatgccaaattatttatgataatttgccattgctatactgtaccagtgtcaaatgctgcagcctgccaagctgtgattttgtgaggcttgtccctatgtaggatgcaccgcaggcccctggccactgaaagagtgtgcagtggactgtgggtctcccatatgcggtgccgcccaaaggtggctttgcctcaagcaacctaccctgatgttttactcattggaatgtttttccccgattgtggatgacttcttttctgatggagagagtccaggagggatggaaaactcctggatttaagctcagcatcccccacatgggcttttcgatcatcttcaggcctgaagctgcacgacctgaagttcgcctgcatttatcagccctctttgtgctgctccttgccaccttggggttcctgctggggaccatgtgtggttgtggcatgtgtgagcagaagggaggatgaggaaaaagagaagaaaccccggtactgacaagctgtttttgagtgccactgtttgccatcatctaagccactgaatcaagtgtatttcaggcttatttcaacattccaatgccctggttttcctgcttgaatctgttcgtggtcaaaggtttgggggaatttgtgaccctggaacatccccagagtgaaagatggagctgggccacatcagaataaggccttggccccatcctctcacagcctaggtgctctgcaggcatgctgactgtcctgattgcgatccagcccgaaattccctcctctgctttcaaaagtcaaatcccccattcttaggccacactggtgtcacaagctcctgtcagggagctggggtttgggaatgtgctttgtgaactctgctttaaagtgaggggccgaggaaaacttagaaacaggcagagttggaagcagccaaatcacagtgggtgttgtgtgtgtgtgcgtgtgtgcatgcgtgcgtgtatgcgtgtgtgaaagcaggtggaccattccactttttagctcctattgatgcaccaaaccaagtgcctcatttctgtgccaaatgtttgccttggtcgttgtggacctccttctctaacttgcggtggcatgactgtcaggaggtgctggcattttcagcagatcctcatgtgttgaccctgatgtctttagcagaggcctctagcatctcggtttttcatccactgcaggaatgtggccacagggagcagaggtttgtactttccccaagaggtcctcatcctgagacggtctctacccatgtttaacccaaagagtgcaggccaggttccttatccttctgatgaaggatgagagagctcatttagaagtcagagcaaactagggtctcagtattgagaaacgcagcctgccagggaatcacagagacatcggggtgcccgcgatggccctcatgaagccatgcctcgacggcattcaggaagccctgcaaacgtgctttttgaactcattggccaggtgtgatttttacacaaggtaaacgtggtcaagggcatcggggaatttgctccaagcagatagctccctctgaggaaccaaaggaagcaagtttccacgatttctgaagagctggtataggaagtttctttcttccttttgtgttacatgtgcattaaacagaacaagctgtgtgtcatcacagattgtactgtgggctcagaaaccgtgagagagcccccaccgtggacaccggctctagggccacaggaaaaggaacgtttccaggcattttgtctccagggctcccgctggacaggcacgtactgccctggggagtaaatgcggagagttcacgaactgtgcccaacgcatgttatagccagggtcctactaactactcagtaaaagaacgtattgttgtattcctccagtgttaagctatagccatgttaaaagtcactgtgcatttattctcagcatcaaataccttgtaacgtcttctctgccttgttagtgcatatttttacttttctgatactgtaaagaatatatccagtatgtaaatgaatgttctataaatcttttgtatagtcattttctctgctccttaaatatcatctctattcagagtataataaaattatgaacttggt

SEQ ID NO: 31306 - DNA, 7625 bp, Homo sapiens
  source 1..7625: mol_type = unassigned DNA
agaatgggaaactgccttgggagaagccccaagtgagcccaagggcgcagagcagaaggaccctggagtgtaagagcctagattgcaagcctggcaggaggagccggaagaattaacctcgagtctgcacgcttttaagaacaaggcctttaaaaaatccaaagtgtgtggagtttgcaaacaaattattgacggtcaaggtatttcatgccgagcctgcaagtattcctgccacaagaaatgtgaagccaaggtggtgattccctgcggtgtgcaagtccgactggaacaggctccagggagttccacgctgtccagttctctctgccgtgataaacctctgcggcccgtcatcctgagtcccaccatggaggagggccatgggctggacctcacttacatcacggagcgcatcatcgctgtgtccttccctgccggctgctctgaggagtcctacctgcacaacctacaggaggtcacgcgcatgctcaagtccaagcacggggacaactacctggtattaaacctttcagaaaagagatatgaccttacgaagcttaacccaaagatcatggatgtgggctggccagagctccacgcaccgcccctggataagatgtgtaccatatgcaaggcgcaggagtcctggctgaacagcaacctccagcatgtggtcgtcattcactgcaggggcgggaaaggacgcataggagtggtcatatcatcctacatgcatttcaccaacgtctcagccagcgccgaccaggcccttgacaggtttgcaatgaagaagttttatgatgacaaagtttcagctttaatgcagccttcccaaaaacggtatgttcagttcctcagtgggctcctgtccggatcggtgaaaatgaatgcctctcccctgttcctgcattttgtcatcctccacggcacccccaacttcgacacaggtggagtgtgccggccctttctgaagctctaccaagccatgcagcctgtgtacacctccgggatctacaacgttggcccagaaaaccccagcaggatctgcatcgtcatcgagccggcccagcttctgaagggagatgtcatggtgaaatgctaccacaagaaataccgctcggccacccgtgacgtcattttccgcctgcagtttcacactggggctgtgcagggctacgggctggtgtttgggaaggaggatctggacaatgccagcaaagatgaccgttttcctgactatgggaaggttgaattagtcttctctgccacgcctgagaagattcaagggtccgaacacttgtacaacgaccacggtgtgattgtggactacaacacaacagacccactgatacgctgggactcgtacgagaacctcagtgcagatggagaagtgctacacacgcagggccctgtcgatggcagcctttacgcgaaggtgaggaagaaaagctcctcggatcctggcatcccaggtggcccccaggcaatcccggccaccaacagcccagaccacagtgaccacaccttgtctgtcagcagtgactccggccactctacagcctctgccaggacggataagacggaagagcgcctggccccaggaaccaggaggggcctgagtgcccaggagaaggcagagttggaccagctgctcagtggctttggcctggaagatcctggaagctccctcaaggaaatgactgatgctcgaagcaagtacagtgggacccgccacgtggtgccagcccaggttcacgtgaatggagacgctgctctgaaggatcgggagacagacattctggatgacgagatgccccaccacgacctgcacagtgtggacagccttgggaccctgtcctcctcggaagggcctcagtcggcccacctgggtcccttcacctgccacaagagcagccagaactcactcctatctgacggttttggcagcaacgttggtgaagatccgcagggcaccctcgttccggacctgggccttggcatggacggcccctatgagcgggagcggacttttgggagtcgagagcccaagcagccccagcccctgctgagaaagccctcagtgtccgcccagatgcaggcctatgggcagagcagctactccacacagacctgggtgcgccagcagcagatggttgtagctcaccagtatagcttcgccccagatggggaggcccggctggtgagccgctgccctgcagacaatcctggcctcgtccaggcccagcccagagtgccactcacccccacccgagggaccagcagtagggtggctgtccagaggggtgtaggcagtgggccacatccccctgacacacagcagccctctcccagcaaagcgttcaaacccaggtttccaggagaccaggttgtgaatggagccggcccagagctgagcacaggcccctccccaggctcgcccaccctggacatcgaccagtccatcgagcagctcaacaggctgatcctggagctggatcccaccttcgagcccatccctacccacatgaacgccctcggtagccaggccaatggctctgtgtctccagacagcgtgggaggtgggctccgggcaagcagcaggctgcctgacacaggagagggccccagcagggccaccgggcggcaaggctcctctgctgaacagcccctgggcgggagactcaggaagctgagcctggggcagtacgacaacgatgctggggggcagctgcccttctccaaatgtgcatggggaaaggctggtgtggactatgccccaaacctgccgccattcccctcaccagcggacgtcaaagagacgatgacccctggctatccccaggacctcgatattatcgatggcagaattttaagtagcaaggagtccatgtgttcaactccagcatttcctgtgtctccagagacaccgtatgtgaaaacagcgctgcgccatcctccgttcagcccacctgagcccccgctgagcagcccagccagtcagcacaaaggaggacgtgaaccacgaagctgccctgagacgctcactcacgctgtggggatgtcagagagccccatcggacccaaatccacgatgctccgggctgatgcgtcctcgacgccctcctttcagcaggcttttgcttcttcctgcaccatttccagcaacggccctgggcagaggagagagagctcctcttctgcagaacgccagtgggtggagagcagccccaagcccatggtttccctgctggggagcggccggcccaccggaagtcccctcagcgctgagttctccggtaccaggaaggactccccagtgctgtcctgcttcccgccgtcagagctccaggctcctttccacagccatgagctgtccctagcagagccaccggactccctggcgcctcccagcagccaggccttcctgggcttcggcaccgccccagtgggaagtggccttccgcccgaggaggacctgggggccttgctggccaattctcatggagcgtcaccgacccccagcatcccgctgacagcgacaggggctgccgacaatggcttcctgtcccacaactttctcacggtggcgcctggacacagcagccaccacagtccaggcctgcagggccagggtgtgaccctgcccgggcagccacccctccctgagaagaagcgggcctcggagggggatcgttctttgggctcagtctctccctcctccagtggcttctccagcccgcacagcgggagcaccatcagtatccccttcccaaatgtccttcccgacttttccaaggcttcagaagcggcctcacctctgccagatagtccaggtgataaacttgtgatcgtgaaatttgttcaagacacttccaagttctggtacaaggcggatatttcaagagaacaagccatcgccatgttgaaggacaaggagccgggctcattcattgttcgagacagccattccttccgaggggcctatggcctggccatgaaggtggccacgcccccaccttcagtcctgcagctgaacaagaaagctggagatttggccaatgaactcgtccggcactttttgatcgagtgtaccccgaagggagtgcggttgaaagggtgctcgaatgaaccatatttcgggagcctgacggccttggtgtgccagcattccatcacgcccttggccttgccgtgcaagctgcttatcccagagagagatccattggaggaaatagcagaaagttctccccagacggcagccaattcagcagctgagctgttgaagcagggggcagcctgcaatgtgtggtacttgaactctgtggagatggagtccctcaccggccaccaggcgatccagaaggccctgagcatcaccctggtccaggagcctccacctgtgtccacagttgtgcacttcaaggtgtcagcccagggcatcaccctgacagacaatcagaggaagctcttcttccggaggcattaccccgtgaacagtgtgattttctgtgccttggacccacaagacaggaagtggatcaaagatggcccttcctcaaaagtctttggatttgtggcccggaagcagggcagtgccacggataatgtgtgccacctgtttgcagagcatgaccctgagcagcctgccagtgccattgtcaacttcgtatcaaaggtcatgattggttccccaaagaaggtctgagaactcccctccctccctggacccaccgatgcctctcgaagccctggagacagccgttgggtgagggtggggcccccactttttaccaaactagtaaacctgacattccaggcccatgaggggaaagaggatcttccagctctgcaaaaacaagaacaaacaacatcaccgtgaattggcctttcctgaaagtgacttatctgacacatctctgtagccacatgctttttgggtagaagaagctgggcatgggtgcaccccaccccctagggtccccatgggaaagggacatgcaaggaaacagcacagaacacgaggtggtccccatgtccctggcacactagcattccgggggatgaggaatccccagcccttgaggcagaggtgccgagtgactgccatgcttcgcccgtccgcatgggcgcttctgtccagctgcacccgaggccgggggtttccctcacctcggtcttcccaagatggagatgctaacgaaactgagaagggggcgtatgtttgacgaaggtttgtgcaagtcaggcccttctggaacacagcagggcctacaacgaggggcctttgcgatgggctgtgaggatgggggtggtgggaagaattggccacgttggagaccccatgccaccccaccatggtgagtgctctgtgcctcctgctcacctgtggtgagctgggcgagctgggcgagctgggcgagctgggctggggagagcctgtgaggaccgagaggagaaatgagaagaaggaacaaaaatattatttctatgtaatttatattttacttatgccaaattatttatgataatttgccattgctatactgtaccagtgtcaaatgctgcagcctgccaagctgtgattttgtgaggcttgtccctatgtaggatgcaccgcaggcccctggccactgaaagagtgtgcagtggactgtgggtctcccatatgcggtgccgcccaaaggtggctttgcctcaagcaacctaccctgatgttttactcattggaatgtttttccccgattgtggatgacttcttttctgatggagagagtccaggagggatggaaaactcctggatttaagctcagcatcccccacatgggcttttcgatcatcttcaggcctgaagctgcacgacctgaagttcgcctgcatttatcagccctctttgtgctgctccttgccaccttggggttcctgctggggaccatgtgtggttgtggcatgtgtgagcagaagggaggatgaggaaaaagagaagaaaccccggtactgacaagctgtttttgagtgccactgtttgccatcatctaagccactgaatcaagtgtatttcaggcttatttcaacattccaatgccctggttttcctgcttgaatctgttcgtggtcaaaggtttgggggaatttgtgaccctggaacatccccagagtgaaagatggagctgggccacatcagaataaggccttggccccatcctctcacagcctaggtgctctgcaggcatgctgactgtcctgattgcgatccagcccgaaattccctcctctgctttcaaaagtcaaatcccccattcttaggccacactggtgtcacaagctcctgtcagggagctggggtttgggaatgtgctttgtgaactctgctttaaagtgaggggccgaggaaaacttagaaacaggcagagttggaagcagccaaatcacagtgggtgttgtgtgtgtgtgcgtgtgtgcatgcgtgcgtgtatgcgtgtgtgaaagcaggtggaccattccactttttagctcctattgatgcaccaaaccaagtgcctcatttctgtgccaaatgtttgccttggtcgttgtggacctccttctctaacttgcggtggcatgactgtcaggaggtgctggcattttcagcagatcctcatgtgttgaccctgatgtctttagcagaggcctctagcatctcggtttttcatccactgcaggaatgtggccacagggagcagaggtttgtactttccccaagaggtcctcatcctgagacggtctctacccatgtttaacccaaagagtgcaggccaggttccttatccttctgatgaaggatgagagagctcatttagaagtcagagcaaactagggtctcagtattgagaaacgcagcctgccagggaatcacagagacatcggggtgcccgcgatggccctcatgaagccatgcctcgacggcattcaggaagccctgcaaacgtgctttttgaactcattggccaggtgtgatttttacacaaggtaaacgtggtcaagggcatcggggaatttgctccaagcagatagctccctctgaggaaccaaaggaagcaagtttccacgatttctgaagagctggtataggaagtttctttcttccttttgtgttacatgtgcattaaacagaacaagctgtgtgtcatcacagattgtactgtgggctcagaaaccgtgagagagcccccaccgtggacaccggctctagggccacaggaaaaggaacgtttccaggcattttgtctccagggctcccgctggacaggcacgtactgccctggggagtaaatgcggagagttcacgaactgtgcccaacgcatgttatagccagggtcctactaactactcagtaaaagaacgtattgttgtattcctccagtgttaagctatagccatgttaaaagtcactgtgcatttattctcagcatcaaataccttgtaacgtcttctctgccttgttagtgcatatttttacttttctgatactgtaaagaatatatccagtatgtaaatgaatgttctataaatcttttgtatagtcattttctctgctccttaaatatcatctctattcagagtataataaaattatgaacttggt

SEQ ID NO: 31307 - DNA, 698 bp, Homo sapiens
  source 1..698: mol_type = unassigned DNA
aggctggccctcagccccgggcggacattgtcctgtgagctccatgcctgcgtgctcaccgtggggccgggcacacctgccagctgctcctggctgtggttctggggactcccacactcaccaggctctcccacctggtgggctattccagctgcctcctttatgcccagagctgccgagacattaacacgaagaggggtgtgcttgactaaagcaggggaaggagcgaaacgtaggaggagctgtttctggaagggaaaagcagccctggccggtggtccctgcccaggcccagcacagctccagggagttccacgctgtccagttctctctgccgtgataaacctctgcggcccgtcatcctgagtcccaccatggaggagggccatgggctggacctcacttacatcacggagcgcatcatcgctgtgtccttccctgccggctgctctgaggagtcctacctgcacaacctacaggaggtcacgcgcatgctcaagtccaagcacggggacaactacctggtattaaacctttcagaaaagagatatgaccttacgaagcttaacccaaagatcatggatgtgggctggccagagctccacgcaccgcccctggataagatgtgtaccatatgcaaggcgcaggagtcctggctgaacagcaacctccagcatgtggtcgtcattcactgcagg

SEQ ID NO: 31308 - DNA, 570 bp, Homo sapiens
  source 1..570: mol_type = unassigned DNA
ttgtcagtcttgatctgctacagctttgtagccagagtgaggtggtgattccctgcggtgtgcaagtccgactggaacaggctccagggagttccacgctgtccagttctctctgccgtgataaacctctgcggcccgtcatcctgagtcccaccatggaggagggccatgggctggacctcacttacatcacggagcgcatcatcgctgtgtccttccctgccggctgctctgaggagtcctacctgcacaacctacaggaggtcacgcgcatgctcaagtccaagcacggggacaactacctggtattaaacctttcagaaaagagatatgaccttacgaagcttaacccaaagatcatggatgtgggctggccagagctccacgcaccgcccctggataagatgtgtaccatatgcaaggcgcaggagtcctggctgaacagcaacctccagcatgtggtcgtcattcactgcaggggcgggaaaggacgcataggagtggtcatatcatcctacatgcatttcaccaacgtctcagccagcgccgaccaggcccttgacaggtttg

SEQ ID NO: 31309 - DNA, 1166 bp, Homo sapiens
  source 1..1166: mol_type = unassigned DNA
agaatgggaaactgccttgggagaagccccaagtgagcccaagggcgcagagcagaaggaccctggagtgtaagagcctagattgcaagcctggcaggaggagccggaagaattaacctcgagtctgcacgcttttaagaacaaggcctttaaaaaatccaaagtgtgtggagtttgcaaacaaattattgacggtcaaggtatttcatgccgagcctgcaagtattcctgccacaagaaatgtgaagccaaggtggtgattccctgcggtgtgcaagtccgactggaacaggctccagggagttccacgctgtccagttctctctgccgtgataaacctctgcggcccgtcatcctgagtcccaccatggaggagggccatgggctggacctcacttacatcacggagcgcatcatcgctgtgtccttccctgccggctgctctgaggagtcctacctgcacaacctacaggaggtcacgcgcatgctcaagtccaagcacggggacaactacctggtattaaacctttcagaaaagagatatgaccttacgaagcttaacccaaagatcatggatgtgggctggccagagctccacgcaccgcccctggataagatgtgtaccatatgcaaggcgcaggagtcctggctgaacagcaacctccagcatgtggtcgtcattcactgcaggggcgggaaaggacgcataggagtggtcatatcatcctacatgcatttcaccaacgtctcagccagcgccgaccaggcccttgacaggtttgcaatgaagaagttttatgatgacaaagtttcagctttaatgcagccttcccaaaaacggtatgttcagttcctcagtgggctcctgtccggatcggtgaaaatgaatgcctctcccctgttcctgcattttgtcatcctccacggcacccccaacttcgacacaggtggagtgtgccggccctttctgaagctctaccaagccatgcagcctgtgtacacctccgggatctacaacgttggcccagaaaaccccagcaggatctgcatcgtcatcgagccggcccagcttctgaagggagatgtcatggtcatgaattacaatattgcgaacatctgaagtcattttcagctccaagtgaagaaatcatggtgaaatgctacca

SEQ ID NO: 31310 - DNA, 1156 bp, Homo sapiens
  source 1..1156: mol_type = unassigned DNA
agaatgggaaactgccttgggagaagccccaagtgagcccaagggcgcagagcagaaggaccctggagtgtaagagcctagattgcaagcctggcaggaggagccggaagaattaacctcgagtctgcacgcttttaagaacaaggcctttaaaaaatccaaagtgtgtggagtttgcaaacaaattattgacggtcaaggtatttcatgccgagcctgcaagtattcctgccacaagaaatgtgaagccaaggtggtgattccctgcggtgtgcaagtccgactggaacaggctccagggagttccacgctgtccagttctctctgccgtgataaacctctgcggcccgtcatcctgagtcccaccatggaggagggccatgggctggacctcacttacatcacggagcgcatcatcgctgtgtccttccctgccggctgctctgaggagtcctacctgcacaacctacaggaggtcacgcgcatgctcaagtccaagcacggggacaactacctggtattaaacctttcagaaaagagatatgaccttacgaagcttaacccaaagatcatggatgtgggctggccagagctccacgcaccgcccctggataagatgtgtaccatatgcaaggcgcaggagtcctggctgaacagcaacctccagcatgtggtcgtcattcactgcaggggcgggaaaggacgcataggagtggtcatatcatcctacatgcatttcaccaacgtctcagccagcgccgaccaggcccttgacaggtttgcaatgaagaagttttatgatgacaaagtttcagctttaatgcagccttcccaaaaacggtatgttcagttcctcagtgggctcctgtccggatcggtgaaaatgaatgcctctcccctgttcctgcattttgtcatcctccacggcacccccaacttcgacacaggtggagtgtgccggccctttctgaagctctaccaagccatgcagcctgtgtacacctccgggatctacaacgttggcccagaaaaccccagcaggatctgcatcgtcatcgagccggcccagcttctgaagggagatgtcatggtcatgaattacaatattgcgaacatctgaagtcattttcagctccaagtgaagaaatcatggtta

SEQ ID NO: 31311 - DNA, 6683 bp, Homo sapiens
  source 1..6683: mol_type = unassigned DNA
cgcgactcccactaggctatgagctacaggagggagggtaggtcttgctcccggagagcaccttaatcacaggcgctgaatgaaagaatgaactggttgtgcaggaaccaggatccgaacccgcctccccagccggaagaattaacctcgagtctgcacgcttttaagaacaaggcctttaaaaaatccaaagtgtgtggagtttgcaaacaaattattgacggtcaaggtatttcatgccgagcctgcaagtattcctgccacaagaaatgtgaagccaaggtggtgattccctgcggtgtgcaagtccgactggaacaggctccagggagttccacgctgtccagttctctctgccgtgataaacctctgcggcccgtcatcctgagtcccaccatggaggagggccatgggctggacctcacttacatcacggagcgcatcatcgctgtgtccttccctgccggctgctctgaggagtcctacctgcacaacctacaggaggtcacgcgcatgctcaagtccaagcacggggacaactacctggtattaaacctttcagaaaagagatatgaccttacgaagcttaacccaaagatcatggatgtgggctggccagagctccacgcaccgcccctggataagatgtgtaccatatgcaaggcgcaggagtcctggctgaacagcaacctccagcatgtggtcgtcattcactgcaggggcgggaaaggacgcataggagtggtcatatcatcctacatgcatttcaccaacgtctcagccagcgccgaccaggcccttgacaggtttgcaatgaagaagttttatgatgacaaagtttcagctttaatgcagccttcccaaaaacggtatgttcagttcctcagtgggctcctgtccggatcggtgaaaatgaatgcctctcccctgttcctgcattttgtcatcctccacggcacccccaacttcgacacaggtggagtgtgccggccctttctgaagctctaccaagccatgcagcctgtgtacacctccgggatctacaacgttggcccagaaaaccccagcaggatctgcatcgtcatcgagccggcccagcttctgaagggagatgtcatggtgaaatgctaccacaagaaataccgctcggccacccgtgacgtcattttccgcctgcagtttcacactggggctgtgcagggctacgggctggtgtttgggaaggaggatctggacaatgccagcaaagatgaccgttttcctgactatgggaaggttgaattagtcttctctgccacgcctgagaagattcaagggtccgaacacttgtacaacgaccacggtgtgattgtggactacaacacaacagacccactgatacgctgggactcgtacgagaacctcagtgcagatggagaagtgctacacacgcagggccctgtcgatggcagcctttacgcgaaggtgaggaagaaaagctcctcggatcctggcatcccaggtggcccccaggcaatcccggccaccaacagcccagaccacagtgaccacaccttgtctgtcagcagtgactccggccactctacagcctctgccaggacggataagacggaagagcgcctggccccaggaaccaggaggggcctgagtgcccaggagaaggcagagttggaccagctgctcagtggctttggcctggaagatcctggaagctccctcaaggaaatgactgatgctcgaagcaagtacagtgggacccgccacgtggtgccagcccaggttcacgtgaatggagacgctgctctgaaggatcgggagacagacattctggatgacgagatgccccaccacgacctgcacagtgtggacagccttgggaccctgtcctcctcggaagggcctcagtcggcccacctgggtcccttcacctgccacaagagcagccagaactcactcctatctgacggttttggcagcaacgttggtgaagatccgcagggcaccctcgttccggacctgggccttggcatggacggcccctatgagcgggagcggacttttgggagtcgagagcccaagcagccccagcccctgctgagaaagccctcagtgtccgcccagatgcaggcctatgggcagagcagctactccacacagacctgggtgcgccagcagcagatggttgtagctcaccagtatagcttcgccccagatggggaggcccggctggtgagccgctgccctgcagacaatcctggcctcgtccaggcccagcccagagtgccactcacccccacccgagggaccagcagtagggtggctgtccagaggggtgtaggcagtgggccacatccccctgacacacagcagccctctcccagcaaagcgttcaaacccaggtttccaggagaccaggttgtgaatggagccggcccagagctgagcacaggcccctccccaggctcgcccaccctggacatcgaccagtccatcgagcagctcaacaggctgatcctggagctggatcccaccttcgagcccatccctacccacatgaacgccctcggtagccaggccaatggctctgtgtctccagacagcgtgggaggtgggctccgggcaagcagcaggctgcctgacacaggagagggccccagcagggccaccgggcggcaaggctcctctgctgaacagcccctgggcgggagactcaggaagctgagcctggggcagtacgacaacgatgctggggggcagctgcccttctccaaatgtgcatggggaaaggctggtgtggactatgccccaaacctgccgccattcccctcaccagcggacgtcaaagagacgatgacccctggctatccccaggacctcgatattatcgatggcagaattttaagtagcaaggagtccatgtgttcaactccagcatttcctgtgtctccagagacaccgtatgtgaaaacagcgctgcgccatcctccgttcagcccacctgagcccccgctgagcagcccagccagtcagcacaaaggaggacgtgaaccacgaagctgccctgagacgctcactcacgctgtggggatgtcagagagccccatcggacccaaatccacgatgctccgggctgatgcgtcctcgacgccctcctttcagcaggcttttgcttcttcctgcaccatttccagcaacggccctgggcagaggagagagagctcctcttctgcagaacgccagtgggtggagagcagccccaagcccatggtttccctgctggggagcggccggcccaccggaagtcccctcagcgctgagttctccggtaccaggaaggactccccagtgctgtcctgcttcccgccgtcagagctccaggctcctttccacagccatgagctgtccctagcagagccaccggactccctggcgcctcccagcagccaggccttcctgggcttcggcaccgccccagtgggaagtggccttccgcccgaggaggacctgggggccttgctggccaattctcatggagcgtcaccgacccccagcatcccgctgacagcgacaggggctgccgacaatggcttcctgtcccacaactttctcacggtggcgcctggacacagcagccaccacagtccaggcctgcagggccagggtgtgaccctgcccgggcagccacccctccctgagaagaagcgggcctcggagggggatcgttctttgggctcagtctctccctcctccagtggcttctccagcccgcacagcgggagcaccatcagtatccccttcccaaatgtccttcccgacttttccaaggcttcagaagcccccactttttaccaaactagtaaacctgacattccaggcccatgaggggaaagaggatcttccagctctgcaaaaacaagaacaaacaacatcaccgtgaattggcctttcctgaaagtgacttatctgacacatctctgtagccacatgctttttgggtagaagaagctgggcatgggtgcaccccaccccctagggtccccatgggaaagggacatgcaaggaaacagcacagaacacgaggtggtccccatgtccctggcacactagcattccgggggatgaggaatccccagcccttgaggcagaggtgccgagtgactgccatgcttcgcccgtccgcatgggcgcttctgtccagctgcacccgaggccgggggtttccctcacctcggtcttcccaagatggagatgctaacgaaactgagaagggggcgtatgtttgacgaaggtttgtgcaagtcaggcccttctggaacacagcagggcctacaacgaggggcctttgcgatgggctgtgaggatgggggtggtgggaagaattggccacgttggagaccccatgccaccccaccatggtgagtgctctgtgcctcctgctcacctgtggtgagctgggcgagctgggcgagctgggcgagctgggctggggagagcctgtgaggaccgagaggagaaatgagaagaaggaacaaaaatattatttctatgtaatttatattttacttatgccaaattatttatgataatttgccattgctatactgtaccagtgtcaaatgctgcagcctgccaagctgtgattttgtgaggcttgtccctatgtaggatgcaccgcaggcccctggccactgaaagagtgtgcagtggactgtgggtctcccatatgcggtgccgcccaaaggtggctttgcctcaagcaacctaccctgatgttttactcattggaatgtttttccccgattgtggatgacttcttttctgatggagagagtccaggagggatggaaaactcctggatttaagctcagcatcccccacatgggcttttcgatcatcttcaggcctgaagctgcacgacctgaagttcgcctgcatttatcagccctctttgtgctgctccttgccaccttggggttcctgctggggaccatgtgtggttgtggcatgtgtgagcagaagggaggatgaggaaaaagagaagaaaccccggtactgacaagctgtttttgagtgccactgtttgccatcatctaagccactgaatcaagtgtatttcaggcttatttcaacattccaatgccctggttttcctgcttgaatctgttcgtggtcaaaggtttgggggaatttgtgaccctggaacatccccagagtgaaagatggagctgggccacatcagaataaggccttggccccatcctctcacagcctaggtgctctgcaggcatgctgactgtcctgattgcgatccagcccgaaattccctcctctgctttcaaaagtcaaatcccccattcttaggccacactggtgtcacaagctcctgtcagggagctggggtttgggaatgtgctttgtgaactctgctttaaagtgaggggccgaggaaaacttagaaacaggcagagttggaagcagccaaatcacagtgggtgttgtgtgtgtgtgcgtgtgtgcatgcgtgcgtgtatgcgtgtgtgaaagcaggtggaccattccactttttagctcctattgatgcaccaaaccaagtgcctcatttctgtgccaaatgtttgccttggtcgttgtggacctccttctctaacttgcggtggcatgactgtcaggaggtgctggcattttcagcagatcctcatgtgttgaccctgatgtctttagcagaggcctctagcatctcggtttttcatccactgcaggaatgtggccacagggagcagaggtttgtactttccccaagaggtcctcatcctgagacggtctctacccatgtttaacccaaagagtgcaggccaggttccttatccttctgatgaaggatgagagagctcatttagaagtcagagcaaactagggtctcagtattgagaaacgcagcctgccagggaatcacagagacatcggggtgcccgcgatggccctcatgaagccatgcctcgacggcattcaggaagccctgcaaacgtgctttttgaactcattggccaggtgtgatttttacacaaggtaaacgtggtcaagggcatcggggaatttgctccaagcagatagctccctctgaggaaccaaaggaagcaagtttccacgatttctgaagagctggtataggaagtttctttcttccttttgtgttacatgtgcattaaacagaacaagctgtgtgtcatcacagattgtactgtgggctcagaaaccgtgagagagcccccaccgtggacaccggctctagggccacaggaaaaggaacgtttccaggcattttgtctccagggctcccgctggacaggcacgtactgccctggggagtaaatgcggagagttcacgaactgtgcccaacgcatgttatagccagggtcctactaactactcagtaaaagaacgtattgttgtattcctccagtgttaagctatagccatgttaaaagtcactgtgcatttattctcagcatcaaataccttgtaacgtcttctctgccttgttagtgcatatttttacttttctgatactgtaaagaatatatccagtatgtaaatgaatgttctataaatcttttgtatagtcattttctctgctccttaaatatcatctctattcagagtataataaaattatgaacttggt

SEQ ID NO: 31312 - DNA, 4759 bp, Homo sapiens
  source 1..4759: mol_type = unassigned DNA
agaatgggaaactgccttgggagaagccccaagtgagcccaagggcgcagagcagaaggaccctggagtgtaagagcctagattgcaagcctggcaggaggagccggaagaattaacctcgagtctgcacgcttttaagaacaaggcctttaaaaaatccaaagtgtgtggagtttgcaaacaaattattgacggtcaaggtatttcatgccgagcctgcaagtattcctgccacaagaaatgtgaagccaaggtggtgattccctgcggtgtgcaagtccgactggaacaggctccagggagttccacgctgtccagttctctctgccgtgataaacctctgcggcccgtcatcctgagtcccaccatggaggagggccatgggctggacctcacttacatcacggagcgcatcatcgctgtgtccttccctgccggctgctctgaggagtcctacctgcacaacctacaggaggtcacgcgcatgctcaagtccaagcacggggacaactacctggtattaaacctttcagaaaagagatatgaccttacgaagcttaacccaaagatcatggatgtgggctggccagagctccacgcaccgcccctggataagatgtgtaccatatgcaaggcgcaggagtcctggctgaacagcaacctccagcatgtggtcgtcattcactgcaggggcgggaaaggacgcataggagtggtcatatcatcctacatgcatttcaccaacgtctcagccagcgccgaccaggcccttgacaggtttgcaatgaagaagttttatgatgacaaagtttcagctttaatgcagccttcccaaaaacggtatgttcagttcctcagtgggctcctgtccggatcggtgaaaatgaatgcctctcccctgttcctgcattttgtcatcctccacggcacccccaacttcgacacaggtggagtgtgccggccctttctgaagctctaccaagccatgcagcctgtgtacacctccgggatctacaacgttggcccagaaaaccccagcaggatctgcatcgtcatcgagccggcccagcttctgaagggagatgtcatggtgaaatgctaccacaagaaataccgctcggccacccgtgacgtcattttccgcctgcagtttcacactggggctgtgcagggctacgggctggtgtttgggaaggaggatctggacaatgccagcaaagatgaccgttttcctgactatgggaaggttgaattagtcttctctgccacgcctgagaagattcaagggtccgaacacttgtacaacgaccacggtgtgattgtggactacaacacaacagacccactgatacgctgggactcgtacgagaacctcagtgcagatggagaagtgctacacacgcagggccctgtcgatggcagcctttacgcgaaggtgaggaagaaaagctcctcggatcctggcatcccaggtggcccccaggcaatcccggccaccaacagcccagaccacagtgaccacaccttgtctgtcagcagtgactccggccactctacagcctctgccaggacggataagacggaagagcgcctggccccaggaaccaggaggggcctgagtgcccaggagaaggcagagttggaccagctgctcagtggctttggcctggaagatcctggaagctccctcaaggaaatgactgatgctcgaagcaagtacagtgggacccgccacgtggtgccagcccaggttcacgtgaatggagacgctgctctgaaggatcgggagacagacattctggatgacgagatgccccaccacgacctgcacagtgtggacagccttgggaccctgtcctcctcggaagggcctcagtcggcccacctgggtcccttcacctgccacaagagcagccagaactcactcctatctgacggttttggcagcaacgttggtgaagatccgcagggcaccctcgttccggacctgggccttggcatggacggcccctatgagcgggagcggacttttgggagtcgagagcccaagcagccccagcccctgctgagaaagccctcagtgtccgcccagatgcaggcctatgggcagagcagctactccacacagacctgggtgcgccagcagcagatggttgtagctcaccagtatagcttcgccccagatggggaggcccggctggtgagccgctgccctgcagacaatcctggcctcgtccaggcccagcccagagtgccactcacccccacccgagggaccagcagtagggtggctgtccagaggggtgtaggcagtgggccacatccccctgacacacagcagccctctcccagcaaagcgttcaaacccaggtttccaggagaccaggttgtgaatggagccggcccagagctgagcacaggcccctccccaggctcgcccaccctggacatcgaccagtccatcgagcagctcaacaggctgatcctggagctggatcccaccttcgagcccatccctacccacatgaacgccctcggtagccaggccaatggctctgtgtctccagacagcgtgggaggtgggctccgggcaagcagcaggctgcctgacacaggagagggccccagcagggccaccgggcggcaaggctcctctgctgaacagcccctgggcgggagactcaggaagctgagcctggggcagtacgacaacgatgctggggggcagctgcccttctccaaatgtgcatggggaaaggctggtgtggactatgccccaaacctgccgccattcccctcaccagcggacgtcaaagagacgatgacccctggctatccccaggacctcgatattatcgatggcagaattttaagtagcaaggagtccatgtgttcaactccagcatttcctgtgtctccagagacaccgtatgtgaaaacagcgctgcgccatcctccgttcagcccacctgagcccccgctgagcagcccagccagtcagcacaaaggaggacgtgaaccacgaagctgccctgagacgctcactcacgctgtggggatgtcagagagccccatcggacccaaatccacgatgctccgggctgatgcgtcctcgacgccctcctttcagcaggcttttgcttcttcctgcaccatttccagcaacggccctgggcagaggagagagagctcctcttctgcagaacgccagtgggtggagagcagccccaagcccatggtttccctgctggggagcggccggcccaccggaagtcccctcagcgctgagttctccggtaccaggaaggactccccagtgctgtcctgcttcccgccgtcagagctccaggctcctttccacagccatgagctgtccctagcagagccaccggactccctggcgcctcccagcagccaggccttcctgggcttcggcaccgccccagtgggaagtggccttccgcccgaggaggacctgggggccttgctggccaattctcatggagcgtcaccgacccccagcatcccgctgacagcgacaggggctgccgacaatggcttcctgtcccacaactttctcacggtggcgcctggacacagcagccaccacagtccaggcctgcagggccagggtgtgaccctgcccgggcagccacccctccctgagaagaagcgggcctcggagggggatcgttctttgggctcagtctctccctcctccagtggcttctccagcccgcacagcgggagcaccatcagtatccccttcccaaatgtccttcccgacttttccaaggcttcagaagcggcctcacctctgccagatagtccaggtgataaacttgtgatcgtgaaatttgttcaagacacttccaagttctggtacaaggcggatatttcaagagaacaagccatcgccatgttgaaggacaaggagccgggctcattcattgttcgagacagccattccttccgaggggcctatggcctggccatgaaggtggccacgcccccaccttcagtcctgcagctgaacaagaaagctggagatttggccaatgaactcgtccggcactttttgatcgagtgtaccccgaagggagtgcggttgaaagggtgctcgaatgaaccatatttcgggagcctgacggccttggtgtgccagcattccatcacgcccttggccttgccgtgcaagctgcttatcccagagagagatccattggaggaaatagcagaaagttctccccagacggcagccaattcagcagctgagctgttgaagcagggggcagcctgcaatgtgtggtacttgaactctgtggagatggagtccctcaccggccaccaggcgatccagaaggccctgagcatcaccctggtccaggagcctccacctgtgtccacagttgtgcacttcaaggtgtcagcccagggcatcaccctgacagacaatcagaggaagctcttcttccggaggcattaccccgtgaacagtgtgattttctgtgccttggacccacaagacaggaagtggatcaaagatggcccttcctcaaaagtctttggatttgtggcccggaagcagggcagtgccacggataatgtgtgccacctgtttgcagagcatgaccctgagcagcctgccagggaatcacagagacatcggggtgcccgcgatggccctcatgaagccatgcctcgacggcattcaggaagccctgcaaacgtgctttttgaactcattggccaggtgtga

SEQ ID NO: 31313 - DNA, 4070 bp, Homo sapiens
  source 1..4070: mol_type = unassigned DNA
ggactctgagtcgtcttggtcccaggagccagtagtgaaggcaacagtctgcccacctgtggacaccagatcctgggagctcctggttagcaagtgagatctctgggatgtcagtgaggctggttgaagaccagaggtaaactgcagaggtcaccacccccaccatgtcccaggtgatgtccagcccactgctggcaggaggccatgctgtcagcttggcgccttgtgatgagcccaggaggaccctgcacccagcacccagccccagcctgccaccccagtgttcttactacaccacggaaggctggggagcccaggccctgatggcccccgtgccctgcatggggccccctggccgactccagcaagccccacaggtggaggccaaagccacctgcttcctgccgtcccctggtgagaaggccttggggaccccagaggaccttgactcctacattgacttctcactggagagcctcaatcagatgatcctggaactggaccccaccttccagctgcttcccccagggactgggggctcccaggctgagctggcccagagcaccatgtcaatgagaaagaaggaggaatctgaagccttggacataaagtacatcgaggtgacctccgccagatcaaggtgccacgatggcccccagcactgctccagcccctctgtcaccccgcccttcggctcccttcgcagtggtggcctcctcctttccagagacgtcccccgagagacacgaagcagcagtgagagcctcatcttctctgggaaccagggcagggggcaccagcgccctctgcccccctcagagggtctctcccctcgacccccaaattcccccagcatctcaatcccttgcatggggagcaaggcctcgagcccccatggtttgggctccccgctggtggcttctccaagactggagaagcggctgggaggcctggccccacagcggggcagcaggatctctgtgctgtcagccagcccagtgtctgatgtcagctatatgtttggaagcagccagtccctcctgcactccagcaactccagccatcagtcatcttccagatccttggaaagtccagccaactcttcctccagcctccacagccttggctcagtgtccctgtgtacaagacccagtgacttccaggctcccagaaaccccaccctaaccatgggccaacccagaacaccccactctccaccactggccaaagaacatgccagcagctgccccccatccatcaccaactccatggtggacatacccattgtgctgatcaacggctgcccagaaccagggtcttctccaccccagcggaccccaggacaccagaactccgttcaacctggagctgcttctcccagcaacccctgtccagccaccaggagcaacagccagaccctgtcagatgccccctttaccacatgcccagagggtcccgccagggacatgcagcccaccatgaagttcgtgatggacacatctaaatactggtttaagccaaacatcacccgagagcaagcaatcgagctgctgaggaaggaggagccaggggcttttgtcataagggacagctcttcataccgaggctccttcggcctggccctgaaggtgcaggaggttcccgcgtctgctcagagtcgaccaggtgaggacagcaatgacctcatccgacacttcctcatcgagtcgtctgccaaaggagtgcatctcaaaggagcagatgaggagccctactttgggagcctctctgccttcgtgtgccagcattccatcatggccctggccctgccctgcaaactcaccatcccacagagagaactgggaggtgcagatggggcctcggactctacagacagcccagcctcctgccagaagaaatctgcgggctgccacaccctgtacctgagctcagtgagcgtggagaccctgactggagccctggccgtgcagaaagccatctccaccacctttgagagggacatcctccccacgcccaccgtggtccacttcaaagtcacagagcagggcatcactctgactgatgtccagaggaaggtgtttttccggcgccattacccactcaccaccctccgcttctgtggtatggaccctgagcaacggaagtggcagaagtactgcaaaccctcctggatctttgggtttgtggccaagagccagacagagcctcaggagaacgtatgccacctctttgcggagtatgacatggtccagccagcctcgcaggtcatcggcctggtgactgctctgctgcaggacgcagaaaggatgtaggggagagactgcctgtgcacctaaccaacacctccaggggctcgctaaggagcccccctccaccccctgaatgggtgtggcttgtggccatattgacagaccaatctatgggactagggggattggcatcaagttgacacccttgaacctgctatggccttcagcagtcaccatcatccagaccccccgggcctcagtttcctcaatcatagaagaagaccaatagacaagatcagctgttcttagatgctggtgggcatttgaacatgctcctccatgattctgaagcatgcacacctctgaagacccctgcatgaaaataacctccaaggaccctctgaccccatcgacctgggccctgcccacacaacagtctgagcaagagacctgcagcccctgtttcgtggcagacagcaggtgcctggcggtgacccacggggctcctggcttgcagctggtgatggtcaagaactgactacaaaacaggaatggatagactctatttccttccatatctgttcctctgttccttttcccactttctgggtggctttttgggtccacccagccaggatgctgcaggccaagctgggtgtggtatttagggcagctcagcagggggaacttgtccccatggtcagaggagacccagctgtcctgcacccccttgcagatgagtatcaccccatcttttctttccacttggtttttatttttatttttttttgagacagagtctcactgtcacccaggctgaactgcagtggtgtgatctaggctcactgcaacctccacctcccaggttcaagcaattatcctgcctcaggctcccaagtagctgggattacaggcatgtgcaactcacccagctaattttgtatttttagtagagacagggtttcaccatgttggccaggctggtcttgaactcctgaccgcaggtaatccacctgcttcggcctcccaaagtgctgggattacaggcgcaagccacccagcccagcttctttccattccttgataggcgagtattccaaagctggtatcgtagctgccctaatgttgcatattaggcggcgggggcagagataagggccatctctctgtgattctgcctcagctcctgtcttgctgagccctcccccaacccacgctccaacacacacacacacacacacacacacacacacacacacacacacacacacacacacacacgcccctctactgctatgtggcttcaaccagcctcacagccacacgggggaagcagagagtcaagaatgcaaagaggccgcttccctaagaggcttggaggagctgggctctatcccacacccacccccaccccacccccacccagcctccagaagctggaaccatttctcccgcaggcctgagttcctaaggaaaccaccctaccggggtggaagggagggtcagggaagaaacccactcttgctctacgaggagcaagtgcctgccccctcccagcagccagccctgccaaagttgcattatctttggccaaggctgggcctgacggttatgatttcagccctgggcctgcaggagaggctgagaccagcccacccagccagtggtcgagcactgccccgccgccaaagtctgcagaatgtgagatgaggttctcaaggtcacaggccccagtcccagcctgggggctggcagaggcccccatatactctgctacagctcctatcatgaaaaataaaatgtttgtctttgcaaaacagt

SEQ ID NO: 31314 - DNA, 3972 bp, Homo sapiens
  source 1..3972: mol_type = unassigned DNA
ctgagtcgtcttggtcccaggagccagtagtgaaggcaacagtctgcccacctgtggacaccagatgtcccaggtgatgtccagcccactgctggcaggaggccatgctgtcagcttggcgccttgtgatgagcccaggaggaccctgcacccagcacccagccccagcctgccaccccagtgttcttactacaccacggaaggctggggagcccaggccctgatggcccccgtgccctgcatggggccccctggccgactccagcaagccccacaggtggaggccaaagccacctgcttcctgccgtcccctggtgagaaggccttggggaccccagaggaccttgactcctacattgacttctcactggagagcctcaatcagatgatcctggaactggaccccaccttccagctgcttcccccagggactgggggctcccaggctgagctggcccagagcaccatgtcaatgagaaagaaggaggaatctgaagccttggacataaagtacatcgaggtgacctccgccagatcaaggtgccacgatggcccccagcactgctccagcccctctgtcaccccgcccttcggctcccttcgcagtggtggcctcctcctttccagagacgtcccccgagagacacgaagcagcagtgagagcctcatcttctctgggaaccagggcagggggcaccagcgccctctgcccccctcagagggtctctcccctcgacccccaaattcccccagcatctcaatcccttgcatggggagcaaggcctcgagcccccatggtttgggctccccgctggtggcttctccaagactggagaagcggctgggaggcctggccccacagcggggcagcaggatctctgtgctgtcagccagcccagtgtctgatgtcagctatatgtttggaagcagccagtccctcctgcactccagcaactccagccatcagtcatcttccagatccttggaaagtccagccaactcttcctccagcctccacagccttggctcagtgtccctgtgtacaagacccagtgacttccaggctcccagaaaccccaccctaaccatgggccaacccagaacaccccactctccaccactggccaaagaacatgccagcagctgccccccatccatcaccaactccatggtggacatacccattgtgctgatcaacggctgcccagaaccagggtcttctccaccccagcggaccccaggacaccagaactccgttcaacctggagctgcttctcccagcaacccctgtccagccaccaggagcaacagccagaccctgtcagatgccccctttaccacatgcccagagggtcccgccagggacatgcagcccaccatgaagttcgtgatggacacatctaaatactggtttaagccaaacatcacccgagagcaagcaatcgagctgctgaggaaggaggagccaggggcttttgtcataagggacagctcttcataccgaggctccttcggcctggccctgaaggtgcaggaggttcccgcgtctgctcagagtcgaccaggtgaggacagcaatgacctcatccgacacttcctcatcgagtcgtctgccaaaggagtgcatctcaaaggagcagatgaggagccctactttgggagcctctctgccttcgtgtgccagcattccatcatggccctggccctgccctgcaaactcaccatcccacagagagaactgggaggtgcagatggggcctcggactctacagacagcccagcctcctgccagaagaaatctgcgggctgccacaccctgtacctgagctcagtgagcgtggagaccctgactggagccctggccgtgcagaaagccatctccaccacctttgagagggacatcctccccacgcccaccgtggtccacttcaaagtcacagagcagggcatcactctgactgatgtccagaggaaggtgtttttccggcgccattacccactcaccaccctccgcttctgtggtatggaccctgagcaacggaagtggcagaagtactgcaaaccctcctggatctttgggtttgtggccaagagccagacagagcctcaggagaacgtatgccacctctttgcggagtatgacatggtccagccagcctcgcaggtcatcggcctggtgactgctctgctgcaggacgcagaaaggatgtaggggagagactgcctgtgcacctaaccaacacctccaggggctcgctaaggagcccccctccaccccctgaatgggtgtggcttgtggccatattgacagaccaatctatgggactagggggattggcatcaagttgacacccttgaacctgctatggccttcagcagtcaccatcatccagaccccccgggcctcagtttcctcaatcatagaagaagaccaatagacaagatcagctgttcttagatgctggtgggcatttgaacatgctcctccatgattctgaagcatgcacacctctgaagacccctgcatgaaaataacctccaaggaccctctgaccccatcgacctgggccctgcccacacaacagtctgagcaagagacctgcagcccctgtttcgtggcagacagcaggtgcctggcggtgacccacggggctcctggcttgcagctggtgatggtcaagaactgactacaaaacaggaatggatagactctatttccttccatatctgttcctctgttccttttcccactttctgggtggctttttgggtccacccagccaggatgctgcaggccaagctgggtgtggtatttagggcagctcagcagggggaacttgtccccatggtcagaggagacccagctgtcctgcacccccttgcagatgagtatcaccccatcttttctttccacttggtttttatttttatttttttttgagacagagtctcactgtcacccaggctgaactgcagtggtgtgatctaggctcactgcaacctccacctcccaggttcaagcaattatcctgcctcaggctcccaagtagctgggattacaggcatgtgcaactcacccagctaattttgtatttttagtagagacagggtttcaccatgttggccaggctggtcttgaactcctgaccgcaggtaatccacctgcttcggcctcccaaagtgctgggattacaggcgcaagccacccagcccagcttctttccattccttgataggcgagtattccaaagctggtatcgtagctgccctaatgttgcatattaggcggcgggggcagagataagggccatctctctgtgattctgcctcagctcctgtcttgctgagccctcccccaacccacgctccaacacacacacacacacacacacacacacacacacacacacacacacacacacacacacacgcccctctactgctatgtggcttcaaccagcctcacagccacacgggggaagcagagagtcaagaatgcaaagaggccgcttccctaagaggcttggaggagctgggctctatcccacacccacccccaccccacccccacccagcctccagaagctggaaccatttctcccgcaggcctgagttcctaaggaaaccaccctaccggggtggaagggagggtcagggaagaaacccactcttgctctacgaggagcaagtgcctgccccctcccagcagccagccctgccaaagttgcattatctttggccaaggctgggcctgacggttatgatttcagccctgggcctgcaggagaggctgagaccagcccacccagccagtggtcgagcactgccccgccgccaaagtctgcagaatgtgagatgaggttctcaaggtcacaggccccagtcccagcctgggggctggcagaggcccccatatactctgctacagctcctatcatgaaaaataaaatgtttgtctttgcaaaacagtaa

SEQ ID NO: 31315 - DNA, 2174 bp, Homo sapiens
  source 1..2174: mol_type = unassigned DNA
ggaggtgggagatcttcaaagggattcatgaggcctgttcctgtgagaggggtccattcactccacccccgcccctttggggggcctgtttctttgccttggctcagaactgggaggtgcagatggggcctcggactctacagacagcccagcctcctgccagaagaaatctgcggggtgtttttccggcgccattacccactcaccaccctccgcttctgtggtatggaccctgagcaacggaagtggcagaagtactgcaaaccctcctggatctttgggtttgtggccaagagccagacagagcctcaggagaacgtatgccacctctttgcggagtatgacatggtccagccagcctcgcaggtcatcggcctggtgactgctctgctgcaggacgcagaaaggatgtaggggagagactgcctgtgcacctaaccaacacctccaggggctcgctaaggagcccccctccaccccctgaatgggtgtggcttgtggccatattgacagaccaatctatgggactagggggattggcatcaagttgacacccttgaacctgctatggccttcagcagtcaccatcatccagaccccccgggcctcagtttcctcaatcatagaagaagaccaatagacaagatcagctgttcttagatgctggtgggcatttgaacatgctcctccatgattctgaagcatgcacacctctgaagacccctgcatgaaaataacctccaaggaccctctgaccccatcgacctgggccctgcccacacaacagtctgagcaagagacctgcagcccctgtttcgtggcagacagcaggtgcctggcggtgacccacggggctcctggcttgcagctggtgatggtcaagaactgactacaaaacaggaatggatagactctatttccttccatatctgttcctctgttccttttcccactttctgggtggctttttgggtccacccagccaggatgctgcaggccaagctgggtgtggtatttagggcagctcagcagggggaacttgtccccatggtcagaggagacccagctgtcctgcacccccttgcagatgagtatcaccccatcttttctttccacttggtttttatttttatttttttttgagacagagtctcactgtcacccaggctgaactgcagtggtgtgatctaggctcactgcaacctccacctcccaggttcaagcaattatcctgcctcaggctcccaagtagctgggattacaggcatgtgcaactcacccagctaattttgtatttttagtagagacagggtttcaccatgttggccaggctggtcttgaactcctgaccgcaggtaatccacctgcttcggcctcccaaagtgctgggattacaggcgcaagccacccagcccagcttctttccattccttgataggcgagtattccaaagctggtatcgtagctgccctaatgttgcatattaggcggcgggggcagagataagggccatctctctgtgattctgcctcagctcctgtcttgctgagccctcccccaacccacgctccaacacacacacacacacacacacacacacacacacacacacacacacacacacacacacacgcccctctactgctatgtggcttcaaccagcctcacagccacacgggggaagcagagagtcaagaatgcaaagaggccgcttccctaagaggcttggaggagctgggctctatcccacacccacccccaccccacccccacccagcctccagaagctggaaccatttctcccgcaggcctgagttcctaaggaaaccaccctaccggggtggaagggagggtcagggaagaaacccactcttgctctacgaggagcaagtgcctgccccctcccagcagccagccctgccaaagttgcattatctttggccaaggctgggcctgacggttatgatttcagccctgggcctgcaggagaggctgagaccagcccacccagccagtggtcgagcactgccccgccgccaaagtctgcagaatgtgagatgaggttctcaaggtcacaggccccagtcccagcctgggggctggcagaggcccccatatactctgctacagctcctatcatgaaaaataaaatgtttgtctttgcaaaacagtaa

SEQ ID NO: 31316 - DNA, 5010 bp, Homo sapiens
  source 1..5010: mol_type = unassigned DNA
gggggagcaaaagatcacaggctgacactcccagcagggtagatcctgggaatctgatctcctggcctcccccacatcctcccccctccacttcctggagcagcgacctgcccccttcccgcctgcacttccctccacttccagggccgggcttctcctcacaccagccagacagcctaccctccgcccaggggaagcggctgcctccgccaggccgcttccaggaagccccgggccaggccccagcattgttcaggccctggggccagcaccccagccagccgaacaccatgaagtccagcggccctgtggagaggctgctcagagccctggggaggagggacagcagccgggccgcaagcaggcctaggaaagctgagcctcatagcttccgggagaaggttttccggaagaaacctccagtctgtgcagtatgtaaggtgaccatcgatgggacaggcgtttcgtgcagagtctgcaaggtggcgacgcacagaaaatgtgaagcaaaggtgacttcagcctgtcaggccttgcctcccgtggagttgcggcgaaacacggccccagtcaggcgcatagagcacctgggatccaccaaatctctgaaccactcaaagcagcgcagcactctgcccaggagcttcagcctggacccgctcatggagcggcgctgggacttagacctcacctacgtgacggagcgcatcttggccgccgccttccccgcgcggcccgatgaacagcggcaccggggccacctgcgcgagctggcccatgtgctgcaatccaagcaccgggacaagtacctgctcttcaacctttcagagaaaaggcatgacctgacccgcttaaaccccaaggttcaagacttcggctggcctgagctgcatgctccacccctggacaagctgtgctccatctgcaaagccatggagacatggctcagtgctgacccacagcacgtggtcgtactatactgcaagggaaacaagggcaagcttggggtcatcgtttctgcctacatgcactacagcaagatctctgcaggggcggaccaggcactggccactcttaccatgcggaaattctgcgaggacaaggtggccacagaactgcagccctcccagcgtcgatatatcagctacttcagtgggctgctatctggctccatcagaatgaacagcagccctctcttcctgcactatgtgctcatccccatgctgccagcctttgaacctggcacaggcttccagcccttccttaaaatctaccagtccatgcagcttgtctacacatctggagtctatcacattgcaggccctggtccccagcagctttgcatcagcctggagccagccctcctcctcaaaggcgatgtcatggtaacatgttatcacaagggtggccggggcacagaccggaccctcgtgttccgagtccagttccacacctgcaccatccacggaccacagctcactttccccaaggaccagcttgacgaggcctggactgatgagaggttccccttccaagcctccgtggagtttgtcttctcctccagccccgagaagatcaaaggcagcactccacggaacgacccctcggtctctgtcgactacaacaccactgagccagccgtgcgctgggactcctatgagaacttcaaccagcaccacgaggacagtgtggatggctccttgacccacacccggggtcccctggatggcagtccttatgcccaggtgcagcggcctccccggcagacccccccggcaccctctccagagcctccaccaccccccatgctctctgtcagcagcgactcaggccattcctccacgctgaccacagagccggctgctgagtcccctggccggccgccccctacagctgctgaacggcaggagctggatcgcctcctaggaggctgcggagtggccagtgggggccggggagctgggcgcgagacggccatcctagatgacgaagagcagcccactgtgggcggaggcccccacctcggagtgtatccaggccataggcctggcctcagccgccactgctcctgccgccagggctaccgggagccctgcggggttcccaatgggggctactaccggccagagggaaccctggagaggaggcgactggcctacgggggctatgagggatccccccagggctacgccgaggcctcgatggagaagaggcgcctctgccgatcgctgtcagaggggctatacccctacccacctgagatggggaaaccagccactggggactttggctaccgcgccccaggctaccgggaggtggtcatcctggaggaccctgggctgcctgccctatacccatgcccagcctgcgaggagaagctggcgctgcctacagcagccttgtatggactgcggctggagagggaggctggagaagggtgggcaagtgaggctggcaagcctctcctgcacccagtgcggcctgggcacccgctgcctctgctcttgcctgcctgtgggcatcaccatgccccgatgcctgactacagctgcctgaagccacccaaggcaggcgaggaagggcacgagggctgctcctacaccatgtgccccgaaggcaggtatgggcatccagggtaccctgccctggtgacatacagctatggaggagcagttcccagttactgcccagcatatggccgtgtgcctcatagctgtggctctccaggagagggcagagggtatcccagccctggtgcccactccccacgggctggctccatttccccgggcagcccgccctatccacaatctaggaagctgagctacgagatccctacggaggagggaggggacaggtacccattgcctgggcacctggcctcagcaggacctttggcatctgcagagtcgctggagccggtgtcctggagggagggccccagtgggcacagcacactgcctcggtctccccgagatgccccatgcagtgcttcgtcagagttgtctggtccctccacgcccctgcacaccagcagtccagtccagggcaaggaaagcacccggcgacaggacaccaggtcccccacctcagcgcccactcagagactgagtcctggcgaggccttgccccctgtttcccaggcaggcaccggaaaggcccctgagctgccgtcgggaagtgggcctgagcctctggcccctagcccagtctctccgaccttccctcccagctcgcccagtgactggcctcaggaaaggagtccagggggccactcagatggcgccagtcctcggagccctgtgcccaccacacttcctggcctccgccacgccccctggcaaggccctcgaggcccccccgacagcccagatgggtctcccctcactcctgtgccttcccagatgccctggcttgtggccagcccagagccgcctcagagctcacctacacctgctttccccctggctgcctcctatgacaccaatggccttagccagcccccacttcctgagaaacgccacctgcccgggccggggcaacagccaggaccctggggcccagagcaggcatcatcgccagccagaggcatcagtcaccatgtcaccttcgcacctctgctctcagataatgtcccccaaaccccagagcctcctacacaagagagccaaagcaatgtcaagtttgtccaggatacatccaagttctggtacaagccacacctgtcccgtgaccaagccattgccctgctgaaggacaaggaccctggggccttcctgatcagggacagtcattcattccaaggagcttatgggctggccctcaaggtggccacaccgccacccagtgcccagccctggaaaggggaccccgtggaacagctggtccgccatttcctcatcgagactgggcccaaaggggtgaagatcaagggctgccccagtgagccctactttggcagcctgtccgccttggtctcccagcactccatctcccccatctccctgccctgctgcctgcgcattcccagcaaagatcctctggaagagaccccagaggctccagtgcccaccaacatgagcacagcggcagacctcctgcgtcagggtgctgcctgcagcgtgctctacttgacctcagtggagacagagtcactgacgggcccccaagctgtggcccgggccagctctgcagctctgagctgtagcccccgcccgacaccagctgttgtccacttcaaggtgtcagcccagggcattacactgacggacaaccaaaggaagctcttctttcgccgccattatccagtgaacagcatcaccttctccagcactgaccctcaagaccggagatggaccaacccagacgggaccacctccaagatctttggtttcgtggccaagaagccgggaagcccctgggagaatgtgtgtcacctctttgcagagcttgacccagatcagcctgctggcgccattgtcaccttcatcaccaaagttctactgggccagagaaaatgaaggaaggccacaagctcagagcccacatcaacactgcccccctcccagcaccccacagccctcacatcccctggcctggacccaggagacccaggagaaagcaccctcccttaggaatgaggagtgggcatcaggcctgggacactgctctccttccccgcccccagcctgctaagttaagtggacaggcccacaagatgaccttgcatgtgagcagatggcagagatgggtgtgtgaggggtgaggaggcatcagcagttgagccccgaaggagatcaggcagccccacctgcaggagaacgtcagccctccaggggatcagcccctgccagttccacccagctgcaggtgccagcacggcagggatgggagaggggtggggagcgagtcactgcctcctctgagcagagattcagagtaggatcacatgaataggggaaaaaagagagtctatttttgtctaataataaagaatttctataaacttta

SEQ ID NO: 31317 - DNA, 4944 bp, Homo sapiens
  source 1..4944: mol_type = unassigned DNA
gcacattctttcaagtgacagctatagcctgtcccaggggctgctgtccacagcttggggctgaagactcccaggccattaaccccttagcttttaggaagattactccccctttttcaaggccccatccacctccctcccttgactcccaggacgggaagttggccatgttcccaggagggaggccggaggcccatggatgggggtggagtatgtgttgggaggggggacctcctgtccagtcctcaggccctgggacagctgctgaggaaggagagcagacccaggagagccatgaagcctaggaaagctgagcctcatagcttccgggagaaggttttccggaagaaacctccagtctgtgcagtatgtaaggtgaccatcgatgggacaggcgtttcgtgcagagtctgcaaggtggcgacgcacagaaaatgtgaagcaaaggtgacttcagcctgtcaggccttgcctcccgtggagttgcggcgaaacacggccccagtcaggcgcatagagcacctgggatccaccaaatctctgaaccactcaaagcagcgcagcactctgcccaggagcttcagcctggacccgctcatggagcggcgctgggacttagacctcacctacgtgacggagcgcatcttggccgccgccttccccgcgcggcccgatgaacagcggcaccggggccacctgcgcgagctggcccatgtgctgcaatccaagcaccgggacaagtacctgctcttcaacctttcagagaaaaggcatgacctgacccgcttaaaccccaaggttcaagacttcggctggcctgagctgcatgctccacccctggacaagctgtgctccatctgcaaagccatggagacatggctcagtgctgacccacagcacgtggtcgtactatactgcaagggaaacaagggcaagcttggggtcatcgtttctgcctacatgcactacagcaagatctctgcaggggcggaccaggcactggccactcttaccatgcggaaattctgcgaggacaaggtggccacagaactgcagccctcccagcgtcgatatatcagctacttcagtgggctgctatctggctccatcagaatgaacagcagccctctcttcctgcactatgtgctcatccccatgctgccagcctttgaacctggcacaggcttccagcccttccttaaaatctaccagtccatgcagcttgtctacacatctggagtctatcacattgcaggccctggtccccagcagctttgcatcagcctggagccagccctcctcctcaaaggcgatgtcatggtaacatgttatcacaagggtggccggggcacagaccggaccctcgtgttccgagtccagttccacacctgcaccatccacggaccacagctcactttccccaaggaccagcttgacgaggcctggactgatgagaggttccccttccaagcctccgtggagtttgtcttctcctccagccccgagaagatcaaaggcagcactccacggaacgacccctcggtctctgtcgactacaacaccactgagccagccgtgcgctgggactcctatgagaacttcaaccagcaccacgaggacagtgtggatggctccttgacccacacccggggtcccctggatggcagtccttatgcccaggtgcagcggcctccccggcagacccccccggcaccctctccagagcctccaccaccccccatgctctctgtcagcagcgactcaggccattcctccacgctgaccacagagccggctgctgagtcccctggccggccgccccctacagctgctgaacggcaggagctggatcgcctcctaggaggctgcggagtggccagtgggggccggggagctgggcgcgagacggccatcctagatgacgaagagcagcccactgtgggcggaggcccccacctcggagtgtatccaggccataggcctggcctcagccgccactgctcctgccgccagggctaccgggagccctgcggggttcccaatgggggctactaccggccagagggaaccctggagaggaggcgactggcctacgggggctatgagggatccccccagggctacgccgaggcctcgatggagaagaggcgcctctgccgatcgctgtcagaggggctatacccctacccacctgagatggggaaaccagccactggggactttggctaccgcgccccaggctaccgggaggtggtcatcctggaggaccctgggctgcctgccctatacccatgcccagcctgcgaggagaagctggcgctgcctacagcagccttgtatggactgcggctggagagggaggctggagaagggtgggcaagtgaggctggcaagcctctcctgcacccagtgcggcctgggcacccgctgcctctgctcttgcctgcctgtgggcatcaccatgccccgatgcctgactacagctgcctgaagccacccaaggcaggcgaggaagggcacgagggctgctcctacaccatgtgccccgaaggcaggtatgggcatccagggtaccctgccctggtgacatacagctatggaggagcagttcccagttactgcccagcatatggccgtgtgcctcatagctgtggctctccaggagagggcagagggtatcccagccctggtgcccactccccacgggctggctccatttccccgggcagcccgccctatccacaatctaggaagctgagctacgagatccctacggaggagggaggggacaggtacccattgcctgggcacctggcctcagcaggacctttggcatctgcagagtcgctggagccggtgtcctggagggagggccccagtgggcacagcacactgcctcggtctccccgagatgccccatgcagtgcttcgtcagagttgtctggtccctccacgcccctgcacaccagcagtccagtccagggcaaggaaagcacccggcgacaggacaccaggtcccccacctcagcgcccactcagagactgagtcctggcgaggccttgccccctgtttcccaggcaggcaccggaaaggcccctgagctgccgtcgggaagtgggcctgagcctctggcccctagcccagtctctccgaccttccctcccagctcgcccagtgactggcctcaggaaaggagtccagggggccactcagatggcgccagtcctcggagccctgtgcccaccacacttcctggcctccgccacgccccctggcaaggccctcgaggcccccccgacagcccagatgggtctcccctcactcctgtgccttcccagatgccctggcttgtggccagcccagagccgcctcagagctcacctacacctgctttccccctggctgcctcctatgacaccaatggccttagccagcccccacttcctgagaaacgccacctgcccgggccggggcaacagccaggaccctggggcccagagcaggcatcatcgccagccagaggcatcagtcaccatgtcaccttcgcacctctgctctcagataatgtcccccaaaccccagagcctcctacacaagagagccaaagcaatgtcaagtttgtccaggatacatccaagttctggtacaagccacacctgtcccgtgaccaagccattgccctgctgaaggacaaggaccctggggccttcctgatcagggacagtcattcattccaaggagcttatgggctggccctcaaggtggccacaccgccacccagtgcccagccctggaaaggggaccccgtggaacagctggtccgccatttcctcatcgagactgggcccaaaggggtgaagatcaagggctgccccagtgagccctactttggcagcctgtccgccttggtctcccagcactccatctcccccatctccctgccctgctgcctgcgcattcccagcaaagatcctctggaagagaccccagaggctccagtgcccaccaacatgagcacagcggcagacctcctgcgtcagggtgctgcctgcagcgtgctctacttgacctcagtggagacagagtcactgacgggcccccaagctgtggcccgggccagctctgcagctctgagctgtagcccccgcccgacaccagctgttgtccacttcaaggtgtcagcccagggcattacactgacggacaaccaaaggaagctcttctttcgccgccattatccagtgaacagcatcaccttctccagcactgaccctcaagaccggagatggaccaacccagacgggaccacctccaagatctttggtttcgtggccaagaagccgggaagcccctgggagaatgtgtgtcacctctttgcagagcttgacccagatcagcctgctggcgccattgtcaccttcatcaccaaagttctactgggccagagaaaatgaaggaaggccacaagctcagagcccacatcaacactgcccccctcccagcaccccacagccctcacatcccctggcctggacccaggagacccaggagaaagcaccctcccttaggaatgaggagtgggcatcaggcctgggacactgctctccttccccgcccccagcctgctaagttaagtggacaggcccacaagatgaccttgcatgtgagcagatggcagagatgggtgtgtgaggggtgaggaggcatcagcagttgagccccgaaggagatcaggcagccccacctgcaggagaacgtcagccctccaggggatcagcccctgccagttccacccagctgcaggtgccagcacggcagggatgggagaggggtggggagcgagtcactgcctcctctgagcagagattcagagtaggatcacatgaataggggaaaaaagagagtctatttttgtctaataataaagaatttctataaacttt

SEQ ID NO: 31318 - DNA, 4737 bp, Homo sapiens
  source 1..4737: mol_type = unassigned DNA
caactctctccccctctcagccacttcctgtctccagtatgtccctggcgcggcccggctggccgtctgcgcaccctctctcccctcggctctttcctaggaaagctgagcctcatagcttccgggagaaggttttccggaagaaacctccagtctgtgcagtatgtaaggtgaccatcgatgggacaggcgtttcgtgcagagtctgcaaggtggcgacgcacagaaaatgtgaagcaaaggtgacttcagcctgtcaggccttgcctcccgtggagttgcggcgaaacacggccccagtcaggcgcatagagcacctgggatccaccaaatctctgaaccactcaaagcagcgcagcactctgcccaggagcttcagcctggacccgctcatggagcggcgctgggacttagacctcacctacgtgacggagcgcatcttggccgccgccttccccgcgcggcccgatgaacagcggcaccggggccacctgcgcgagctggcccatgtgctgcaatccaagcaccgggacaagtacctgctcttcaacctttcagagaaaaggcatgacctgacccgcttaaaccccaaggttcaagacttcggctggcctgagctgcatgctccacccctggacaagctgtgctccatctgcaaagccatggagacatggctcagtgctgacccacagcacgtggtcgtactatactgcaagggaaacaagggcaagcttggggtcatcgtttctgcctacatgcactacagcaagatctctgcaggggcggaccaggcactggccactcttaccatgcggaaattctgcgaggacaaggtggccacagaactgcagccctcccagcgtcgatatatcagctacttcagtgggctgctatctggctccatcagaatgaacagcagccctctcttcctgcactatgtgctcatccccatgctgccagcctttgaacctggcacaggcttccagcccttccttaaaatctaccagtccatgcagcttgtctacacatctggagtctatcacattgcaggccctggtccccagcagctttgcatcagcctggagccagccctcctcctcaaaggcgatgtcatggtaacatgttatcacaagggtggccggggcacagaccggaccctcgtgttccgagtccagttccacacctgcaccatccacggaccacagctcactttccccaaggaccagcttgacgaggcctggactgatgagaggttccccttccaagcctccgtggagtttgtcttctcctccagccccgagaagatcaaaggcagcactccacggaacgacccctcggtctctgtcgactacaacaccactgagccagccgtgcgctgggactcctatgagaacttcaaccagcaccacgaggacagtgtggatggctccttgacccacacccggggtcccctggatggcagtccttatgcccaggtgcagcggcctccccggcagacccccccggcaccctctccagagcctccaccaccccccatgctctctgtcagcagcgactcaggccattcctccacgctgaccacagagccggctgctgagtcccctggccggccgccccctacagctgctgaacggcaggagctggatcgcctcctaggaggctgcggagtggccagtgggggccggggagctgggcgcgagacggccatcctagatgacgaagagcagcccactgtgggcggaggcccccacctcggagtgtatccaggccataggcctggcctcagccgccactgctcctgccgccagggctaccgggagccctgcggggttcccaatgggggctactaccggccagagggaaccctggagaggaggcgactggcctacgggggctatgagggatccccccagggctacgccgaggcctcgatggagaagaggcgcctctgccgatcgctgtcagaggggctatacccctacccacctgagatggggaaaccagccactggggactttggctaccgcgccccaggctaccgggaggtggtcatcctggaggaccctgggctgcctgccctatacccatgcccagcctgcgaggagaagctggcgctgcctacagcagccttgtatggactgcggctggagagggaggctggagaagggtgggcaagtgaggctggcaagcctctcctgcacccagtgcggcctgggcacccgctgcctctgctcttgcctgcctgtgggcatcaccatgccccgatgcctgactacagctgcctgaagccacccaaggcaggcgaggaagggcacgagggctgctcctacaccatgtgccccgaaggcaggtatgggcatccagggtaccctgccctggtgacatacagctatggaggagcagttcccagttactgcccagcatatggccgtgtgcctcatagctgtggctctccaggagagggcagagggtatcccagccctggtgcccactccccacgggctggctccatttccccgggcagcccgccctatccacaatctaggaagctgagctacgagatccctacggaggagggaggggacaggtacccattgcctgggcacctggcctcagcaggacctttggcatctgcagagtcgctggagccggtgtcctggagggagggccccagtgggcacagcacactgcctcggtctccccgagatgccccatgcagtgcttcgtcagagttgtctggtccctccacgcccctgcacaccagcagtccagtccagggcaaggaaagcacccggcgacaggacaccaggtcccccacctcagcgcccactcagagactgagtcctggcgaggccttgccccctgtttcccaggcaggcaccggaaaggcccctgagctgccgtcgggaagtgggcctgagcctctggcccctagcccagtctctccgaccttccctcccagctcgcccagtgactggcctcaggaaaggagtccagggggccactcagatggcgccagtcctcggagccctgtgcccaccacacttcctggcctccgccacgccccctggcaaggccctcgaggcccccccgacagcccagatgggtctcccctcactcctgtgccttcccagatgccctggcttgtggccagcccagagccgcctcagagctcacctacacctgctttccccctggctgcctcctatgacaccaatggccttagccagcccccacttcctgagaaacgccacctgcccgggccggggcaacagccaggaccctggggcccagagcaggcatcatcgccagccagaggcatcagtcaccatgtcaccttcgcacctctgctctcagataatgtcccccaaaccccagagcctcctacacaagagagccaaagcaatgtcaagtttgtccaggatacatccaagttctggtacaagccacacctgtcccgtgaccaagccattgccctgctgaaggacaaggaccctggggccttcctgatcagggacagtcattcattccaaggagcttatgggctggccctcaaggtggccacaccgccacccagtgcccagccctggaaaggggaccccgtggaacagctggtccgccatttcctcatcgagactgggcccaaaggggtgaagatcaagggctgccccagtgagccctactttggcagcctgtccgccttggtctcccagcactccatctcccccatctccctgccctgctgcctgcgcattcccagcaaagatcctctggaagagaccccagaggctccagtgcccaccaacatgagcacagcggcagacctcctgcgtcagggtgctgcctgcagcgtgctctacttgacctcagtggagacagagtcactgacgggcccccaagctgtggcccgggccagctctgcagctctgagctgtagcccccgcccgacaccagctgttgtccacttcaaggtgtcagcccagggcattacactgacggacaaccaaaggaagctcttctttcgccgccattatccagtgaacagcatcaccttctccagcactgaccctcaagaccggagatggaccaacccagacgggaccacctccaagatctttggtttcgtggccaagaagccgggaagcccctgggagaatgtgtgtcacctctttgcagagcttgacccagatcagcctgctggcgccattgtcaccttcatcaccaaagttctactgggccagagaaaatgaaggaaggccacaagctcagagcccacatcaacactgcccccctcccagcaccccacagccctcacatcccctggcctggacccaggagacccaggagaaagcaccctcccttaggaatgaggagtgggcatcaggcctgggacactgctctccttccccgcccccagcctgctaagttaagtggacaggcccacaagatgaccttgcatgtgagcagatggcagagatgggtgtgtgaggggtgaggaggcatcagcagttgagccccgaaggagatcaggcagccccacctgcaggagaacgtcagccctccaggggatcagcccctgccagttccacccagctgcaggtgccagcacggcagggatgggagaggggtggggagcgagtcactgcctcctctgagcagagattcagagtaggatcacatgaataggggaaaaaagagagtctatttttgtctaataataaagaatttctataaact

SEQ ID NO: 31319 - DNA, 3125 bp, Homo sapiens
  source 1..3125: mol_type = unassigned DNA
gggggagcaaaagatcacaggctgacactcccagcagggtagatcctgggaatctgatctcctggcctcccccacatcctcccccctccacttcctggagcagcgacctgcccccttcccgcctgcacttccctccacttccagggccgggcttctcctcacaccagccagacagcctaccctccgcccaggggaagcggctgcctccgccaggccgcttccaggaagccccgggccaggccccagcattgttcaggccctggggccagcaccccagccagccgaacaccatgaagtccagcggccctgtggagaggctgctcagagccctggggaggagggacagcagccgggccgcaagcaggcctaggaaagctgagcctcatagcttccgggagaaggttttccggaagaaacctccagtctgtgcagtatgtaaggtgaccatcgatgggacaggcgtttcgtgcagagtctgcaaggtggcgacgcacagaaaatgtgaagcaaaggtgacttcagcctgtcaggccttgcctcccgtggagttgcggcgaaacacggccccagtcaggcgcatagagcacctgggatccaccaaatctctgaaccactcaaagcagcgcagcactctgcccaggagcttcagcctggacccgctcatggagcggcgctgggacttagacctcacctacgtgacggagcgcatcttggccgccgccttccccgcgcggcccgatgaacagcggcaccggggccacctgcgcgagctggcccatgtgctgcaatccaagcaccgggacaagtacctgctcttcaacctttcagagaaaaggcatgacctgacccgcttaaaccccaaggttcaagacttcggctggcctgagctgcatgctccacccctggacaagctgtgctccatctgcaaagccatggagacatggctcagtgctgacccacagcacgtggtcgtactatactgcaagggaaacaagggcaagcttggggtcatcgtttctgcctacatgcactacagcaagatctctgcaggggcggaccaggcactggccactcttaccatgcggaaattctgcgaggacaaggtggccacagaactgcagccctcccagcgtcgatatatcagctacttcagtgggctgctatctggctccatcagaatgaacagcagccctctcttcctgcactatgtgctcatccccatgctgccagcctttgaacctggcacaggcttccagcccttccttaaaatctaccagtccatgcagcttgtctacacatctggagtctatcacattgcaggccctggtccccagcagctttgcatcagcctggagccagccctcctcctcaaaggcgatgtcatggtaacatgttatcacaagggtggccggggcacagaccggaccctcgtgttccgagtccagttccacacctgcaccatccacggaccacagctcactttccccaaggaccagcttgacgaggcctggactgatgagaggttccccttccaagcctccgtggagtttgtcttctcctccagccccgagaagatcaaaggcagcactccacggaacgacccctcggtctctgtcgactacaacaccactgagccagccgtgcgctgggactcctatgagaacttcaaccagcaccacgaggacagtgtggatggctccttgacccacacccggggtcccctggatggcagtccttatgcccaggtgcagcggcctccccggcagacccccccggcaccctctccagagcctccaccaccccccatgctctctgtcagcagcgactcaggccattcctccacgctgaccacagagccggctgctgagtcccctggccggccgccccctacagctgctgaacggcaggagctggatcgcctcctaggaggctgcggagtggccagtgggggccggggagctgggcgcgagacggccatcctagatgacgaagagcagcccactgtgggcggaggcccccacctcggagtgtatccaggccataggcctggcctcagccgccactgctcctgccgccagggctaccgggagccctgcggggttcccaatgggggctactaccggccagagggaaccctggagaggaggcgactggcctacgggggctatgagggatccccccagggctacgccgaggcctcgatggagaagaggcgcctctgccgatcgctgtcagaggggctatacccctacccacctgagatggggaaaccagccactggggactttggctaccgcgccagctctgcagctctgagctgtagcccccgcccgacaccagctgttgtccacttcaaggtgtcagcccagggcattacactgacggacaaccaaaggaagctcttctttcgccgccattatccagtgaacagcatcaccttctccagcactgaccctcaagaccggagatggaccaacccagacgggaccacctccaagatctttggtttcgtggccaagaagccgggaagcccctgggagaatgtgtgtcacctctttgcagagcttgacccagatcagcctgctggcgccattgtcaccttcatcaccaaagttctactgggccagagaaaatgaaggaaggccacaagctcagagcccacatcaacactgcccccctcccagcaccccacagccctcacatcccctggcctggacccaggagacccaggagaaagcaccctcccttaggaatgaggagtgggcatcaggcctgggacactgctctccttccccgcccccagcctgctaagttaagtggacaggcccacaagatgaccttgcatgtgagcagatggcagagatgggtgtgtgaggggtgaggaggcatcagcagttgagccccgaaggagatcaggcagccccacctgcaggagaacgtcagccctccaggggatcagcccctgccagttccacccagctgcaggtgccagcacggcagggatgggagaggggtggggagcgagtcactgcctcctctgagcagagattcagagtaggatcacatgaataggggaaaaaagagagtctatttttgtctaataataaagaatttctataaacttt

SEQ ID NO: 31320 - DNA, 4979 bp, Homo sapiens
  source 1..4979: mol_type = unassigned DNA
gggggagcaaaagatcacaggctgacactcccagcagggtagatcctgggaatctgatctcctggcctcccccacatcctcccccctccacttcctggagcagcgacctgcccccttcccgcctgcacttccctccacttccagggccgggcttctcctcacaccagccagacagcctaccctccgcccaggggaagcggctgcctccgccaggccgcttccaggaagccccgggccaggccccagcattgttcaggccctggggccagcaccccagccagccgaacaccatgaagtccagcggccctgtggagaggctgctcagagccctggggaggagggacagcagccgggccgcaagcaggcctaggaaagctgagcctcatagcttccgggagaaggttttccggaagaaacctccagtctgtgcagtatgtaaggtgaccatcgatgggacaggcgtttcgtgcagagtctgcaaggtggcgacgcacagaaaatgtgaagcaaaggtgacttcagcctgtcaggccttgcctcccgtggagttgcggcgaaacacggccccagtcaggcgcatagagcacctgggatccaccaaatctctgaaccactcaaagcagcgcagcactctgcccaggagcttcagcctggacccgctcatggagcggcgctgggacttagacctcacctacgtgacggagcgcatcttggccgccgccttccccgcgcggcccgatgaacagcggcaccggggccacctgcgcgagctggcccatgtgctgcaatccaagcaccgggacaagtacctgctcttcaacctttcagagaaaaggcatgacctgacccgcttaaaccccaaggttcaagacttcggctggcctgagctgcatgctccacccctggacaagctgtgctccatctgcaaagccatggagacatggctcagtgctgacccacagcacgtggtcgtactatactgcaagggaaacaagggcaagcttggggtcatcgtttctgcctacatgcactacagcaagatctctgcaggggcggaccaggcactggccactcttaccatgcggaaattctgcgaggacaaggtggccacagaactgcagccctcccagcgtcgatatatcagctacttcagtgggctgctatctggctccatcagaatgaacagcagccctctcttcctgcactatgtgctcatccccatgctgccagcctttgaacctggcacaggcttccagcccttccttaaaatctaccagtccatgcagcttgtctacacatctggagtctatcacattgcaggccctggtccccagcagctttgcatcagcctggagccagccctcctcctcaaaggcgatgtcatggtaacatgttatcacaagggtggccggggcacagaccggaccctcgtgttccgagtccagttccacacctgcaccatccacggaccacagctcactttccccaaggaccagcttgacgaggcctggactgatgagaggttccccttccaagcctccgtggagtttgtcttctcctccagccccgagaagatcaaaggcagcactccacggaacgacccctcggtctctgtcgactacaacaccactgagccagccgtgcgctgggactcctatgagaacttcaaccagcaccacgaggacagtgtggatggctccttgacccacacccggggtcccctggatggcagtccttatgcccaggtgcagcggcctccccggcagacccccccggcaccctctccagagcctccaccaccccccatgctctctgtcagcagcgactcaggccattcctccacgctgaccacagagccggctgctgagtcccctggccggccgccccctacagctgctgaacggcaggagctggatcgcctcctaggaggctgcggagtggccagtgggggccggggagctgggcgcgagacggccatcctagatgacgaagagcagcccactgtgggcggaggcccccacctcggagtgtatccaggccataggcctggcctcagccgccactgctcctgccgccagggctaccgggagccctgcggggttcccaatgggggctactaccggccagagggaaccctggagaggaggcgactggcctacgggggctatgagggatccccccagggctacgccgaggcctcgatggagaagaggcgcctctgccgatcgctgtcagaggggctatacccctacccacctgagatggggaaaccagccactggggactttggctaccgcgccccaggctaccgggaggtggtcatcctggaggaccctgggctgcctgccctatacccatgcccagcctccttgtatggactgcggctggagagggaggctggagaagggtgggcaagtgaggctggcaagcctctcctgcacccagtgcggcctgggcacccgctgcctctgctcttgcctgcctgtgggcatcaccatgccccgatgcctgactacagctgcctgaagccacccaaggcaggcgaggaagggcacgagggctgctcctacaccatgtgccccgaaggcaggtatgggcatccagggtaccctgccctggtgacatacagctatggaggagcagttcccagttactgcccagcatatggccgtgtgcctcatagctgtggctctccaggagagggcagagggtatcccagccctggtgcccactccccacgggctggctccatttccccgggcagcccgccctatccacaatctaggaagctgagctacgagatccctacggaggagggaggggacaggtacccattgcctgggcacctggcctcagcaggacctttggcatctgcagagtcgctggagccggtgtcctggagggagggccccagtgggcacagcacactgcctcggtctccccgagatgccccatgcagtgcttcgtcagagttgtctggtccctccacgcccctgcacaccagcagtccagtccagggcaaggaaagcacccggcgacaggacaccaggtcccccacctcagcgcccactcagagactgagtcctggcgaggccttgccccctgtttcccaggcaggcaccggaaaggcccctgagctgccgtcgggaagtgggcctgagcctctggcccctagcccagtctctccgaccttccctcccagctcgcccagtgactggcctcaggaaaggagtccagggggccactcagatggcgccagtcctcggagccctgtgcccaccacacttcctggcctccgccacgccccctggcaaggccctcgaggcccccccgacagcccagatgggtctcccctcactcctgtgccttcccagatgccctggcttgtggccagcccagagccgcctcagagctcacctacacctgctttccccctggctgcctcctatgacaccaatggccttagccagcccccacttcctgagaaacgccacctgcccgggccggggcaacagccaggaccctggggcccagagcaggcatcatcgccagccagaggcatcagtcaccatgtcaccttcgcacctctgctctcagataatgtcccccaaaccccagagcctcctacacaagagagccaaagcaatgtcaagtttgtccaggatacatccaagttctggtacaagccacacctgtcccgtgaccaagccattgccctgctgaaggacaaggaccctggggccttcctgatcagggacagtcattcattccaaggagcttatgggctggccctcaaggtggccacaccgccacccagtgcccagccctggaaaggggaccccgtggaacagctggtccgccatttcctcatcgagactgggcccaaaggggtgaagatcaagggctgccccagtgagccctactttggcagcctgtccgccttggtctcccagcactccatctcccccatctccctgccctgctgcctgcgcattcccagcaaagatcctctggaagagaccccagaggctccagtgcccaccaacatgagcacagcggcagacctcctgcgtcagggtgctgcctgcagcgtgctctacttgacctcagtggagacagagtcactgacgggcccccaagctgtggcccgggccagctctgcagctctgagctgtagcccccgcccgacaccagctgttgtccacttcaaggtgtcagcccagggcattacactgacggacaaccaaaggaagctcttctttcgccgccattatccagtgaacagcatcaccttctccagcactgaccctcaagaccggagatggaccaacccagacgggaccacctccaagatctttggtttcgtggccaagaagccgggaagcccctgggagaatgtgtgtcacctctttgcagagcttgacccagatcagcctgctggcgccattgtcaccttcatcaccaaagttctactgggccagagaaaatgaaggaaggccacaagctcagagcccacatcaacactgcccccctcccagcaccccacagccctcacatcccctggcctggacccaggagacccaggagaaagcaccctcccttaggaatgaggagtgggcatcaggcctgggacactgctctccttccccgcccccagcctgctaagttaagtggacaggcccacaagatgaccttgcatgtgagcagatggcagagatgggtgtgtgaggggtgaggaggcatcagcagttgagccccgaaggagatcaggcagccccacctgcaggagaacgtcagccctccaggggatcagcccctgccagttccacccagctgcaggtgccagcacggcagggatgggagaggggtggggagcgagtcactgcctcctctgagcagagattcagagtaggatcacatgaataggggaaaaaagagagtctatttttgtctaataataaagaatttctataaacttt

SEQ ID NO: 31321 - DNA, 2513 bp, Homo sapiens
  source 1..2513: mol_type = unassigned DNA
tctatctcagtttcaagcttcctagtcttccccacacacacacacctagctcctcaggcggagagcacccctttcttggccacccgggtatcccccagggggagtacggggctcaaaacacccttctggaaaaacaaaggtggaagcaaatttcaggaagtaaaacttcctgaaataaaataaaatatcgaatgccttgagacccatacattttcaggttttcctaattaaagcaattactttccaccacccctccaacctggaatcaccaacttgattagagaaactgatttttcttttttctttttttttcccaaaagagtacctctgatcattttagcctgcaactaatgatagagatattagggctagttaaccacagttttacaagactcctcttcccgcgtgtgggccattgtcatgctggtgggcgtcccgcccacctgaaaggtctccccgccccgactggggtttgttgttgaagaaggagaatccccggaaaggctgagtctccagctcaaggtcaaaacgtccaaggccgaaagccctccagtttcccctggacgccttgctcctgcttctgctacgaccttctggggaaaacgaatttctcattttcttcttaaattgccattttcgctttaggagatgaatgttttcctttggctgttttggcaatgactctgaattaaagcgatgctaacgcctcttttccccctaattgttaaaagctatggactgcaggaagatggcccgcttctcttacagtgtgatttggatcatggccatttctaaagtctttgaactgggattagttgccgggctgggccatcaggaatttgctcgtccatctcggggatacctggccttcagagatgacagcatttggccccaggaggagcctgcaattcggcctcggtcttcccagcgtgtgccgcccatggggatacagcacagtaaggagctaaacagaacctgctgcctgaatgggggaacctgcatgctggggtccttttgtgcctgccctccctccttctacggacggaactgtgagcacgatgtgcgcaaagagaactgtgggtctgtgccccatgacacctggctgcccaagaagtgttccctgtgtaaatgctggcacggtcagctccgctgctttcctcaggcatttctacccggctgtgatggccttgtgatggatgagcacctcgtggcttccaggactccagaactaccaccgtctgcacgtactaccacttttatgctagttggcatctgcctttctatacaaagctactattaatcgacattgacctatttccagaaatacaattttagatatcatgcaaatttcatgaccagtaaaggctgctgctacaatgtcctaactgaaagatgatcatttgtagttgccttaaaataatgaatacatttccaaaatggtctctaacatttccttacagaactacttcttacttctttgccctgccctctcccaaaaaactacttcttttttcaaaagaaagtcagccatatctccattgtgcctaagtccagtgtttctttttttttttttttttgagacggagtctcactctgtcacccaggctggactgcaatgacgcgatcttggttcactgcaacctccgcatccggggttcaagccattctcctgcctcagcctcccaagtaactgggattacaggcatgtgtcaccatgcccagctaatttttttgtatttttagtagagatgggggtttcaccatattggccagtctggtctcgaactcctgaccttgtgatccactcgcctcagcctctcgaagtgctgagattacacacgtgagcaactgtgcaaggcctggtgtttcttgatacatgtaattctaccaaggtcttcttaatatgttcttttaaatgattgaattatatgttcagattattggagactaattctaatgtggaccttagaatacagttttgagtagagttgatcaaaatcaattaaaatagtctctttaaaaggaaagaaaacatctttaaggggaggaaccagagtgctgaaggaatggaagtccatctgcgtgtgtgcagggagactgggtaggaaagaggaagcaaatagaagagagaggttgaaaaacaaaatgggttacttgattggtgattaggtggtggtagagaagcaagtaaaaaggctaaatggaagggcaagtttccatcatctatagaaagctatataagacaagaactcccctttttttcccaaaggcattataaaaagaatgaagcctccttagaaaaaaaattatacctcaatgtccccaacaagattgcttaataaattgtgtttcctccaagctattcaattcttttaactgttgtagaagacaaaatgttcacaatatatttagttgtaaaccaagtgatcaaactacatattgtaaagcccatttttaaaatacattgtatatatgtgtatgcacagtaaaaatggaaactatattgacctaaa

SEQ ID NO: 31322 - DNA, 1771 bp, Homo sapiens
  source 1..1771: mol_type = unassigned DNA
cctggatgttcaagggaacaatgacagagtgtgatttggatcatggccatttctaaagtctttgaactgggattagttgccgggctgggccatcaggaatttgctcgtccatctcggggatacctggccttcagagatgacagcatttggccccaggaggagcctgcaattcggcctcggtcttcccagcgtgtgccgcccatggggatacagcacagtaaggagctaaacagaacctgctgcctgaatgggggaacctgcatgctggggtccttttgtgcctgccctccctccttctacggacggaactgtgagcacgatgtgcgcaaagagaactgtgggtctgtgccccatgacacctggctgcccaagaagtgttccctgtgtaaatgctggcacggtcagctccgctgctttcctcaggcatttctacccggctgtgatggccttgtgatggatgagcacctcgtggcttccaggactccagaactaccaccgtctgcacgtactaccacttttatgctagttggcatctgcctttctatacaaagctactattaatcgacattgacctatttccagaaatacaattttagatatcatgcaaatttcatgaccagtaaaggctgctgctacaatgtcctaactgaaagatgatcatttgtagttgccttaaaataatgaatacatttccaaaatggtctctaacatttccttacagaactacttcttacttctttgccctgccctctcccaaaaaactacttcttttttcaaaagaaagtcagccatatctccattgtgcctaagtccagtgtttctttttttttttttttttgagacggagtctcactctgtcacccaggctggactgcaatgacgcgatcttggttcactgcaacctccgcatccggggttcaagccattctcctgcctcagcctcccaagtaactgggattacaggcatgtgtcaccatgcccagctaatttttttgtatttttagtagagatgggggtttcaccatattggccagtctggtctcgaactcctgaccttgtgatccactcgcctcagcctctcgaagtgctgagattacacacgtgagcaactgtgcaaggcctggtgtttcttgatacatgtaattctaccaaggtcttcttaatatgttcttttaaatgattgaattatatgttcagattattggagactaattctaatgtggaccttagaatacagttttgagtagagttgatcaaaatcaattaaaatagtctctttaaaaggaaagaaaacatctttaaggggaggaaccagagtgctgaaggaatggaagtccatctgcgtgtgtgcagggagactgggtaggaaagaggaagcaaatagaagagagaggttgaaaaacaaaatgggttacttgattggtgattaggtggtggtagagaagcaagtaaaaaggctaaatggaagggcaagtttccatcatctatagaaagctatataagacaagaactcccctttttttcccaaaggcattataaaaagaatgaagcctccttagaaaaaaaattatacctcaatgtccccaacaagattgcttaataaattgtgtttcctccaagctattcaattcttttaactgttgtagaagacaaaatgttcacaatatatttagttgtaaaccaagtgatcaaactacatattgtaaagcccatttttaaaatacattgtatatatgtgtatgcacagtaaaaatggaaactatattgacct

SEQ ID NO: 31323 - DNA, 1041 bp, Homo sapiens
  source 1..1041: mol_type = unassigned DNA
accgcggcgcgccgccctccgccgttatatgaggccccgctccggccccacgcggaacccgcggctccgagccttcgccggcgtcccgacccgaggccggacccgaggccagtcccgccgctgcgcagccgaagccagtgcggggcctgagagggacgcgcgccccggggcccccgccgcgggcaccatgggcgctgcccactccgcgtctgaggaggtgcgggagctcgagggcaagaccggcttctcatcggatcagatcgagcagctccatcggagatttaagcagctgagtggagatcagcctaccattcgcaaggagaacttcaacaatgtcccggacctggagctcaaccccatccgatccaaaattgttcgtgccttcttcgacaacaggaacctgcgcaagggacccagtggcctggctgatgagatcaatttcgaggacttcctgaccatcatgtcctacttccggcccatcgacaccaccatggacgaggaacaggtggagctgtcccggaaggagaagctgagatttctgttccacatgtacgactcggacagcgacggccgcatcactctggaagaatatcgaaatgtggtcgaggagctgctgtcgggaaaccctcacatcgagaaggagtccgctcgctccatcgccgacggggccatgatggaggcggccagcgtgtgcatggggcagatggagcctgatcaggtgtacgaggggatcaccttcgaggacttcctgaagatctggcaggggatcgacattgagaccaagatgcacgtccgcttccttaacatggaaaccatggccctctgccactgacccaccgccacctccgcggagaaactgcactttgcaatggggccgcctccccgcgtagctggagcagcccaggcccggcggacagcctcttcctgcagcgccggtacatagccaaggctcgtctgcgcaccttgtgtcttgtagggtatggtatgtgggacttcgctgtttttatctccaataaaaaaaaaaaaaaggtttgttaatta

SEQ ID NO: 31324 - DNA, 1017 bp, Homo sapiens
  source 1..1017: mol_type = unassigned DNA
gttatatgaggccccgctccggccccacgcggaacccgcggctccgagccttcgccggcgtcccgacccgaggccggacccgaggccagtcccgccgctgcgcagccgaagccagtgcggggcctgagagggacgcgcgccccggggcccccgccgcgggcaccatgggcgctgcccactccgcgtctgaggaggtgcgggagctcgagggcaagaccggcttctcatcggatcagatcgagcagctccatcggagatttaagcagctgagtggagatcagcctaccattcgcaaggagaacttcaacaatgtcccggacctggagctcaaccccatccgatccaaaattgttcgtgccttcttcgacaacaggaacctgcgcaagggacccagtggcctggctgatgagatcaatttcgaggacttcctgaccatcatgtcctacttccggcccatcgacaccaccatggacgaggaacaggtggagctgtcccggaaggagaagctgagatttctgttccacatgtacgactcggacagcgacggccgcatcactctggaagaatatcgaaatgtggtcgaggagctgctgtcgggaaaccctcacatcgagaaggagtccgctcgctccatcgccgacggggccatgatggaggcggccagcgtgtgcatggggcagatggagcctgatcaggtgtacgaggggatcaccttcgaggacttcctgaagatctggcaggggatcgacattgagaccaagatgcacgtccgcttccttaacatggaaaccatggccctctgccactgacccaccgccacctccgcggagaaactgcactttgcaatggggccgcctccccgcgtagctggagcagcccaggcccggcggacagcctcttcctgcagcgccggtacatagccaaggctcgtctgcgcaccttgtgtcttgtagggtatggtatgtgggacttcgctgtttttatctccaataaaaaaaaaaaaaaggtttgttaatt

SEQ ID NO: 31325 - DNA, 936 bp, Homo sapiens
  source 1..936: mol_type = unassigned DNA
gttatatgaggccccgctccggccccacgcggaacccgcggctccgagccttcgccggcgtcccgacccgaggccggacccgaggccagtcccgccgctgcgcagccgaagccagtgcggggcctgagagggacgcgcgccccggggcccccgccgcgggcaccatgggcgctgcccactccgcgtctgaggaggtgcgggagctcgagggcaagaccggcttctcatcggatcagatcgagcagctccatcggagatttaagcagctgagtggagatcagcctaccattcggaacctgcgcaagggacccagtggcctggctgatgagatcaatttcgaggacttcctgaccatcatgtcctacttccggcccatcgacaccaccatggacgaggaacaggtggagctgtcccggaaggagaagctgagatttctgttccacatgtacgactcggacagcgacggccgcatcactctggaagaatatcgaaatgtggtcgaggagctgctgtcgggaaaccctcacatcgagaaggagtccgctcgctccatcgccgacggggccatgatggaggcggccagcgtgtgcatggggcagatggagcctgatcaggtgtacgaggggatcaccttcgaggacttcctgaagatctggcaggggatcgacattgagaccaagatgcacgtccgcttccttaacatggaaaccatggccctctgccactgacccaccgccacctccgcggagaaactgcactttgcaatggggccgcctccccgcgtagctggagcagcccaggcccggcggacagcctcttcctgcagcgccggtacatagccaaggctcgtctgcgcaccttgtgtcttgtagggtatggtatgtgggacttcgctgtttttatctccaataaaaaaaaaaaaaaggtttgttaatt

SEQ ID NO: 31326 - DNA, 2565 bp, Homo sapiens
  source 1..2565: mol_type = unassigned DNA
ttaaatttagaggtcaaattcaaaaaaatgggcttaggtcacgagcaaggatttggagccccttgtttaaaatgcaaagaaaaatgtgaaggattcgaactgcacttctggagaaaaatatgtcgtaactgcaagtgtggccaagaagagcatgatgtcctcttgagcaatgaagaggatcgaaaagtgggaaaactttttgaagacaccaagtataccactctgattgcaaaactaaagtcagatggaattcccatgtataaacgcaatgttatgatattgacgaatccagttgctgccaagaagaatgtctccatcaatacagttacctatgagtgggctcctcctgtccagaatcaagcattggccaggcagtacatgcagatgctacccaaggaaaagcagccagtagcaggctcagagggggcacagtaccggaagaagcagctggcaaagcagctccctgcacatgaccaggacccttcaaagtgccatgagttgtctcccagagaggtgaaggagatggagcagtttgtgaagaaatataagagcgaagctctgggagtaggagatgtcaaacttccctgtgagatggatgcccaaggccccaaacaaatgaacattcctggaggggatagaagcaccccagcagcagtgggggccatggaggacaaatctgctgagcacaaaagaactcaatattcctgctattgctgcaaactgagtatgaaagaaggtgacccagccatctatgccgaaagggctggctatgataaactgtggcacccagcttgttttgtctgcagcacctgccatgaactcctggttgacatgatttatttttggaagaatgagaagctatactgtggcagacattactgtgacagcgagaaaccccgatgtgctggctgtgacgagctgatattcagcaatgagtatacccaggcagaaaaccagaattggcacctgaaacacttctgctgctttgactgtgatagcattctagctggggagatatacgtgatggtcaatgacaagcccgtgtgcaagccctgctatgtgaagaatcacgctgtggtgtgtcaaggatgccacaatgccatcgacccagaagtgcagcgggtgacctataacaatttcagctggcatgcatccacagagtgctttctgtgctcttgctgcagcaaatgcctcattgggcagaagttcatgccagtagaagggatggttttctgttcagtggaatgtaagaagaggatgtcttaggaggagggcacccagaagtatcgagccatagctatccaaagtggtctgcatttctactgtaaaatgcaatttgaaaaaaataaaacgcaaaaaaagaaactgtaaaggaaaccaagagattttgtttaatttttttggccattttttcttcatcaattttttttcggtctcaacttttaaacttggtttaagcatttgatttgtaaaacagtaaataattgtatctttccatagcttttcaaatgtgaaatcatttttggaagcttggatctcattaaacttcatgtctctattccatttgtgccacacacttaaaagttagtgtactgaatggaaagatgagcattcctagttctacacttcttttttccccctcatgtgtaaaatgaaaagaaaactaaatttgccctaataccaaggcgctacgtttattgcctcgtcttattcactgacctttgtaatgatacacagtgaattctttttgacaaagagaaatgcagtgtagtatgcagagctgctgttttaatgcctatgcatttactctttcctgatttaggcagaggtggcattttctttattgcatttctctatttttttaatgtaccctaccttcagtattctctttgtaagttggtgacttgcatctgtggccttgaatattttattatcacatgtggcataacagtatccacactttttagttctttatttttttttttttattttgagcaattctcctgcctcagcctcccaaatagctgggattacaggtgcatgccaccacacccagctaatttttgtatttttagtagagacaggttttcaccatgttagccaggctggtctcaaactcctgacctcagatgatccgcctgccttggcctcccaaagtgctgggattacaggtgtgggagccaccatgcctgacccacacactttttacttgtatagatgatttttggcttggacataaaagccaagccacccatttgcttttaatccaaagaacatgtatagtttttgtacccagagactatgatttatattgattgcacttgcctgccatgatttagataagattttttttgcatggtttttattctttcctaatggatcctgttttataatacttccaagcctgtccatggatatatcaaatgtcttcacttgtatattttcatggctaggtatttctaatgtttattcttccctgtgtacttctacacatagctatgcactatgaaaattaaatggaatgaatgatatgtatattactcaaaataaagtttctttcacttt

SEQ ID NO: 31327 - DNA, 2782 bp, Homo sapiens
  source 1..2782: mol_type = unassigned DNA
attggctgcccggccccctttgttcccgggtccgggccgcaggcccgctgcggcggactgggcggcggaagttcgacggcgccgggcgagtggctgttgagcggcgccgcgggagttccgcaggtttcccgtgttcgcagcggagccggaggccagctgaacccggccgtgggatcccggataggaggaggaggggacccataggacgcgttaacatggacctggaaaacaaagtgaagaagatgggcttaggtcacgagcaaggatttggagccccttgtttaaaatgcaaagaaaaatgtgaaggattcgaactgcacttctggagaaaaatatgtcgtaactgcaagtgtggccaagaagagcatgatgtcctcttgagcaatgaagaggatcgaaaagtgggaaaactttttgaagacaccaagtataccactctgattgcaaaactaaagtcagatggaattcccatgtataaacgcaatgttatgatattgacgaatccagttgctgccaagaagaatgtctccatcaatacagttacctatgagtgggctcctcctgtccagaatcaagcattggccaggcagtacatgcagatgctacccaaggaaaagcagccagtagcaggctcagagggggcacagtaccggaagaagcagctggcaaagcagctccctgcacatgaccaggacccttcaaagtgccatgagttgtctcccagagaggtgaaggagatggagcagtttgtgaagaaatataagagcgaagctctgggagtaggagatgtcaaacttccctgtgagatggatgcccaaggccccaaacaaatgaacattcctggaggggatagaagcaccccagcagcagtgggggccatggaggacaaatctgctgagcacaaaagaactcaatattcctgctattgctgcaaactgagtatgaaagaaggtgacccagccatctatgccgaaagggctggctatgataaactgtggcacccagcttgttttgtctgcagcacctgccatgaactcctggttgacatgatttatttttggaagaatgagaagctatactgtggcagacattactgtgacagcgagaaaccccgatgtgctggctgtgacgagctgatattcagcaatgagtatacccaggcagaaaaccagaattggcacctgaaacacttctgctgctttgactgtgatagcattctagctggggagatatacgtgatggtcaatgacaagcccgtgtgcaagccctgctatgtgaagaatcacgctgtggtgtgtcaaggatgccacaatgccatcgacccagaagtgcagcgggtgacctataacaatttcagctggcatgcatccacagagtgctttctgtgctcttgctgcagcaaatgcctcattgggcagaagttcatgccagtagaagggatggttttctgttcagtggaatgtaagaagaggatgtcttaggaggagggcacccagaagtatcgagccatagctatccaaagtggtctgcatttctactgtaaaatgcaatttgaaaaaaataaaacgcaaaaaaagaaactgtaaaggaaaccaagagattttgtttaatttttttggccattttttcttcatcaattttttttcggtctcaacttttaaacttggtttaagcatttgatttgtaaaacagtaaataattgtatctttccatagcttttcaaatgtgaaatcatttttggaagcttggatctcattaaacttcatgtctctattccatttgtgccacacacttaaaagttagtgtactgaatggaaagatgagcattcctagttctacacttcttttttccccctcatgtgtaaaatgaaaagaaaactaaatttgccctaataccaaggcgctacgtttattgcctcgtcttattcactgacctttgtaatgatacacagtgaattctttttgacaaagagaaatgcagtgtagtatgcagagctgctgttttaatgcctatgcatttactctttcctgatttaggcagaggtggcattttctttattgcatttctctatttttttaatgtaccctaccttcagtattctctttgtaagttggtgacttgcatctgtggccttgaatattttattatcacatgtggcataacagtatccacactttttagttctttatttttttttttttattttgagcaattctcctgcctcagcctcccaaatagctgggattacaggtgcatgccaccacacccagctaatttttgtatttttagtagagacaggttttcaccatgttagccaggctggtctcaaactcctgacctcagatgatccgcctgccttggcctcccaaagtgctgggattacaggtgtgggagccaccatgcctgacccacacactttttacttgtatagatgatttttggcttggacataaaagccaagccacccatttgcttttaatccaaagaacatgtatagtttttgtacccagagactatgatttatattgattgcacttgcctgccatgatttagataagattttttttgcatggtttttattctttcctaatggatcctgttttataatacttccaagcctgtccatggatatatcaaatgtcttcacttgtatattttcatggctaggtatttctaatgtttattcttccctgtgtacttctacacatagctatgcactatgaaaattaaatggaatgaatgatatgtatattactcaaaataaagtttctttcactttaa

SEQ ID NO: 31328 - DNA, 2763 bp, Homo sapiens
  source 1..2763: mol_type = unassigned DNA
aataaataggaggttttgagggctgtttatgagcgcattccattacagtgtctttcagcggagccagagctcagccaatcctaattaagaagcaatttcagctgcagtcattgcttattataataattgtgacatttttatagccctacattgtctttctcaaagtaacggattcaggaggagtccttttctgagtagagtccacagaagaggtattctattgatgggcttaggtcacgagcaaggatttggagccccttgtttaaaatgcaaagaaaaatgtgaaggattcgaactgcacttctggagaaaaatatgtcgtaactgcaagtgtggccaagaagagcatgatgtcctcttgagcaatgaagaggatcgaaaagtgggaaaactttttgaagacaccaagtataccactctgattgcaaaactaaagtcagatggaattcccatgtataaacgcaatgttatgatattgacgaatccagttgctgccaagaagaatgtctccatcaatacagttacctatgagtgggctcctcctgtccagaatcaagcattggccaggcagtacatgcagatgctacccaaggaaaagcagccagtagcaggctcagagggggcacagtaccggaagaagcagctggcaaagcagctccctgcacatgaccaggacccttcaaagtgccatgagttgtctcccagagaggtgaaggagatggagcagtttgtgaagaaatataagagcgaagctctgggagtaggagatgtcaaacttccctgtgagatggatgcccaaggccccaaacaaatgaacattcctggaggggatagaagcaccccagcagcagtgggggccatggaggacaaatctgctgagcacaaaagaactcaatattcctgctattgctgcaaactgagtatgaaagaaggtgacccagccatctatgccgaaagggctggctatgataaactgtggcacccagcttgttttgtctgcagcacctgccatgaactcctggttgacatgatttatttttggaagaatgagaagctatactgtggcagacattactgtgacagcgagaaaccccgatgtgctggctgtgacgagctgatattcagcaatgagtatacccaggcagaaaaccagaattggcacctgaaacacttctgctgctttgactgtgatagcattctagctggggagatatacgtgatggtcaatgacaagcccgtgtgcaagccctgctatgtgaagaatcacgctgtggtgtgtcaaggatgccacaatgccatcgacccagaagtgcagcgggtgacctataacaatttcagctggcatgcatccacagagtgctttctgtgctcttgctgcagcaaatgcctcattgggcagaagttcatgccagtagaagggatggttttctgttcagtggaatgtaagaagaggatgtcttaggaggagggcacccagaagtatcgagccatagctatccaaagtggtctgcatttctactgtaaaatgcaatttgaaaaaaataaaacgcaaaaaaagaaactgtaaaggaaaccaagagattttgtttaatttttttggccattttttcttcatcaattttttttcggtctcaacttttaaacttggtttaagcatttgatttgtaaaacagtaaataattgtatctttccatagcttttcaaatgtgaaatcatttttggaagcttggatctcattaaacttcatgtctctattccatttgtgccacacacttaaaagttagtgtactgaatggaaagatgagcattcctagttctacacttcttttttccccctcatgtgtaaaatgaaaagaaaactaaatttgccctaataccaaggcgctacgtttattgcctcgtcttattcactgacctttgtaatgatacacagtgaattctttttgacaaagagaaatgcagtgtagtatgcagagctgctgttttaatgcctatgcatttactctttcctgatttaggcagaggtggcattttctttattgcatttctctatttttttaatgtaccctaccttcagtattctctttgtaagttggtgacttgcatctgtggccttgaatattttattatcacatgtggcataacagtatccacactttttagttctttatttttttttttttattttgagcaattctcctgcctcagcctcccaaatagctgggattacaggtgcatgccaccacacccagctaatttttgtatttttagtagagacaggttttcaccatgttagccaggctggtctcaaactcctgacctcagatgatccgcctgccttggcctcccaaagtgctgggattacaggtgtgggagccaccatgcctgacccacacactttttacttgtatagatgatttttggcttggacataaaagccaagccacccatttgcttttaatccaaagaacatgtatagtttttgtacccagagactatgatttatattgattgcacttgcctgccatgatttagataagattttttttgcatggtttttattctttcctaatggatcctgttttataatacttccaagcctgtccatggatatatcaaatgtcttcacttgtatattttcatggctaggtatttctaatgtttattcttccctgtgtacttctacacatagctatgcactatgaaaattaaatggaatgaatgatatgtatattactcaaaataaagtttctttcactttaa

SEQ ID NO: 31329 - DNA, 1022 bp, Homo sapiens
  source 1..1022: mol_type = unassigned DNA
actgggcggcggaagttcgacggcgccgggcgagtggctgttgagcggcgccgcgggagttccgcaggtttcccgtgttcgcagcggagccggaggccagctgaacccggccgtgggatcccggataggaggaggaggggacccataggacgcgttaacatggacctggaaaacaaagtgaagaagatgggcttaggtcacgagcaaggatttggagccccttgtttaaaatgcaaagaaaaatgtgaaggattcgaactgcacttctggagtcctgctattgctgcaaactgagtatgaaagaaggtgacccagccatctatgccgaaagggctggctatgataaactgtggcacccagcttgttttgtctgcagcacctgccatgaactcctggttgacatgatttatttttggaagaatgagaagctatactgtggcagacattactgtgacagcgagaaaccccgatgtgctggctgtgacgagctgatattcagcaatgagtatacccaggcagaaaaccagaattggcacctgaaacacttctgctgctttgactgtgatagcattctagctggggagatatacgtgatggtcaatgacaagcccgtgtgcaagccctgctatgtgaagaatcacgctgtggtgtgtcaaggatgccacaatgccatcgacccagaagtgcagcgggtgacctataacaatttcagctggcatgcatccacagagtgctttctgtgctcttgctgcagcaaatgcctcattgggcagaagttcatgccagtagaagggatggttttctgttcagtggaatgtaagaagaggatgtcttaggaggagggcacccagaagtatcgagccatagctatccaaagtggtctgcatttctactgtaaaatgcaatttgaaaaaaataaaacgcaaaaaaagaaactgtaaaggaaaccaagagattttgtttaatttttttggccattttttcttcatcaattttttttcggtctcaacttttaaacttgg

SEQ ID NO: 31330 - DNA, 1018 bp, Homo sapiens
  source 1..1018: mol_type = unassigned DNA
atgggggcgaggcagatccagaccagctcctcccagacctctccagaagaagccatgggaacccctcgtatccagcatttgctgatcctcctggtcctaggagcctccctcctgacctcgggcctagagctgtattgtcaaaagggtctgtccatgactgtggaagcagatccagccaatatgtttaactggaccacagaggaagtggagacttgtgacaaaggggcactttgccaggaaaccatactaataattaaagcagggactgagacagccattttggccacgaagggctgcatcccggaaggggaggaggccataacaattgtccagcactcttcacctcccggcctgatcgtgacctcctacagtaactactgtgaggattccttctgtaatgacaaagacagcctgtctcagttttgggagttcagtgagaccacagcttccactgtgtcaacaaccctccattgtccaacctgtgtggctttggggacctgtttcagtgctccttctcttccctgtcccaatggtacaactcgatgctatcaaggaaaacttgagatcactggaggtggcattgagtcgtctgtggaggtcaaaggctgtacagccatgattggctgcaggctgatgtctggaatcttagcagtaggacccatgtttgtgagggaagcgtgcccacatcagctgctcactcaacctcgaaagactgaaaatggggccacctgtcttcccattcctgtttgggggttacagctactgctgccattgctgctgccatcatttattcacttttcctaagaaggcacttctgggcctgggtctgaggacatcttttttgactgggagccttcttactgttgaggttcaacaagctgaggagtagatgggaatttgagggagaatacagagatactatgaacgtatttgacatttttaatacaatttctgctataatttttgtatgcagtaggcgttactaataaacatttctgctgtgatttgtgtatgtttc

SEQ ID NO: 31331 - DNA, 1159 bp, Homo sapiens
  source 1..1159: mol_type = unassigned DNA
gcgtcgtaagagaatgccaagcccggggagaaggcgttccgggcctcaactttggcgtcgtgagattcttgtgaggcgtctgcctggaagccggcagcaattttgcttctttaaagagaaaaagaaggctagggactcagattcctggattctgagatccagaccagctcctcccagacctctccagaagaagccatgggaacccctcgtatccagcatttgctgatcctcctggtcctaggagcctccctcctgacctcgggcctagagctgtattgtcaaaagggtctgtccatgactgtggaagcagatccagccaatatgtttaactggaccacagaggaagtggagacttgtgacaaaggggcactttgccaggaaaccatactaataattaaagcagggactgagacagccattttggccacgaagggctgcatcccggaaggggaggaggccataacaattgtccagcactcttcacctcccggcctgatcgtgacctcctacagtaactactgtgaggattccttctgtaatgacaaagacagcctgtctcagttttgggagttcagtgagaccacagcttccactgtgtcaacaaccctccattgtccaacctgtgtggctttggggacctgtttcagtgctccttctcttccctgtcccaatggtacaactcgatgctatcaaggaaaacttgagatcactggaggtggcattgagtcgtctgtggaggtcaaaggctgtacagccatgattggctgcaggctgatgtctggaatcttagcagtaggacccatgtttgtgagggaagcgtgcccacatcagctgctcactcaacctcgaaagactgaaaatggggccacctgtcttcccattcctgtttgggggttacagctactgctgccattgctgctgccatcatttattcacttttcctaagaaggcacttctgggcctgggtctgaggacatcttttttgactgggagccttcttactgttgaggttcaacaagctgaggagtagatgggaatttgagggagaatacagagatactatgaacgtatttgacatttttaatacaatttctgctataatttttgtatgcagtaggcgttactaataaacatttctgctgtgatttgtgtatgtttc

SEQ ID NO: 31332 - DNA, 1112 bp, Homo sapiens
  source 1..1112: mol_type = unassigned DNA
gaaggcgttccgggcctcaactttggcgtcgtgagattcttgtgaggcgtctgcctggaagccggcagcaattttgcttctttaaagagaaaaagaaggctagggactcagattcctggattctgagatccagaccagctcctcccagacctctccagaagaagccatgggaacccctcgtatccagcatttgctgatcctcctggtcctaggagcctccctcctgacctcgggcctagagctgtattgtcaaaagggtctgtccatgactgtggaagcagatccagccaatatgtttaactggaccacagaggaagtggagacttgtgacaaaggggcactttgccaggaaaccatactaataattaaagcagggactgagacagccattttggccacgaagggctgcatcccggaaggggaggaggccataacaattgtccagcactcttcacctcccggcctgatcgtgacctcctacagtaactactgtgaggattccttctgtaatgacaaagacagcctgtctcagttttgggagttcagtgagaccacagcttccactgtgtcaacaaccctccattgtccaacctgtgtggctttggggacctgtttcagtgctccttctcttccctgtcccaatggtacaactcgatgctatcaaggaaaacttgagatcactggaggtggcattgagtcgtctgtggaggtcaaaggctgtacagccatgattggctgcaggctgatgtctggaatcttagcagtaggacccatgtttgtgagggaagcgtgcccacatcagctgctcactcaacctcgaaagactgaaaatggggccacctgtcttcccattcctgtttgggggttacagctactgctgccattgctgctgccatcatttattcacttttcctaagaaggcacttctgggcctgggtctgaggacatcttttttgactgggagccttcttactgttgaggttcaacaagctgaggagtagatgggaatttgagggagaatacagagatactatgaacgtatttgacatttttaatacaatttctgctataatttttgtatgcagtaggcgttactaataaacatttctgct

SEQ ID NO: 31333 - DNA, 1446 bp, Homo sapiens
  source 1..1446: mol_type = unassigned DNA
aaccatccatcccatcagggaaatatgcaacatgcttcaaagaataagaagagaactttgggccagtagagacggggtttcaccgtgttagccaggatggtctcgatctcctgacctcgtgatccgcctgccttggcctcccaaagtgctgggattacagggcactgaatgtcaaagtgaaggaattcaatgaagcccggatcaagggcaggagcaaccgtgaccctcttaaaagagccaatgccccatgtaattagtgacgcgcgcgaatggatagacgctattcccaccgtccctacatagcatccagcgacaccacagccaagggacaggcttggcggaacctgcgggagagaagaaccctctgagcctgattgaaaggcggtgaagagacaggagagggggatcggtgggcggtcccgcctccatcttcagttcccgcatgggggcgaggcagatccagaccagctcctcccagacctctccagaagaagccatgggaacccctcgtatccagcatttgctgatcctcctggtcctaggagcctccctcctgacctcgggcctagagctgtattgtcaaaagggtctgtccatgactgtggaagcagatccagccaatatgtttaactggaccacagaggaagtggagacttgtgacaaaggggcactttgccaggaaaccatactaataattaaagcagggactgagacagccattttggccacgaagggctgcatcccggaaggggaggaggccataacaattgtccagcactcttcacctcccggcctgatcgtgacctcctacagtaactactgtgaggattccttctgtaatgacaaagacagcctgtctcagttttgggagttcagtgagaccacagcttccactgtgtcaacaaccctccattgtccaacctgtgtggctttggggacctgtttcagtgctccttctcttccctgtcccaatggtacaactcgatgctatcaaggaaaacttgagatcactggaggtggcattgagtcgtctgtggaggtcaaaggctgtacagccatgattggctgcaggctgatgtctggaatcttagcagtaggacccatgtttgtgagggaagcgtgcccacatcagctgctcactcaacctcgaaagactgaaaatggggccacctgtcttcccattcctgtttgggggttacagctactgctgccattgctgctgccatcatttattcacttttcctaagaaggcacttctgggcctgggtctgaggacatcttttttgactgggagccttcttactgttgaggttcaacaagctgaggagtagatgggaatttgagggagaatacagagatactatgaacgtatttgacatttttaatacaatttctgctataatttttgtatgcagtaggcgttactaataaacatttctgctgtga

SEQ ID NO: 31334 - DNA, 2977 bp, Homo sapiens
  source 1..2977: mol_type = unassigned DNA
atgatctcggctcactgcaacctccgcctcctgtgttcaagcgattcttctgcctcagcctcccaagtagctgggactacagaagttgttgaaaacctggttacaaatgataattcacctaacataccagaggcaattgatagactcttcagcgacatagcaaatatcaacagggagtctatggctgaaataacagacattcagattgaagaaatggcagtaaacctatggaactgggcacttaccataggaggaggttggcttgtaaatgaagagcagaaaattagattacattatgttgcttgcaagttgctgagtatgtgtgaagcctcatttgcctcagaacaaagtattcaacgactgattatgatgaatatgagaataggaaaagaatggttggatgctggaaattttctaatcgctgatgaatgttttcaagctgctgtggccagtctggagcaattatacgtcaaattaattcaaaggagctcccctgaggctgacttgaccatggagaagattactgttgagagtgaccacttcagagtgctttcttaccaagcagagtcagcagttgctcaaggggattttcaaagagcatctatgtgtgtactgcaatgtaaagatatgttgatgaggctcccccagatgacttcaagtcttcatcatctctgttacaactttggagtagaaacccagaagaataataaatatgaagaaagttctttctggcttagccaaagctatgatattgggaagatggataagaaatctactgggccagaaatgctggctaaagttctacggctattagccacgaattatttggattgggatgacaccaaatattatgataaggctctcaatgctgtaaacctagcaaacaaggaacatttaagttctcctgggcttttcttaaaaatgaaaatcctcttgaaaggcgaaacatctaatgaagaactccttgaagctgtcatggaaatactacatcttgacatgcccttagacttctgtctgaacattgctaaactgctgatggatcatgaaagagaatctgttgggtttcatttcctgacgattattcatgaacgttttaagtcatcggaaaatattggaaaagttctgatactccatactgacatgcttttacaaaggaaggaagaacttcttgccaaggagaagattgaagaaatctttttagctcaccaaacaggaagacaactgacagcagaatcaatgaactggttacacaacattctgtggagacaagctgccagtagttttgaggtacaaaattacactgatgccctacaatggtactattattctctgaggttttattcaactgatgaaatggatctggacttcaccaagctgcagaggaacatggcttgctgttacctgaatttgcaacaacttgataaggccaaagaggcagtggcagaagctgaacgacatgaccctaggaacgttttcactcaattttatatattcaagattgcagtcatagagggcaactctgaaagagctttgcaggcaataattactttagagaatatattaacagatgaagagtcagaagataatgatctagttgcagagagaggttcacctaccatgcttctaagtttagctgcccagtttgctctagagaatggacaacaaattgtggcagaaaaagctttggaatatttagctcaacattcagaagaccaggaacaagttcttacagctgtaaagtgtttgcttcgttttcttcttccaaaaattgctgaaatgccggaatctgaagataagaagaaagaaatggatcgacttttgacttgcctgaatagagcctttgtgaaactttctcagccttttggtgaagaagccttaagtttggagtcaagagctaatgaagctcagtggtttcgaaaaacagcttggaacttggctgtgcaatgtgacaaagatccagtgatgatgagagagttttttatactttcttataagatgtcccagttttgtccttctgatcaagtaattctgattgcacggaaaacatgtttacttatggcagttgcagttgatctagagcaagggagaaaagcttcaacagcttttgaacagaccatgttcctgagtcgtgcacttgaggagatccagacatgcaatgacatccataatttcctgaaacaaacagggaccttctcaaatgattcatgtgagaaattgcttctgctgtacgagtttgaagttagagccaaattgaatgatccattactggaaagcttcctggaatcagtgtgggagttgcctcatttagaaactaaaacttttgaaacaattgcaataatagcaatggaaaagcctgcacactatcctttgattgctctcaaggccttgaaaaaggctttattgctctacaaaaaggaagaaccaattgatatatcacaatacagcaaatgtatgcacaacttggttaacctctcagtgccagatggggcgtcgaatgtagagctctgtcccctggaagaagtttggggctattttgaagatgctctgagccacattagccgcactaaagactacccagaaatggagattctctggctgatggtcaagtcctggaataccggagtacttatgtttagcaggagcaagtatgcatctgctgaaaagtggtgtggcctggccttgcgtttccttaaccaccttacctccttcaaggaaagctatgaaactcagatgaatatgctgtatagtcagcttgtggaagcattgagtaacaacaagggcccagtttttcatgaacatggctactggagcaagtcagattaggcaagctcatggccacatgaagaagatacattgtcccgagatgctgactgtttaaatttttgccagagtttctcttgagcttttgtttctgtttgctcagaccctgttttcatgttgttgaataaactttctaaaataaaagcatgctgaattt

SEQ ID NO: 31335 - DNA, 2224 bp, Homo sapiens
  source 1..2224: mol_type = unassigned DNA
agtatcacctcagcatacacagattgaaaaatgttagaaaccaggaagacaactctacttttttgcattgggggaataaacaaaccaactaaccaactaaaataatacacttactccaactaagacaacataggaagaccagagagatgattggagtcaccaagttgaagtacattagtttgggatgataattccttatgacagtgtttatccaaatctgtcatggaaatactacatcttgacatgcccttagacttctgtctgaacattgctaaactgctgatggatcatgaaagagaatctgttgggtttcatttcctgacgattattcatgaacgttttaagtcatcggaaaatattggaaaagttctgatactccatactgacatgcttttacaaaggaaggaagaacttcttgccaaggagaagattgaagaaatctttttagctcaccaaacaggaagacaactgacagcagaatcaatgaactggttacacaacattctgtggagacaagctgccagtagttttgaggtacaaaattacactgatgccctacaatggtactattattctctgaggttttattcaactgatgaaatggatctggacttcaccaagctgcagaggaacatggcttgctgttacctgaatttgcaacaacttgataaggccaaagaggcagtggcagaagctgaacgacatgaccctaggaacgttttcactcaattttatatattcaagattgcagtcatagagggcaactctgaaagagctttgcaggcaataattactttagagaatatattaacagatgaagagtcagaagataatgatctagttgcagagagaggttcacctaccatgcttctaagtttagctgcccagtttgctctagagaatggacaacaaattgtggcagaaaaagctttggaatatttagctcaacattcagaagaccaggaacaagttcttacagctgtaaagtgtttgcttcgttttcttcttccaaaaattgctgaaatgccggaatctgaagataagaagaaagaaatggatcgacttttgacttgcctgaatagagcctttgtgaaactttctcagccttttggtgaagaagccttaagtttggagtcaagagctaatgaagctcagtggtttcgaaaaacagcttggaacttggctgtgcaatgtgacaaagatccagtgatgatgagagagttttttatactttcttataagatgtcccagttttgtccttctgatcaagtaattctgattgcacggaaaacatgtttacttatggcagttgcagttgatctagagcaagggagaaaagcttcaacagcttttgaacagaccatgttcctgagtcgtgcacttgaggagatccagacatgcaatgacatccataatttcctgaaacaaacagggaccttctcaaatgattcatgtgagaaattgcttctgctgtacgagtttgaagttagagccaaattgaatgatccattactggaaagcttcctggaatcagtgtgggagttgcctcatttagaaactaaaacttttgaaacaattgcaataatagcaatggaaaagcctgcacactatcctttgattgctctcaaggccttgaaaaaggctttattgctctacaaaaaggaagaaccaattgatatatcacaatacagcaaatgtatgcacaacttggttaacctctcagtgccagatggggcgtcgaatgtagagctctgtcccctggaagaagtttggggctattttgaagatgctctgagccacattagccgcactaaagactacccagaaatggagattctctggctgatggtcaagtcctggaataccggagtacttatgtttagcaggagcaagtatgcatctgctgaaaagtggtgtggcctggccttgcgtttccttaaccaccttacctccttcaaggaaagctatgaaactcagatgaatatgctgtatagtcagcttgtggaagcattgagtaacaacaagggcccagtttttcatgaacatggctactggagcaagtcagattaggcaagctcatggccacatgaagaagatacattgtcccgagatgctgactgtttaaatttttgccagagtttctcttgagcttttgtttctgtttgctcagaccctgttttcatgttgttgaataaactttctaaaataaaagcatgctgaattt

SEQ ID NO: 31336 - DNA, 3032 bp, Homo sapiens
  source 1..3032: mol_type = unassigned DNA
ggagttttctgaacgtcctcgtgcgctgtggacggaggttgtggagagagcagggcggcattggtggctgcggctgaggcttgagccagagatttaaaaatggacaatgatgattttttttccatggactttaaagaagttgttgaaaacctggttacaaatgataattcacctaacataccagaggcaattgatagactcttcagcgacatagcaaatatcaacagggagtctatggctgaaataacagacattcagattgaagaaatggcagtaaacctatggaactgggcacttaccataggaggaggttggcttgtaaatgaagagcagaaaattagattacattatgttgcttgcaagttgctgagtatgtgtgaagcctcatttgcctcagaacaaagtattcaacgactgattatgatgaatatgagaataggaaaagaatggttggatgctggaaattttctaatcgctgatgaatgttttcaagctgctgtggccagtctggagcaattatacgtcaaattaattcaaaggagctcccctgaggctgacttgaccatggagaagattactgttgagagtgaccacttcagagtgctttcttaccaagcagagtcagcagttgctcaaggggattttcaaagagcatctatgtgtgtactgcaatgtaaagatatgttgatgaggctcccccagatgacttcaagtcttcatcatctctgttacaactttggagtagaaacccagaagaataataaatatgaagaaagttctttctggcttagccaaagctatgatattgggaagatggataagaaatctactgggccagaaatgctggctaaagttctacggctattagccacgaattatttggattgggatgacaccaaatattatgataaggctctcaatgctgtaaacctagcaaacaaggaacatttaagttctcctgggcttttcttaaaaatgaaaatcctcttgaaaggcgaaacatctaatgaagaactccttgaagctgtcatggaaatactacatcttgacatgcccttagacttctgtctgaacattgctaaactgctgatggatcatgaaagagaatctgttgggtttcatttcctgacgattattcatgaacgttttaagtcatcggaaaatattggaaaagttctgatactccatactgacatgcttttacaaaggaaggaagaacttcttgccaaggagaagattgaagaaatctttttagctcaccaaacaggaagacaactgacagcagaatcaatgaactggttacacaacattctgtggagacaagctgccagtagttttgaggtacaaaattacactgatgccctacaatggtactattattctctgaggttttattcaactgatgaaatggatctggacttcaccaagctgcagaggaacatggcttgctgttacctgaatttgcaacaacttgataaggccaaagaggcagtggcagaagctgaacgacatgaccctaggaacgttttcactcaattttatatattcaagattgcagtcatagagggcaactctgaaagagctttgcaggcaataattactttagagaatatattaacagatgaagagtcagaagataatgatctagttgcagagagaggttcacctaccatgcttctaagtttagctgcccagtttgctctagagaatggacaacaaattgtggcagaaaaagctttggaatatttagctcaacattcagaagaccaggaacaagttcttacagctgtaaagtgtttgcttcgttttcttcttccaaaaattgctgaaatgccggaatctgaagataagaagaaagaaatggatcgacttttgacttgcctgaatagagcctttgtgaaactttctcagccttttggtgaagaagccttaagtttggagtcaagagctaatgaagctcagtggtttcgaaaaacagcttggaacttggctgtgcaatgtgacaaagatccagtgatgatgagagagttttttatactttcttataagatgtcccagttttgtccttctgatcaagtaattctgattgcacggaaaacatgtttacttatggcagttgcagttgatctagagcaagggagaaaagcttcaacagcttttgaacagaccatgttcctgagtcgtgcacttgaggagatccagacatgcaatgacatccataatttcctgaaacaaacagggaccttctcaaatgattcatgtgagaaattgcttctgctgtacgagtttgaagttagagccaaattgaatgatccattactggaaagcttcctggaatcagtgtgggagttgcctcatttagaaactaaaacttttgaaacaattgcaataatagcaatggaaaagcctgcacactatcctttgattgctctcaaggccttgaaaaaggctttattgctctacaaaaaggaagaaccaattgatatatcacaatacagcaaatgtatgcacaacttggttaacctctcagtgccagatggggcgtcgaatgtagagctctgtcccctggaagaagtttggggctattttgaagatgctctgagccacattagccgcactaaagactacccagaaatggagattctctggctgatggtcaagtcctggaataccggagtacttatgtttagcaggagcaagtatgcatctgctgaaaagtggtgtggcctggccttgcgtttccttaaccaccttacctccttcaaggaaagctatgaaactcagatgaatatgctgtatagtcagcttgtggaagcattgagtaacaacaagggcccagtttttcatgaacatggctactggagcaagtcagattaggcaagctcatggccacatgaagaagatacattgtcccgagatgctgactgtttaaatttttgccagagtttctcttgagcttttgtttctgtttgctcagaccctgttttcatgttgttgaataaactttctaaaataaaagcatgctgaattta

SEQ ID NO: 31337 - DNA, 3133 bp, Homo sapiens
  source 1..3133: mol_type = unassigned DNA
gtgcgctgtggacggaggttgtggagagagcagggcggcattggtggctgcggctgaggcttgagccagagatttaaaaatggacaatgatgattttttttccatggactttaaagatggagtctgtctctgttgtccaggctggagtgcagtggcatgatctcggctcactgcaacctccgcctcctgtgttcaagcgattcttctgcctcagcctcccaagtagctgggactacagaagttgttgaaaacctggttacaaatgataattcacctaacataccagaggcaattgatagactcttcagcgacatagcaaatatcaacagggagtctatggctgaaataacagacattcagattgaagaaatggcagtaaacctatggaactgggcacttaccataggaggaggttggcttgtaaatgaagagcagaaaattagattacattatgttgcttgcaagttgctgagtatgtgtgaagcctcatttgcctcagaacaaagtattcaacgactgattatgatgaatatgagaataggaaaagaatggttggatgctggaaattttctaatcgctgatgaatgttttcaagctgctgtggccagtctggagcaattatacgtcaaattaattcaaaggagctcccctgaggctgacttgaccatggagaagattactgttgagagtgaccacttcagagtgctttcttaccaagcagagtcagcagttgctcaaggggattttcaaagagcatctatgtgtgtactgcaatgtaaagatatgttgatgaggctcccccagatgacttcaagtcttcatcatctctgttacaactttggagtagaaacccagaagaataataaatatgaagaaagttctttctggcttagccaaagctatgatattgggaagatggataagaaatctactgggccagaaatgctggctaaagttctacggctattagccacgaattatttggattgggatgacaccaaatattatgataaggctctcaatgctgtaaacctagcaaacaaggaacatttaagttctcctgggcttttcttaaaaatgaaaatcctcttgaaaggcgaaacatctaatgaagaactccttgaagctgtcatggaaatactacatcttgacatgcccttagacttctgtctgaacattgctaaactgctgatggatcatgaaagagaatctgttgggtttcatttcctgacgattattcatgaacgttttaagtcatcggaaaatattggaaaagttctgatactccatactgacatgcttttacaaaggaaggaagaacttcttgccaaggagaagattgaagaaatctttttagctcaccaaacaggaagacaactgacagcagaatcaatgaactggttacacaacattctgtggagacaagctgccagtagttttgaggtacaaaattacactgatgccctacaatggtactattattctctgaggttttattcaactgatgaaatggatctggacttcaccaagctgcagaggaacatggcttgctgttacctgaatttgcaacaacttgataaggccaaagaggcagtggcagaagctgaacgacatgaccctaggaacgttttcactcaattttatatattcaagattgcagtcatagagggcaactctgaaagagctttgcaggcaataattactttagagaatatattaacagatgaagagtcagaagataatgatctagttgcagagagaggttcacctaccatgcttctaagtttagctgcccagtttgctctagagaatggacaacaaattgtggcagaaaaagctttggaatatttagctcaacattcagaagaccaggaacaagttcttacagctgtaaagtgtttgcttcgttttcttcttccaaaaattgctgaaatgccggaatctgaagataagaagaaagaaatggatcgacttttgacttgcctgaatagagcctttgtgaaactttctcagccttttggtgaagaagccttaagtttggagtcaagagctaatgaagctcagtggtttcgaaaaacagcttggaacttggctgtgcaatgtgacaaagatccagtgatgatgagagagttttttatactttcttataagatgtcccagttttgtccttctgatcaagtaattctgattgcacggaaaacatgtttacttatggcagttgcagttgatctagagcaagggagaaaagcttcaacagcttttgaacagaccatgttcctgagtcgtgcacttgaggagatccagacatgcaatgacatccataatttcctgaaacaaacagggaccttctcaaatgattcatgtgagaaattgcttctgctgtacgagtttgaagttagagccaaattgaatgatccattactggaaagcttcctggaatcagtgtgggagttgcctcatttagaaactaaaacttttgaaacaattgcaataatagcaatggaaaagcctgcacactatcctttgattgctctcaaggccttgaaaaaggctttattgctctacaaaaaggaagaaccaattgatatatcacaatacagcaaatgtatgcacaacttggttaacctctcagtgccagatggggcgtcgaatgtagagctctgtcccctggaagaagtttggggctattttgaagatgctctgagccacattagccgcactaaagactacccagaaatggagattctctggctgatggtcaagtcctggaataccggagtacttatgtttagcaggagcaagtatgcatctgctgaaaagtggtgtggcctggccttgcgtttccttaaccaccttacctccttcaaggaaagctatgaaactcagatgaatatgctgtatagtcagcttgtggaagcattgagtaacaacaagggcccagtttttcatgaacatggctactggagcaagtcagattaggcaagctcatggccacatgaagaagatacattgtcccgagatgctgactgtttaaatttttgccagagtttctcttgagcttttgtttctgtttgctcagaccctgttttcatgttgttgaataaactttctaaaataaaagcatgctgaattt

SEQ ID NO: 31338 - DNA, 1147 bp, Homo sapiens
  source 1..1147: mol_type = unassigned DNA
actccctcgcgttcgctgacgaggaaggtccccataccgcgaagtacattggccttggggtggggctggagggatgggcgcctgtgagaatgtgacggactgtgacacaaggaaggctggtgccttcggaatatgatggcaaatcaccttgtaaagcctgataatagaaattgcaagaggccaagagaattggagtctccagtgccagatagtccacagctgtcctctcttggaaaatcagattcatctttctctgaaatttccggactattttataaagatgaagccttggagaaagatttaaatgatgtgagcaaggaaattaatctaatgttgtctacctatgcaaagcttttaagtgagagagcagcagtagatgcatcttacattgatgagatagatgaactcttcaaagaagccaatgctattgaaaactttctaatacaaaaaagagagttcctgcgacagaggtttacagtgattgcaaacacattacacagataaaatatatacttgaaataagctgagaatttaaacctattattgttataatgaaagaatgacatttatgctttgaaagctctcgagttgttaaagaaaatgtatatctcgaatagagaaggggaaactccttgaatttctaggtttaaaaaggaacttttaaattccttaatgttaatattaatgttcatgttaatgtcctaagctggccattaacatgaactacgtcacttttcttttgagggtcaaatatttagtgcattttatagaagtgtaaattatttaaatcttatgtggattcttttattttttccttaaacttcttagtgtttctgaaacttctaaaaaaggattcagttaatttataatgtttaataatattatacttttagaatattttgtttaaatatcagatagttttggagataattttgaaattttttttatggtcaggattataaaagaagattaaaaccttagaggtgatttttccagtttcttagaatataatgacataactgtgtgctatttccatttgattattttcactattagttattatgtatgactaataaaagctctcggcttaaaattattttcttgtggtaaaagtagtaaaataaaaaccagaaattactcaccagaa

SEQ ID NO: 31339 - DNA, 787 bp, Homo sapiens
  source 1..787: mol_type = unassigned DNA
actccctcgcgttcgctgacgaggaaggtccccataccgcgaactttgtagctggtgccttcggaatatgatggcaaatcaccttgtaaagcctgataatagaaattgcaagaggccaagagaattggagtctccagtgccagatagtccacagctgtcctctcttggaaaatcagattcatctttctctgaaatttccggactattttataaagatgaagccttggagaaagatttaaatgatgtgagcaaggaaattaatctaatgttgtctacctatgcaaagcttttaagtgagagagcagcagtagatgcatcttacattgatgagatagatgaactcttcaaagaagccaatgctattgaaaactttctaatacaaaaaagagagttcctgcgacagaggtttacagtgattgcaaacacattacacagataaaatatatacttgaaataagctgagaatttaaacctattattgttataatgaaagaatgacatttatgctttgaaagctctcgagttgttaaagaaaatgtatatctcgaatagagaaggggaaactccttgaatttctaggtttaaaaaggaacttttaaattccttaatgttaatattaatgttcatgttaatgtcctaagctggccattaacatgaactacgtcacttttcttttgagggtcaaatatttagtgcattttatagaagtgtaaattatttaaatcttatgtggattcttttattttttccttaaacttcttagtgtttctgaaacttctaaaaaagg

SEQ ID NO: 31340 - DNA, 1351 bp, Homo sapiens
  source 1..1351: mol_type = unassigned DNA
gggagagagatcttcctctctcttcgggcgtgttaagacagcggggttggcctgtacttcctctggccctggctgaagaggcgatcatggccttgagacctgaggaccccagtagcgggttccggcatagcaacgtggtggccttcatcaacgagaaaatggccaggcacacgaaaggccccgagttctatcttgagaatatatccttatcctgggagaaggtggaagacaagctgagggccatactggaggacagcgaggtgcccagtgaggtcaaagaggcctgcacctggggcagcctggccttgggagtgcgctttgcccacaggcaggcacagctacaaaggcacagggtgcggtggctgcacggcttcgccaaactgcacaaatcagccgcacaggccttggcatcagacctgaagaagctcagggagcagcaggagacggaacgcaaggaggcggcctcccggctaagaatggcccagaccagcctcgtggaggtgcagaaagagagagacaaggagctggtgtctccccatgagtgggagcagggggcagggtggccaggcctggccactgccggaggggtttgcacagaaggagcagctgaggaggaagaagaggcggcggtggctgctgctggtgctgctggaggaaaaggagcagaagaagagcagaggggatgttggaggttgtggctgcccctgtggaggccatggctccccctgtggaggctggggctgcccccatggagacccagttcccccacgtggaggccagggctgcctccatggagaccacagagaagctggagagaatcctcctgcagctccttggagatgctgatcaggaaaagtacacctattgggggcagaaggagggagatctccggtcggtcgaaacagccacatcttatttctctggaaccacgaacccctggtccagagcctcatcagaacctcttcctgtccagctccctgcctcatactcatactcatactcaagccctttttcctccttctcagacatacccactatatcccctccacaagcaacagtcacagcaccagttccgcctcagctgccttccgactgggaggcctttgatactagcctgtggtctgatggggggccccacagaatagaccatcaggagcacccaagagacaggagatactccgaacctcatcagcaaagacctccagtatatcgcaggccaggggactgggactgcccttggtgtaacgctgtgaatttttcacggagggatacttgcttcgactgtgggaagggaatctggctgcaaaaacctcattgagtgcagaaatgcaaaatagaaccgaagcatgta

SEQ ID NO: 31341 - DNA, 1379 bp, Homo sapiens
  source 1..1379: mol_type = unassigned DNA
gggagagagatcttcctctctcttcgggcgtgttaagacagcggggttggcctgtacttcctctggccctggctgaagagggctagtgaaaccgttaaacccctaggcgatcatggccttgagacctgaggaccccagtagcgggttccggcatagcaacgtggtggccttcatcaacgagaaaatggccaggcacacgaaaggccccgagttctatcttgagaatatatccttatcctgggagaaggtggaagacaagctgagggccatactggaggacagcgaggtgcccagtgaggtcaaagaggcctgcacctggggcagcctggccttgggagtgcgctttgcccacaggcaggcacagctacaaaggcacagggtgcggtggctgcacggcttcgccaaactgcacaaatcagccgcacaggccttggcatcagacctgaagaagctcagggagcagcaggagacggaacgcaaggaggcggcctcccggctaagaatggcccagaccagcctcgtggaggtgcagaaagagagagacaaggagctggtgtctccccatgagtgggagcagggggcagggtggccaggcctggccactgccggaggggtttgcacagaaggagcagctgaggaggaagaagaggcggcggtggctgctgctggtgctgctggaggaaaaggagcagaagaagagcagaggggatgttggaggttgtggctgcccctgtggaggccatggctccccctgtggaggctggggctgcccccatggagacccagttcccccacgtggaggccagggctgcctccatggagaccacagagaagctggagagaatcctcctgcagctccttggagatgctgatcaggaaaagtacacctattgggggcagaaggagggagatctccggtcggtcgaaacagccacatcttatttctctggaaccacgaacccctggtccagagcctcatcagaacctcttcctgtccagctccctgcctcatactcatactcatactcaagccctttttcctccttctcagacatacccactatatcccctccacaagcaacagtcacagcaccagttccgcctcagctgccttccgactgggaggcctttgatactagcctgtggtctgatggggggccccacagaatagaccatcaggagcacccaagagacaggagatactccgaacctcatcagcaaagacctccagtatatcgcaggccaggggactgggactgcccttggtgtaacgctgtgaatttttcacggagggatacttgcttcgactgtgggaagggaatctggctgcaaaaacctcattgagtgcagaaatgcaaaatagaaccgaagcatgtata

SEQ ID NO: 31342 - DNA, 1374 bp, Homo sapiens
  source 1..1374: mol_type = unassigned DNA
gggagagagatcttcctctctcttcgggcgtgttaagacagcggggttggcctgtacttcctctggccctggctgaagagggctagtgaaaccgttaaacccctaggcgatcatggccttgagacctgaggaccccagtagcgggttccggcatagcaacgtggtggccttcatcaacgagaaaatggccaggcacacgaaaggccccgagttctatcttgagaatatatccttatcctgggagaaggtggaagacaagctgagggccatactggaggacagcgaggtgcccagtgaggtcaaagaggcctgcacctggggcagcctggccttgggagtgcgctttgcccacaggcaggcacagctacaaaggcacagggtgcggtggctgcacggcttcgccaaactgcacaaatcagccgcacaggccttggcatcagacctgaagaagctcagggagcagcaggagacggaacgcaaggaggcggcctcccggctaagaatggcccagaccagcctcgtggaggtgcagaaagagagagacaaggagctggtgtctccccatgagtgggagcagggggcagggtggccaggcctggccactgccggaggggtttgcacagaaggagcagctgaggaggaagaagaggcggcggtggctgctgctggtgctgctggaggaaaaggagcagaagaagagcagagggatgttgaggttgtggctgcccctgtggaggccatggctccccctgtggaggctggggctgcccccatggagacccagttcccccacgtggaggccagggctgcctccatggagaccacagagaagctggagagaatcctcctgcagctccttggagatgctgatcaggaaaagtacacctattgggggcagaaggagggagatctccggtcggtcgaaacagccacatcttatttctctggaaccacgaacccctggtccagagcctcatcagaacctcttcctgtccagctccctgcctcatactcatactcatactcaagccctttttcctccttctcagacatacccactatatcccctccacaagcaacagtcacagcaccagttccgcctcagctgccttccgactgggaggcctttgatactagcctgtggtctgatggggggccccacagaatagaccatcaggagcacccaagagacaggagatactccgaacctcatcagcaaagacctccagtatatcgcaggccaggggactgggactgcccttggtgtaacgctgtgaatttttcacggagggatacttgcttcgactgtgggaagggaatctggctgcaaaaacctcattgagtgcagaaatgcaaaatagaaccgaagcatgt

SEQ ID NO: 31343 - DNA, 1248 bp, Homo sapiens
  source 1..1248: mol_type = unassigned DNA
tctcttcaggcgtgttaagcagcggggttggcctgtacttcctctggccctggctgaagagggctagtgaaaccgttaagcccctaggcgatcatggccttgagacctgaggaccccagtagtgggttccggcacggaaacgtggtggccttcatcatcgagaaaatggccaggcacacgaaaggccccgagttctacttcgagaatatatccttatcctgggaggaggtggaagacaagctcagggccatcctggaggacagcgaggtgcccagcgaggtcaaagaggcctgcacctggggcagcctggccttgggtgtgcgctttgcccacaggcaggggcagttacaaaaccgcagggtgcagtggctgcaaggctttgccaaactgcacagatcagctgcgctggtcttggcctcaaacctgacggaactcaaggaacagcaggagatggaatgcaatgaggcgaccttccagttgcagctaaccgagaccagccttgcggaggtgcagagagagcgggacatgctgagatggaagctcttccatgccgagctggcacctccccagggacagggccaggctacagtgtttccaggcctggccactgccggaggggattggacagaaggagcaggtgagcaggaaaaggaggcggtggctgctgctggtgctgctggaggaaaaggagaggagaggtatgcagaggcagggcctgcccccgcagaggtcttgcaggggctgggaggaggcttcaggcagcccctcggagctattgtagcaggcaaattacacctttgcggggcagagggagaaagatctcaggtcagtacaaacagccatgtctgtcttctctgggcttgggtccacagtctcactggagcctcttcctgtccagctccctacctcattcacatactcatacccatgccctttgtccgccttctcagccatacccaatatacccccttcaccagcaaaggtcacagaacgggttccaactcagatgcctttcaactggggggcctctgatgctagcctgtggtcagatgtggaggcccagggaatagaccctcaagagcccccaagagacaggagagactccgaactccatcagcagagaagacctccagtatatcgcaggccagggaactgggactgcccgtggtgtaaagctgtgaatttttcatggagggaaaattgcttcctctgtgggaggcgaatctggctgcaaaagcctcagtaaat

SEQ ID NO: 31344 - DNA, 4942 bp, Homo sapiens
  source 1..4942: mol_type = unassigned DNA
atcagtccgcattccccgcacccacccacgtcttcccgggagtcgtatcccgagcatggaggttactgagaccgttatttcttcatggcctgcctagcttaagcagtagctggaaaagatgtctcgggctgttcgtcttccagtcccctgtcctgttcaacttggtaccttaagaaatgactccctggaagctcagcttcatgagtatgtcaaacaagggaactatgtgaaagtgaagaaaattcttaagaaaggaatttatgttgatgcagttaactccttgggccaaacagcactttttgttgcggcgttattgggccttaggaaattcgttgatgttctggtggattatggatcagatccaaatcaccgctgctttgatgggagcacccctgtccatgcagcagcattttcgggcaatcagtggatccttagcaaactgctggatgcaggaggtgacctgcgactccacgatgagaggggtcaaaacccgaagacttgggctttgacagcaggaaaggagcgtagcacccagatagtggagttcatgcagcgctgtgcctcacacatgcaggccatcatccagggcttctcttacgacctcctgaagaagatagactccccgcagcggcttgtctacagcccgtcctggtgtgggggcctcgtgcagggaaaccctaatggctctcctaaccgactgcttaaagctggagtcatttctgctcaaaatatctacagctttggttttgggaaggctatgccttggtttcagttttatcttactggggcgacacagatggcctatctaggatctcttccggtcattggagaaaaggaagtgattcaagctgatgatgagcccaccttctctttcttcagcggcccctacatggtcatgaccaacctagtgtggaatgggagcagggtcacagtgaaagagctgaatctccccacccacccacactgcagcaggctgcggctggccgacttgttaattgccgagcaggaacacagcagcaagctgcggcacccctacttgctacagttgatggctgtgtgtctctcccaggacctagagaaaacccgccttgtgtacgagcgcatcactatcggcacattgttcagtgtccttcatgaacgacggtcccagttcccagtgctgcacatggaggtgattgtgcacctgctgctccagatatctgatgccctgagatacctgcatttccaggggtttatccaccgctccctcagctcctatgctgtccatatcatctccccaggtgaagcgaggctgaccaacctggagtacatgttggaaagcgaggacagaggtgtacagagggacctgactcgagtgccccttcctacgcagctatacaactgggccgcaccagaagtgatcttacagaaggcagccacagtgaaatcagacatctacagcttttctatgatcatgcaggagattttaacagatgacataccctggaagggcttagatggctcagttgttaaaaaagccgtagtctcggggaattatttagaagctgatgtcaggcttccgaaaccttactatgatattgttaagtcaggcatccacgtcaagcagaaagaccgaactatgaaccttcaagatatccggtatattctgaagaatgacttaaaggattttactggagcccagagaactcaaccaaccgagagccccagagtgcagagatacggactccatcccgatgtcaatgtctatctaggactgacttcagaacaccccagagagacacctgacatggaaatcatagaactaaaggaaatgggcagtcaacctcattcaccaagggttcactctttattcactgaggggacactagatcctcaggccccagatccatgtctgatggccagggagactcagaatcaagatgctccttgccctgctccatttatggcagaagaggccagcagccccagcacaggtcagccaagcctctgcagtttcgaaatcaacgagatctactcaggctgcttgattttggaagatgacatagaagagcctccaggagctgcttcatctttggaggcagacggacctaaccaggtagatgaactgaaatccatggaagaagagctggataagatggagagagaggcgtgttgttttggcagtgaggatgagagctcttcaaaagctgagacagagtactcttttgatgactgggactggcaaaacggttcactcagttcactcagccttcctgagtcaaccagagaagccaagagcaatttgaacaacatgtccacgactgaggagtatctcatcagtaagtgtgtgctggatctaaagattatgcagacaataatgcacgagaatgatgataggctgaggaatatcgagcagatattagatgaagtcgagatgaaacagaaggaacaggaagagcgcatgtctttatgggccacttcaagagagtttacaaatgcctacaagttacctctggccgtgggccctccatctttaaactatattcctcctgtcctacagctttcagggggtcagaagccagacaccagtggcaactacccaaccctaccaagatttccaagaatgctgccgactctttgtgaccctggaaaacagaacacagatgaacaatttcagtgcactcaaggagccaaggacagtttggaaacaagcaggatccaaaataccagtagccagggaagacctagagagtccactgcccaagccaaagccacacagtttaatagtgcactcttcactctgtcaagccaccggcagggaccttctgcatcacccagctgtcactgggactctaccaggatgagtgtggaacctgtttcttctgaaatctataatgcagagtccagaaataaagatgatggaaaggtacacttaaaatggaaaatggaggtgaaagaaatggcaaagaaagcagctactggacagctcacagtacctccttggcatcctcagagtagtctgactttagagagcgaggctgaaaatgagcccgacgccctgctgcagccccccattaggagcccagaaaacacggattggcagcgagttattgagtatcatagggaaaatgatgagcccagaggaaatggcaagtttgacaagacgggcaacaatgactgtgacagtgaccagcatggcagacagcccaggcttggaagcttcaccagtatcaggcacccatctcccagacaaaaggagcaaccagagcatagtgaagccttccaagcaagttctgacacattggtggctgtagagaaatcttacagtcatcagtccatgcaatcaacttgttcaccagagtcttctgaggatataacagatgaatttttaactccagacggtgaatatttttactcctcgactgctcaagaaaacttagctctagagacctcgagtcccatagaagaggactttgaaggaatacaaggtgcatttgcccaacctcaagtctctggtgaggaaaagttccaaatgagaaaaattcttggaaagaatgctgagattttgcccaggtctcaatttcaacctgtacgaagtactgaagatgaacaagaagagacatcaaaggagtcaccaaaggaactgaaagagaaagacatatcattgacggatattcaagacctgtctagtatctcctatgaaccagacagctcttttaaggaagcttcatgcaaaacacccaaaataaaccatgcacctaccagtgtcagcactccactcagcccagggtccgtttcttcagctgccagtcagtataaagactgccttgaaagtatcacatttcaggttaagacagagtttgcctcttgctggaacagtcaagaatttattcaaactttgtctgatgactttataagtgtccgagagagagcaaagaaactggattctctccttacttcctctgaaactcccccttcaagactgactggtcttaaaagattgtcttcatttattggggctggatcccccagccttgttaaggcatgtgactcatcaccaccccatgccacccagagaaggagcctgcctaaagtagaagccttctcacagcatcacattgatgagctgccaccaccatctcaggagctacttgatgacattgagctcttgaaacagcagcagggctcatccacggtgttgcatgagaacacagcaagtgatggaggaggcactgcaaatgatcaaaggcacttagaagaacaagaaactgacagtaaaaaagaagatagtagtatgcttttgtccaaagaaactgaagatcttggagaggacacagagagagctcactctactctggatgaggacctggaaagatggctgcagccacctgaggagagcgtggagctacaagaccttcccaagggctctgaaagggagacaaatatcaaagatcaaaaagttggtgaagagaaaagaaaaagggaagatagcattacaccagaaagaaggaaatcagagggtgttctagggacttctgaagaagatgaactaaaatcctgtttttggaagcgactaggttggtccgaatcatccaggataatcgtgctggatcagagtgacttgtcagactgattggaattggatcatagacggactcctggcctgagtttgagtgtcctggttgtaagctcctttcttctctttctgcttcagttgctgtcagggcagcagttccagttctgtaagtctcactttgttcagctgccacaatagacatcatcgtttggccctctctgttagcagcacattcaaccatttgttttcagtcagatttctgaaaagtgagaggtagttttgatagtaaaaatttttggttgtgcctagaatggctttggttttgttgatgttaattttcaaaaactttaactcttgttatataataaaatgtttaattttaataac

SEQ ID NO: 31345 - DNA, 4804 bp, Homo sapiens
  source 1..4804: mol_type = unassigned DNA
atcagtccgcattccccgcacccacccacgtcttcccgggagtcgtatcccgagcatggaggttactgagaccgttatttcttcatggcctgcctagcttaagcagtagctggaaaagatgtctcgggctgttcgtcttccagtcccctgtcctgttcaacttggtaccttaagaaatgactccctggaagctcagcttcatgagtatgtcaaacaagggaactatgtgaaagtgaagaaaattcttaagaaaggaatttatgttgatgcagttaactccttgggccaaacagcactttttgttgcggcgttattgggccttaggaaattcgttgatgttctggtggattatggatcagatccaaatcaccgctgctttgatgggagcacccctgtccatgcagcagcattttcgggcaatcagtggatccttagcaaactgctggatgcaggaggtgacctgcgactccacgatgagaggggtcaaaacccgaagacttgggctttgacagcaggaaaggagcgtagcacccagatagtggagttcatgcagcgctgtgcctcacacatgcaggccatcatccagggcttctcttacgacctcctgaagaagatagactccccgcagcggcttgtctacagcccgtcctggtgtgggggcctcgtgcagggaaaccctaatggctctcctaaccgactgcttaaagctggagtcatttctgctcaaaatatctacagctttggttttgggaagttttatcttactggggcgacacagatggcctatctaggatctcttccggtcattggagaaaaggaagtgattcaagctgatgatgagcccaccttctctttcttcagcggcccctacatggtcatgaccaacctagtgtggaatgggagcagggtcacagtgaaagagctgaatctccccacccacccacactgcagcaggctgcggctggccgacttgttaattgccgagcaggaacacagcagcaagctgcggcacccctacttgctacagttgatggctgtgtgtctctcccaggacctagagaaaacccgccttgtgtacgagcgcatcactatcggcacattgttcagtgtccttcatgaacgacggtcccagttcccagtgctgcacatggaggtgattgtgcacctgctgctccagatatctgatgccctgagatacctgcatttccaggggtttatccaccgctccctcagctcctatgctgtccatatcatctccccaggtgaagcgaggctgaccaacctggagtacatgttggaaagcgaggacagaggtgtacagagggacctgactcgagtgccccttcctacgcagctatacaactgggccgcaccagaagtgatcttacagaaggcagccacagtgaaatcagacatctacagcttttctatgatcatgcaggagattttaacagatgacataccctggaagggcttagatggctcagttgttaaaaaagccgtagtctcggggaattatttagaagctgatgtcaggcttccgaaaccttactatgatattgttaagtcaggcatccacgtcaagcagaaagaccgaactatgaaccttcaagatatccggtatattctgaagaatgacttaaaggattttactggagcccagagaactcaaccaaccgagagccccagagtgcagagatacggactccatcccgatgtcaatgtctatctaggactgacttcagaacaccccagagagacacctgacatggaaatcatagaactaaaggaaatgggcagtcaacctcattcaccaagggttcactctttattcactgaggggacactagatcctcaggccccagatccatgtctgatggccagggagactcagaatcaagatgctccttgccctgctccatttatggcagaagaggccagcagccccagcacaggtcagccaagcctctgcagtttcgaaatcaacgagatctactcaggctgcttgattttggaagatgacatagaagagcctccaggagctgcttcatctttggaggcagacggacctaaccaggtagatgaactgaaatccatggaagaagagctggataagatggagagagaggcgtgttgttttggcagtgaggatgagagctcttcaaaagctgagacagagtactcttttgatgactgggactggcaaaacggttcactcagttcactcagccttcctgagtcaaccagagaagccaagagcaatttgaacaacatgtccacgactgaggagtatctcatcagtaagtgtgtgctggatctaaagattatgcagacaataatgcacgagaatgatgataggctgaggaatatcgagcagatattagatgaagtcgagatgaaacagaaggaacaggaagagcgcatgtctttatgggccacttcaagagagtttacaaatgcctacaagttacctctggccgtgggccctccatctttaaactatattcctcctgtcctacagctttcagggggtcagaagccagacaccagtggcaactacccaaccctaccaagatttccaagaatgctgccgactctttgtgaccctggaaaacagaacacagatgaacaatttcagtgcactcaaggagccaaggacagtttggaaacaagcaggatccaaaataccagtagccagggaagacctagagagtccactgcccaagccaaagccacacagtttaatagtgcactcttcactctgtcaagccaccggcagggaccttctgcatcacccagctgtcactgggactctaccaggatgagtgtggaacctgtttcttctgaaatctataatgcagagtccagaaataaagatgatggaaaggtacacttaaaatggaaaatggaggtgaaagaaatggcaaagaaagcagctactggacagctcacagtacctccttggcatcctcagagtagtctgactttagagagcgaggctgaaaatgagcccgacgccctgctgcagccccccattaggagcccagaaaacacggattggcagcgagttattgagtatcatagggaaaatgatgagcccagaggaaatggcaagtttgacaagacgggcaacaatgactgtgacagtgaccagcatggcagacagcccaggcttggaagcttcaccagtatcaggcacccatctcccagacaaaaggagcaaccagagcatagtgaagccttccaagcaagttctgacacattggtggctgtagagaaatcttacagtacctcgagtcccatagaagaggactttgaaggaatacaaggtgcatttgcccaacctcaagtctctggtgaggaaaagttccaaatgagaaaaattcttggaaagaatgctgagattttgcccaggtctcaatttcaacctgtacgaagtactgaagatgaacaagaagagacatcaaaggagtcaccaaaggaactgaaagagaaagacatatcattgacggatattcaagacctgtctagtatctcctatgaaccagacagctcttttaaggaagcttcatgcaaaacacccaaaataaaccatgcacctaccagtgtcagcactccactcagcccagggtccgtttcttcagctgccagtcagtataaagactgccttgaaagtatcacatttcaggttaagacagagtttgcctcttgctggaacagtcaagaatttattcaaactttgtctgatgactttataagtgtccgagagagagcaaagaaactggattctctccttacttcctctgaaactcccccttcaagactgactggtcttaaaagattgtcttcatttattggggctggatcccccagccttgttaaggcatgtgactcatcaccaccccatgccacccagagaaggagcctgcctaaagtagaagccttctcacagcatcacattgatgagctgccaccaccatctcaggagctacttgatgacattgagctcttgaaacagcagcagggctcatccacggtgttgcatgagaacacagcaagtgatggaggaggcactgcaaatgatcaaaggcacttagaagaacaagaaactgacagtaaaaaagaagatagtagtatgcttttgtccaaagaaactgaagatcttggagaggacacagagagagctcactctactctggatgaggacctggaaagatggctgcagccacctgaggagagcgtggagctacaagaccttcccaagggctctgaaagggagacaaatatcaaagatcaaaaagttggtgaagagaaaagaaaaagggaagatagcattacaccagaaagaaggaaatcagagggtgttctagggacttctgaagaagatgaactaaaatcctgtttttggaagcgactaggttggtccgaatcatccaggataatcgtgctggatcagagtgacttgtcagactgattggaattggatcatagacggactcctggcctgagtttgagtgtcctggttgtaagctcctttcttctctttctgcttcagttgctgtcagggcagcagttccagttctgtaagtctcactttgttcagctgccacaatagacatcatcgtttggccctctctgttagcagcacattcaaccatttgttttcagtcagatttctgaaaagtgagaggtagttttgatagtaaaaatttttggttgtgcctagaatggctttggttttgttgatgttaattttcaaaaactttaactcttgttatataataaaatgtttaattttaataac

SEQ ID NO: 31346 - DNA, 4924 bp, Homo sapiens
  source 1..4924: mol_type = unassigned DNA
atcagtccgcattccccgcacccacccacgtcttcccgggagtcgtatcccgagcatggaggttactgagaccgttatttcttcatggcctgcctagcttaagcagtagctggaaaagatgtctcgggctgttcgtcttccagtcccctgtcctgttcaacttggtaccttaagaaatgactccctggaagctcagcttcatgagtatgtcaaacaagggaactatgtgaaagtgaagaaaattcttaagaaaggaatttatgttgatgcagttaactccttgggccaaacagcactttttgttgcggcgttattgggccttaggaaattcgttgatgttctggtggattatggatcagatccaaatcaccgctgctttgatgggagcacccctgtccatgcagcagcattttcgggcaatcagtggatccttagcaaactgctggatgcaggaggtgacctgcgactccacgatgagaggggtcaaaacccgaagacttgggctttgacagcaggaaaggagcgtagcacccagatagtggagttcatgcagcgctgtgcctcacacatgcaggccatcatccagggcttctcttacgacctcctgaagaagatagactccccgcagcggcttgtctacagcccgtcctggtgtgggggcctcgtgcagggaaaccctaatggctctcctaaccgactgcttaaagctggagtcatttctgctcaaaatatctacagctttggttttgggaagttttatcttactggggcgacacagatggcctatctaggatctcttccggtcattggagaaaaggaagtgattcaagctgatgatgagcccaccttctctttcttcagcggcccctacatggtcatgaccaacctagtgtggaatgggagcagggtcacagtgaaagagctgaatctccccacccacccacactgcagcaggctgcggctggccgacttgttaattgccgagcaggaacacagcagcaagctgcggcacccctacttgctacagttgatggctgtgtgtctctcccaggacctagagaaaacccgccttgtgtacgagcgcatcactatcggcacattgttcagtgtccttcatgaacgacggtcccagttcccagtgctgcacatggaggtgattgtgcacctgctgctccagatatctgatgccctgagatacctgcatttccaggggtttatccaccgctccctcagctcctatgctgtccatatcatctccccaggtgaagcgaggctgaccaacctggagtacatgttggaaagcgaggacagaggtgtacagagggacctgactcgagtgccccttcctacgcagctatacaactgggccgcaccagaagtgatcttacagaaggcagccacagtgaaatcagacatctacagcttttctatgatcatgcaggagattttaacagatgacataccctggaagggcttagatggctcagttgttaaaaaagccgtagtctcggggaattatttagaagctgatgtcaggcttccgaaaccttactatgatattgttaagtcaggcatccacgtcaagcagaaagaccgaactatgaaccttcaagatatccggtatattctgaagaatgacttaaaggattttactggagcccagagaactcaaccaaccgagagccccagagtgcagagatacggactccatcccgatgtcaatgtctatctaggactgacttcagaacaccccagagagacacctgacatggaaatcatagaactaaaggaaatgggcagtcaacctcattcaccaagggttcactctttattcactgaggggacactagatcctcaggccccagatccatgtctgatggccagggagactcagaatcaagatgctccttgccctgctccatttatggcagaagaggccagcagccccagcacaggtcagccaagcctctgcagtttcgaaatcaacgagatctactcaggctgcttgattttggaagatgacatagaagagcctccaggagctgcttcatctttggaggcagacggacctaaccaggtagatgaactgaaatccatggaagaagagctggataagatggagagagaggcgtgttgttttggcagtgaggatgagagctcttcaaaagctgagacagagtactcttttgatgactgggactggcaaaacggttcactcagttcactcagccttcctgagtcaaccagagaagccaagagcaatttgaacaacatgtccacgactgaggagtatctcatcagtaagtgtgtgctggatctaaagattatgcagacaataatgcacgagaatgatgataggctgaggaatatcgagcagatattagatgaagtcgagatgaaacagaaggaacaggaagagcgcatgtctttatgggccacttcaagagagtttacaaatgcctacaagttacctctggccgtgggccctccatctttaaactatattcctcctgtcctacagctttcagggggtcagaagccagacaccagtggcaactacccaaccctaccaagatttccaagaatgctgccgactctttgtgaccctggaaaacagaacacagatgaacaatttcagtgcactcaaggagccaaggacagtttggaaacaagcaggatccaaaataccagtagccagggaagacctagagagtccactgcccaagccaaagccacacagtttaatagtgcactcttcactctgtcaagccaccggcagggaccttctgcatcacccagctgtcactgggactctaccaggatgagtgtggaacctgtttcttctgaaatctataatgcagagtccagaaataaagatgatggaaaggtacacttaaaatggaaaatggaggtgaaagaaatggcaaagaaagcagctactggacagctcacagtacctccttggcatcctcagagtagtctgactttagagagcgaggctgaaaatgagcccgacgccctgctgcagccccccattaggagcccagaaaacacggattggcagcgagttattgagtatcatagggaaaatgatgagcccagaggaaatggcaagtttgacaagacgggcaacaatgactgtgacagtgaccagcatggcagacagcccaggcttggaagcttcaccagtatcaggcacccatctcccagacaaaaggagcaaccagagcatagtgaagccttccaagcaagttctgacacattggtggctgtagagaaatcttacagtcatcagtccatgcaatcaacttgttcaccagagtcttctgaggatataacagatgaatttttaactccagacggtgaatatttttactcctcgactgctcaagaaaacttagctctagagacctcgagtcccatagaagaggactttgaaggaatacaaggtgcatttgcccaacctcaagtctctggtgaggaaaagttccaaatgagaaaaattcttggaaagaatgctgagattttgcccaggtctcaatttcaacctgtacgaagtactgaagatgaacaagaagagacatcaaaggagtcaccaaaggaactgaaagagaaagacatatcattgacggatattcaagacctgtctagtatctcctatgaaccagacagctcttttaaggaagcttcatgcaaaacacccaaaataaaccatgcacctaccagtgtcagcactccactcagcccagggtccgtttcttcagctgccagtcagtataaagactgccttgaaagtatcacatttcaggttaagacagagtttgcctcttgctggaacagtcaagaatttattcaaactttgtctgatgactttataagtgtccgagagagagcaaagaaactggattctctccttacttcctctgaaactcccccttcaagactgactggtcttaaaagattgtcttcatttattggggctggatcccccagccttgttaaggcatgtgactcatcaccaccccatgccacccagagaaggagcctgcctaaagtagaagccttctcacagcatcacattgatgagctgccaccaccatctcaggagctacttgatgacattgagctcttgaaacagcagcagggctcatccacggtgttgcatgagaacacagcaagtgatggaggaggcactgcaaatgatcaaaggcacttagaagaacaagaaactgacagtaaaaaagaagatagtagtatgcttttgtccaaagaaactgaagatcttggagaggacacagagagagctcactctactctggatgaggacctggaaagatggctgcagccacctgaggagagcgtggagctacaagaccttcccaagggctctgaaagggagacaaatatcaaagatcaaaaagttggtgaagagaaaagaaaaagggaagatagcattacaccagaaagaaggaaatcagagggtgttctagggacttctgaagaagatgaactaaaatcctgtttttggaagcgactaggttggtccgaatcatccaggataatcgtgctggatcagagtgacttgtcagactgattggaattggatcatagacggactcctggcctgagtttgagtgtcctggttgtaagctcctttcttctctttctgcttcagttgctgtcagggcagcagttccagttctgtaagtctcactttgttcagctgccacaatagacatcatcgtttggccctctctgttagcagcacattcaaccatttgttttcagtcagatttctgaaaagtgagaggtagttttgatagtaaaaatttttggttgtgcctagaatggctttggttttgttgatgttaattttcaaaaactttaactcttgttatataataaaatgtttaattttaataac

SEQ ID NO: 31347 - DNA, 10187 bp, Homo sapiens
  source 1..10187: mol_type = unassigned DNA
ggacagacagagcacagtttagcagaaattagagacacttctcaagtacttgcacatgattcagacatttcacttatgcccagtgatgccaaagacagtgttaatggtgaccttttgttaaattggacaagtcttaaaaatattttaagtggtcttaatgcttcttttcctcttcacaacaatactggctcaagcacagtcactacttcaaaatccatcaaagacccaagactgatgaggagagaagaaagtatgggagaacagagtagtactgcaggcttaaatgaggttttgcaatttgagaagagttcagataatgttaattcagaaataaaatcgacaccatctaattctgcctcctcctcagaagttgtccctggtgattgtgctgttcttactaatggtttggataccccttgctttaaaacttctgttaatgattcacaatcttgggctcacaacatgggctctgaggactatgactgtatacctcccaataaagttaccatggcagggcaatgtaaggaccaaggtaatttttccttcccaatttctgtgtcaaatgtagtgtcagaggttgagaaccaaaaccacagtgaggagaaggctcagagagcccaacaggagtccggtaatgcttatacaaaagagtacagtagtcacatttttcaggactcgcagtcttctgatttaaaaacaatttatcagactggttgccaaacgtctacagtttttccactcaaaaagaaagtaagcattgatgaataccttcaaaatactggaaagatgaaaaacttcgctgacctggaagacagttccaaacatgaagaaaagcaaacttcatggaaagaaattgataatgatttcactaatgaaacaaaaatcagtccaatagataattacattgttttgcaccaagaatacaaagagagtgagagtcataattcttttgggaaaagctgtgataaaatattaattactcaagagttagaaataacaaaatcttctacatctaccataaaggataaggatgaactagatcatctagcattggaatggcaaattactccaagttttgagagcctgtcacaaaagcatcctcagcactctgtggagtatgagggtaacattcatacaagtttagccattgctcaaaagctaatggaactgaaattggggaaaataaatcaaaattatgctagcattataactgaagctttcccgaaaccaaaagacataccccaggccaaagaaatgttcattgatacagttatttcatcttataacatagaaacagctcatgacagttcaaattgcagcataactagagaacatatatgtgtccataggaaaaatgaaaatgaaccagtgtcattagagaacattcagagagactataaagaaactgcttatgttgaagataggggtcaggatcacaatctgttctgtaattcacagttaagcaatgatatatggctgaatgttaatttcaaaaaacaaacagatagagaaaaccaaaatgaggctaaagagaatagtgcttcatgtgtagaaaacaacatagagaacatatatggagacaaaaagcaggattctcatacaaacgaaaatttcagcaatatagatgaaaaggaggacaaaaattaccacaatatagaaattttgagttctgaagaattttctactaaatttaacttgatttgcagagaagataatgcagtgtcagcagcaactgcattattagagagtgaagaagataccattagtgccgtgaaacaaaaagatactgaaaatactggaagaagtgtagagcatttggcttccacgacatttcccaaaactgcaagttcttcagtgtgtgtagcctcaaatgctgcaatacagatagctagtgctactatgcctgcattaagcctaaataatgacgatcaccagatataccagtttaaagaaacttgttcttctgaaagtccagattttggtttgttagtaaaacatagggtttctgattgtgaaattgatacggataaaaataaatcacaagaatcatttcatcaatcaataaatgagaacttagttcttcagagcattgaattggaaagtgaaattgaaatagaattagaagattgtgatgatgcttttatatttcaacaagatacacatagccatgaaaacatgctttgtgaagaatttgtgacctcatataaggctctgaagtctcgtatcagttgggaaggtctgttagcacttgataacggggagatggaagttttggaaagcaccacaggaagggagaatagtgatcagcattattctaaggaaagtaactatttttattcctctacacaaaacaatgaaacagaacttaccagcccaattttacttccagatctacaaattaaaattactaatatatttaggccaggattcagcccgacagctgactcccttgcattgaaagatagtttttgcacacatgtaactgaagccacaaaaccggaaataaataaggaagatggagaaattctaggatttgacatttattcccagccttttggtgaaaatgcagattatccatgtgaagataaagttgataatataaggcaagaatcagggccagtgagtaactctgaaatctccctttcttttgacttgagtcgtaatacagatgtgaatcatacgtctgaaaatcagaacagtgaatctttgtttactgaaccttctaatgtcacaacaatagatgatggaagcagatgtttctttacaaaatcaaaaactgactataatgataccaaaaataaaaaggaggtagaatcaagaattagcaaaaggaagctacatatatcttccagggatcagaacataccacataaagatttaagacgacataaaatttatgggagaaagaggaggctaaccagtcaagactcatctgagtgtttctcttcattatcccaaggacgaattaaaacattttcacagtcagaaaagcacattaagagtgtcctaaatatcctaagtgatgaagcatctttatgtaaaagcaaatgtctttccagaaaactagacaaagcagttgttcacttaaaaaaagctcatagaagagttcacacatctttgcagcttataactaaagtaggagaagaaagaaagggcccattaccaaaatcatatgcaataatatgcaataatttctgggaaagttgtgaccttcaaggttatagttctgtgtctcaaagaaaatattattctactaagcatttttcgtcaaaaagaaaatatgacaaacggagaaagaaaagagctccaaaagctgatatttctaaatcattaacccatgtgtcaaagcacaagtcttataaaacaagtggagagaaaaaatgcctttctaggaaaagtatggctagcagtgtctcaaaaagtcaccccaccaccagtcacatgggagaattttgtaatcaagaacatcctgaatcacagttgcctgtatcctccacatcccaaagtacaagtcagtcagtttattataatagcagtgtaagcaatccaagtttatcagaagaacatcagcccttttctggaaaaactgcatatctgttttccccagaccactcagatgagaaactaatagaaaaagaaaatcaaattgatacagcatttttatctagcactagtaaatatgaaaagcttgaaaaacattcagcaaatcataatgttaaagatgcaactaaagaaaacagttgtgacgctaatgaagtaataaatgaaagtaattctgtatctttaagttgcataaaagaaaacataaattctagtacaggcaacgattgtgatgcaacttgcataggtcacacaaaggcgaaaactgacgtacttatatcagtcttagattcaaatgtgaagcactttttaaatgatctctaccaacaaggtaaccttattttatctgattgtaaaagaaacctggaagtaaagtggacagatcctattgagagacccaaacaaaacattattacaggaaacttccttatgggcccattaaacctaactttgatagcaagtaaaaagtacagtattcctcagttatcagccgctgcagtgacagatagtgagggagaatcttcaaaatcttacttggataagcagagaattcttactgtagattcttttgcagcatccagtactgtaccacactgtgagcagagctgtagagaaaaagagcttctaaagacagaacagtgctcttcaggtaattgcctccatacagatgggaatgaaacaaatgtcactgagaattatgagttggatgtagcatcaggaactgaagaagataaaagttatggggaaaatatagtggaattatcttccagtgatagttctctgcttttaaaagataatgtaaaaggctcctcttcagaaacatgtattgtgaagaaagacactgaggacagaataacgtggaaagttaaacaagcggaaaaagcaaaagattctgtttacaaaagaagcatgactgaaggatcaactgttaatactgagtacaaaaatcaaaagaatcagatctcagaagaatcctgcttaaatgagaaaattattacaactaacttgattgattcccatctgagcactaaaaatactaccactgagtcagtccctttgaagaacacagtttctaatccgcttaacaaaagagagaagaagggggaaattaaagttagtaaagactcgcagtctgacttgacattacattcagaaatagcctatatttccaaaccaggaattctaggagttaatcatacgcctattttacctgcccactctgaaacctgtaaagtccctactcttctgaagaaacctgcgtcatacgtgagtgattttaaagaaaaacattgctcagctaatcatacggcccttatagctaatctatctcaaattttgcagagggcagatgaagcatcatctttgcagattctacaggaagaaactaaggtttgtctaaatattctccctttatttgtggaagcttttgaaagaaagcaagaatgttcagttgaacaaatcctgatttcaagagaactgttggtagaccaaaacctgtggaataattgcaaacacacattaaaaccatgtgctgttgacactttggtagaacttcaaatgatgatggaaacaattcaattcattgaaaacaaaaaaaggcacttagaaggtgaaccaacattgcgaagcttgctttggtatgatgaaacactgtatgctgagcttcttggaaaaccacgtggatttcaacagcagtctaatttctatcctggtttccaaggaagattaaaatataatgcattctgtgagttacagacttaccatgatcaattagttgaattgcttgaagaaacaaaaagggaaaagaattcatactatgtattcttaaagtacaaacgacaggttaatgaatgtgaagccataatggagcattgttccgattgctttgatttttctctttctgttccatttacctgtggagttaactttggagatagtttagaagacctggaaatcttaagaaaaagtactttaaagttgatcaatgtatgtggggactctcctaaagttcattcgtatccaggaaaacaggaccatctgtggattatcatagaaatgatctcctcaaaggttaattttattaagaacaacgaggcagtacgtgttaaaatatctctttatggtctggaacatatcttttttgatgctgcaaaaaatcttgtttggaaagagagaacacaatccttcagcaaaaaatactcacaaaagaaggacgaagaaaggctactcagagtgaataaatgtgccttttctaagttgcagaagatatatgatactttgtctaaagatttaaacaatgaaccaatttcccctattgggcttgaggaggatactataattgcttccagaaagtcagatcatccaataaacgaagcaacaattagcatagaaaattctaaatttaacagtaatttgcttgcacacccagatatttgttgtattagtgagatattggatcaggctgaatttgcagaccttaaaaaattacaggatctcaccttgagatgtacagatcacttagaaattttaaaaaaatactttcagatgctacaagataataacatggataatatttttatcacagaagaaaatgttttagacgtggtgataaaccacagccatgaggctatcattttaaagcctgaagctattgaaatgtatattgaaatcgtcatggtctcagaaacaattcactttcttaaaaactcaatagcaaagaaactagacaaacagaggtttcgaggtatgctttggtttgatttgtcacttcttcctgagctggttcagtgccaagaaaaaatggcttctttttcatttcttaaagataactcaacagatgtttgcctttggaaagtgatagagactgctgtttccgaacttaagaaagatctggatattatctgcaaatataatgaagctgttaattgctcatatgctattcatttgctctcaagagaacttcaagaactttcagaaataaaaaagcttctgaagaagtccaagtattttatttccacatatattgactttgtgccatatatagcatccataaattatggaagcactgtgacagagttagaatacaactacaatcaattttctacactgctgaagaatgtaatgtctgcccctaggaaagatttaggaaaaatggcccacattaggaaagtcatgaaaacgattgaacatatgaagatgatatgtactaaaaatgctgaactaaccatttcctttttcctatgccaaatgctgtataacagaaggaagattttacagctgaagagaaaagaaaaaatgaatattcatattgtaaaacctggggaaaataacaataaatttagtatttctacgatgttgcccccagtatcagagtgcataaacaaaaacatctcaaattcctctaaaaaacgaccgagcactgtagacaaatgtgaagactctcaggaacaacagcaagatactactgtttccagttgtaaaaagctaaaggtagacatgaaagatgtcacaaaaatcaacagagaaaaggcaacattcaagcatccaaggactacaggatctcatcccaaaagcgaaaacaaaatagtaccaagttcatgtgacagtctgaaaagaaatcatttaacgccaaaaaaggttgaaatgcaaagatcactacctggctcacttttacccttagagaacccaaaagacacttgcgcatcaaagtcggaaagcaaaatagacttaactgtttcatctgatcacttcagtggacaacaggaaaatttaaatagcatgaagaaaagaaatgtgaacttcagtgctgctgaaacaaaaagtgataagaaagattgtgctgcttttgcaatttgtgaccaaaaaagtgtacatggcacattttcaccagaccatgggacgcttttgcagaaatttcttaaaaattccccagatcccacccaaaaatcctgcctttctgatataaacccagaaactgatgtttctcttgtgcctgatgcgtcggtgctctcaaagccaattttctgttttgtgaaagatgtccatcctgatctagaaatgaatgacacagtctttgaacttcaagataatgatatagtaaattcatctattaaaaattcctcatgcatgacttctccagaacccatctgtatccagaacaaaattcctactctgcagataaacaaactacagcctacagaaactgagtcagaggacaaatacatgaaggatacattgaatcccaatactgtgcatacttttggagcatctgggcatataacccttaatgtgaatcaaggagcagagtactctctttctgaacaacagaatgacaaaaattcaaaagtcctaatgcagaatgctgccacatattggaatgaacttccacagtctgcatgtaacccaacatataattcttctgagcatttatttggaacttcatatccatactctgcttggtgtgtttatcagtacagcaacagcaatggcaatgccattacccagacataccaagggataacatcatatgaagtacagccatctccttctgggctgttgaccacagttgcaagtactgcccagggcacacattctaatcttctgtactctcaatattttacttattttgcgggggagccacaagcaaatggctttgtgccagtgaatgggtattttcaatctcaaatacctgcttctaattttcggcagccaattttttcacaatatgcttctcatcagccattaccacaagctacatacccttaccttcctaatcgatttgtgcctccagaagttccttgggtttatgctccatggcaccaagaatcctttcatccaggacactgaaaatagtcttctgtctattgaaataagacataacaagtttttccaaatattttttacttatatattttttaacatttagcgatttttaatgtttgtaaatgtggtaggaaatataaatcatatggtcctttgtaaaatatacaaataatctaacacatatcatataggacatcaatttctaacatctgatataccagaattatttccatgcaattataaggggagggtaatatgatcaaagttaagcaatagtggtaaaatctttaaaactagattcttgcttctgatatgtttcaatacattgttgatggcattgtgccatttgagctgaaagcaggattttttttcattagtcatcaaaccaagaattttataattcttgacactttattatataatttacaattctatgccagatatggcaaatttcttcaatttcagtattttatagtttctacttgtaaaatatttttaataagaaaaattggtttgcataatctcagtgtttccttgagtagagatgttttaaatgtttatgttggaagcaattgtagttaattatattggcaatgaagcactttcaatgcctttttctacaagagccatttccagaagattattttgtttttggatttcacaatttaaatagttattttaatgattttctagcaaataatagagaataatgtttatgcttatgcagttagtctttattacagtaatttaaacaatgtggcacaaacatagttttttcatgctcttgtcatagacttttctttttaaccttctgcaaaagtaaaaactctcttagtaataatcatcatagggcaacaggatatagtatgtaactgcagtcttgagctgtctcttttcatgtattacctttcttgctcaacagctattcctgttttctgtaagatcctagtcagacagagccctcacaactggatagacctttctcaagggttagccctaaaatgtgacaagagaattggtttggctgaatcacaacaaataactagcaaagcttcagtgcttttgcaaactttttatgtaagcaaactttttgtgttatctggcacaggcctttgaaaagactataattctactttgtttaatgtagagtaactaatttttcaatttagaaagacagtgagaatccccaggataagcctctttatactcacttaaaccaactgggatggaattcagaatacctaagctgcttctttaacatagagatctttaaaaagggaaggtcaagcaaagaactgtaaccgaaagaagtaagagatttgaaaagacgatagagttaaaacaatatttaaaaaacatttctatttggtccatgcagttttatttgaaaatagtctgtcaaaatcagaactcctgaacaactttgaaagcagtaatattaactggtattcaaaaatgaataacagccaaaaatgaataacagccatttgatttatgtttccctcagtcatttggtttatgtttggttatggcaagatgttacagcatttatagttaatactactactaatatgtaaaccaaaagttaaatattctagttaaggattgtttctttaaacaactttcagattctgttgacattgtctttgtggtatttttatttcatgggttttaatttctcttaaagacttacctaaatattcagttacatttttaaaaaatctgtacgtgacagaatattaaaacatggaatatttttgcttcaa

SEQ ID NO: 31348 - DNA, 1549 bp, Homo sapiens
  source 1..1549: mol_type = unassigned DNA
gtgtctgaaatgccccatgtccggtggtgccagcactagcccccatgtcggtctcagagaaccttctccccacctctgagttattctctcagtgtatcgaagatatcagtcaactatcttctggattgcattgatgctattgagaaggcagcctgcagtctaaaagtcatggttttaaaggcggaacacaccaggagccccagcgcaaccctcccctccaatgtgccttcatgccggtccctgtcatccagcgaagacggccccagtggcccttccagcctcgcagatggaggcctagcccacaacttacaggatagtgtcaggcaccgcatcctctacctctcagagcagctgagagtggagaaggccagtcgggatggcaacactgtgagctacctcaagctggtatccaaagcagaccggcaccaggtgccgcacatccagcaggcctttgagaaggtgaaccagcgcgcctctgccaccatcgcccagatcgagcacaggctccaccagtgtcaccagcagctccaggagctggaggaaggctgcaggcccgagggcttactgctgatggcagaaagcgacccagccaactgcgagccacccagtgagaaggccctgctttcagagccccccgagccaggtggggaagacgggccggtcaacctgcctcatgccagcaggcccttcatcttggagagtcgcttccagagcttacagcaggggacgtgcttagagacagaggatgtggcccagcaacaaaacctgctgttgcagaaggtaaaggcagagctggaagaagccaagaggttccacatcagcctccaggagtcctatcacagcctaaaggagaggtctctgactgacctgcagctgttgctggagtcccttcaggaggagaagtgtaggcaagcattgatggaagaacaggtgaatggtcgcctgcagggacagctgaatgagatttacaacctcaaacacaatctggcctgcagcgaagagagaatggcctatctatcctatgagagagccaaggaaatatgggagatcacggagaccttcaagagccgaatatccaagctggagatgctacagcaagtcacccaactggaggcagcggagcacctccaaagccgtcccccgcagatgttgttcaagttcctgagtccgcgcctctcactggcaaccgtcctcttggtctttgtctccaccttgtgtgcctgcccctcgtcactgatcagctcacgcctgtgcacctgcaccatgctgatgctgatcgggcttggggtcctggcctggcagaggtggcgcgccatccctgccacagactggcaggaatgggtcccctccaggtgtagactgtactccaaggactctgggcctccagcagatggaccttaaggggccaggagggccacctgccttagcttgctagctccctccctcctcctgggtgctgagggcatccagcaagcccctccacagctcttgcttgccgattatgtaaccaccagcctggtgaaatggatatagacgcccacctgcctca

SEQ ID NO: 31349 - DNA, 1549 bp, Homo sapiens
  source 1..1549: mol_type = unassigned DNA
gaggcaagccccgtgtgattgttgaggaggagttagcccattgccagcctgtgacgtgactgactcgaatgaaccctgttattctctcagtgtatcgaagatatcagtcaactatcttctggattgcattgatgctattgagaaggcagcctgcagtctaaaagtcatggttttaaaggcggaacacaccaggagccccagcgcaaccctcccctccaatgtgccttcatgccggtccctgtcatccagcgaagacggccccagtggcccttccagcctcgcagatggaggcctagcccacaacttacaggatagtgtcaggcaccgcatcctctacctctcagagcagctgagagtggagaaggccagtcgggatggcaacactgtgagctacctcaagctggtatccaaagcagaccggcaccaggtgccgcacatccagcaggcctttgagaaggtgaaccagcgcgcctctgccaccatcgcccagatcgagcacaggctccaccagtgtcaccagcagctccaggagctggaggaaggctgcaggcccgagggcttactgctgatggcagaaagcgacccagccaactgcgagccacccagtgagaaggccctgctttcagagccccccgagccaggtggggaagacgggccggtcaacctgcctcatgccagcaggcccttcatcttggagagtcgcttccagagcttacagcaggggacgtgcttagagacagaggatgtggcccagcaacaaaacctgctgttgcagaaggtaaaggcagagctggaagaagccaagaggttccacatcagcctccaggagtcctatcacagcctaaaggagaggtctctgactgacctgcagctgttgctggagtcccttcaggaggagaagtgtaggcaagcattgatggaagaacaggtgaatggtcgcctgcagggacagctgaatgagatttacaacctcaaacacaatctggcctgcagcgaagagagaatggcctatctatcctatgagagagccaaggaaatatgggagatcacggagaccttcaagagccgaatatccaagctggagatgctacagcaagtcacccaactggaggcagcggagcacctccaaagccgtcccccgcagatgttgttcaagttcctgagtccgcgcctctcactggcaaccgtcctcttggtctttgtctccaccttgtgtgcctgcccctcgtcactgatcagctcacgcctgtgcacctgcaccatgctgatgctgatcgggcttggggtcctggcctggcagaggtggcgcgccatccctgccacagactggcaggaatgggtcccctccaggtgtagactgtactccaaggactctgggcctccagcagatggaccttaaggggccaggagggccacctgccttagcttgctagctccctccctcctcctgggtgctgagggcatccagcaagcccctccacagctcttgcttgccgattatgtaaccaccagcctggtgaaatggatatagacgcccacctgcctcaca

SEQ ID NO: 31350 - DNA, 1132 bp, Homo sapiens
  source 1..1132: mol_type = unassigned DNA
atgcgccctgagggctcgctgacctaccgggtgccagagaggctgcggcagggtttctgtggcgtgggtcgggcagcacaggccttggtgtgtgcgagtgccaaggagggcaccgccttcaggatggaggctgtacaggagggggcggccggggtggagagtgagcaggcggctttgggggaggaggcggtgctgctgttggatgacataatggcggaggtggaggtggtggcggaggtggaggtggtggcggaggaggagggcctcgtggagcggcgggaggaggcccagcgggcacagcaggctgtgcctggccctgggcccatgaccccagagtctgcaccggaggagctgctggccgttcaggtggagctggagccggttaatgcccaagccaggaaggccttttctcggcagcgggaaaagatggagcggaggcgcaagccccacctagaccgcagaggcgccgtcatccagagcgtccctggcttctgggccaatgttattgcaaaccacccccagatgtcagccctgatcactgacgaagatgaagacatgctgagctacatggtcagcctggaggtgggagaagagaagcatcctgttcatctctgcaagatcatgttgttctttcggagtaacccctacttccagaataaagtgattaccaaggaatatctggtgaacatcacagaatacagggcttctcattccactccaattgagtggtatccggattatgaagtggaggcctatcgccgcagacaccacaacagcagccttaacttcttcaactggttctctgaccacaacttcgcaggatctaacaagattgctgagatcctatgtaaggacctgtggcgcaatcccctgcaatactacaagaggatgaagccacctgaagagggaacagagacgtcaggggactcccagttgttgagttgaatatgatggagcatcagattttacctaatacagcagaactcctaaaaagttacagccatatgcaggacggcagtactcagcatggtcttatgcacaggaactaaaggaaaaagagatcgagtcacaaaaattcaggaagagggggtaaatgtggattgtatggaatgaaaaataaacattctcaagg

SEQ ID NO: 31351 - DNA, 1160 bp, Homo sapiens
  source 1..1160: mol_type = unassigned DNA
ggcccttcgcgcgcagtcccttagggggcgcctggaagcccggcgcatgcgccctgagggctcgctgacctaccgggtgccagagaggctgcggcagggtttctgtggcgtgggtcgggcagcacaggccttggtgtgtgcgagtgccaaggagggcaccgccttcaggatggaggctgtgcaggagggggcggccggggtggagagtgagcaggcggctttgggggaggaggcggtgctgctgttggatgacataatggcggaggtggaggtggtggcggaggaggagggcctcgtggagcggcgggaggaggcccagcgggcacagcaggctgtgcctggccctgggcccatgaccccagagtctgcaccggaggagctgctggccgttcaggtggagctggagccggttaatgcccaagccaggaaggccttttctcggcagcgggaaaagatggagcggaggcgcaagccccacctagaccgcagaggcgccgtcatccagagcgtccctggcttctgggccaatgttattgcaaaccacccccagatgtcagccctgatcactgacgaagatgaagacatgctgagctacatggtcagcctggaggtgggagaagagaagcatcctgttcatctctgcaagatcatgttgttctttcggagtaacccctacttccagaataaagtgattaccaaggaatatctggtgaacatcacagaatacagggcttctcattccactccaattgagtggtatccggattatgaagtggaggcctatcgccgcagacaccacaacagcagccttaacttcttcaactggttctctgaccacaacttcgcaggatctaacaagattgctgagatcctatgtaaggacctgtggcgcaatcccctgcaatactacaagaggatgaagccacctgaagagggaacagagacgtcaggggactcccagttgttgagttgaatatgatggagcatcagattttacctaatacagcagaactcctaaaaagttacagccatatgcaggacggcagtactcagcatggtcttatgcacaggaactaaaggaaaaagagatcgagtcacaaaaattcaggaagagggggtaaatgtggattgtatggaatgaaaaataaacattctcaagg

SEQ ID NO: 31352 - DNA, 3037 bp, Homo sapiens
  source 1..3037: mol_type = unassigned DNA
gggcgtgcgcctgcgcggcgcggatgggccaggaaggggtccctcctaggtgccctgtaaggcaggcaggtagacgtacgcgtcgctccgtgcgtaggagcgcgcgcacggcttgtagaccccgcgagaaggaaggtcgagccaggttaccaccaaagaatatgattttggtctaggggctccagtttctgaagctgaaaactaccagaatactctccagctagaacaagaagtgagaaaccaagatagattcatctcgacactgaaattacagattgaagatctcaaacagacaaatcatggcttggaagaatatgttaggaaactcttggatagtaaggaggtggtaagcagtcaagtagatgatttaaccagccacaatgagcatctttgtaaagaattgattaaaattgaccaactagcagagcaactcgaaaaagagaaaaattttgtggtggattccgccaacaaggaacttgaagaagccaagattgatctcatttgccagcaaaataatattatagtattggaagatacaataaaaaggcttaaatctacttgattcctttgtcaagactttggaagcagacaaagatcactataagagtgaagctcaacatttgagaaagatgatgcgaagtaggtctaaaagtccaagacgcccatcaccaactgcccggggtgcaaactgtgatgtagaacttttgaagacaacaacaagagatcgtgaagaacttaaatgcatgctggaaaaatatgagcgccatttggcagaaattcagggtaatgtcaaggttcttaaatctgagagagacaagatcttccttctttatgaacaggcacaggaagaaattacccgacttcgacgagaaatgatgaaaagctgtaagagtcctaaatcaacaacggcacatgctattctccggcgagtggagactgaaagagatgtagcctttactgatttacgaagaatgaccacagaacgagatagtctaagggagaggctaaagattgctcaagagacagcatttaatgagaaggctcacctggaacaaaggatagaggagctggagtgtacagttcataatcttgatgatgaacgtatggagcaaatgtcaaatatgactttgatgaaggaaaccataagcactgtggaaaaagaaatgaaatcactagcaagaaaggcaatggataccgaaagtgaacttggcagacaaaaagcagagaataattctttgagacttttgtatgaaaacacagaaaaagatctttctgatactcagcgacaccttgctaagaaaaaatatgagctacagcttactcaggagaaaattatgtgcttggatgaaaaaattgataactttacaaggcaaaatattgcacagcgagaagaaatcagcattcttggtggaaccctcaatgatctggctaaagaaaaggaatgcctgcaagcatgtttggataaaaaatctgagaatattgcatcccttggagagagtttggcaatgaaagaaaagaccatttcaggcatgaagaatatcattgctgagatggaacaggcatcaagacagtgtactgaggccctaattgtgtgtgaacaagacgtttccagaatgcgtcggcaattggatgagacaaatgatgagctggcccagatcgccagggaaagagatatcttggctcatgacaatgacaatctccaggaacagtttgctaaagctaaacaagaaaaccaggcactgtccaaaaaattgaatgacactcataatgaacttaatgacataaaacagaaggttcaagatactaatttggaggttaacaagctgaagaatatattaaagtctgaagaatctgagaaccggcaaatgatggaacaacttcgaaaagccaatgaagatgctgaaaactgggaaaataaagcccgtcaatcagaggcagataacaataccctcaaactggaacttatcactgctgaggcagagggtaacagattaaaagaaaaagtagattccctcaacagagaggttgagcaacacttaaatgcagaaaggtcttacaagtcccagatttctaccttacataaatctgttgtaaaaatggaagaggagcttcagaaggttcagtttgaaaaagtgtccgctcttgcagatttgtcttctactagggaactctgtattaaacttgactcaagcaaagaacttcttaatcgacagctggttgctaaagatcaagaaatagaaatgagggagaatgagttagattctgctcattctgaaattgaactcctgaggagtcagatggcaaatgagagaatctccatgcagaatctagaagctttgctggtggccaatcgagacaaagaatatcagtctcagatagcacttcaagaaaaagaatctgaaattcagcttcttaaagaacacctttgtttggcagaaaataaaatggccatccagagtagagatgtggcccagttcagaaatgttgtcacacaattggaagctgatttagacattaccaaaagacaactaggaacagagcgctttgaaagggagagggccgtacaagaacttcgccgccaaaattattcaagtaatgcttatcatatgagttctacaatgaagccaaatacaaaatgtcattcaccagaacgtgctcaccatcgatctcctgaccgaggcctagatcgatcattagaagagaatctttgctacagagatttctgacacctgaaatgattcttcacatccctgagaaaggtcaaagttacaaactgatttttttttttttgctacatgagtgcatttatcttttaaatgcttggcaatgttaaatgtatttattaactttgtgtctctgaatctctgttctaatgtgccatgttgcagtgatctgagatgacttataaaaacaaaaatgtatatggctctttctatccatgcagtgatagtgagtgtaaaatctgcttacttcactattgaacactattctgttcactatctggagtaaataaagaagcttattaaaacagggaaaa

SEQ ID NO: 31353 - DNA, 2460 bp, Homo sapiens
  source 1..2460: mol_type = unassigned DNA
gcgcaccgggcctgggggcgagcgggacggaagcaaagctggggcgccggggaggtggaagacgagccccactccggttaccaccaaagaatatgattttggtctaggggctccagtttctgaagctgaaaactaccagaatactctccagctagaacaagaagtgagaaaccaagatagattcatctcgacactgaaattacagattgatctcatttgccagcaaaataatattatagtattggaagatacaataaaaaggcttaaatctataattttagatactgaaaaagcacaaaataaatctccttctagacttgattcctttgtcaagactttggaagcagacaaagatcactataagagtgaagctcaacatttgagaaagatgatgcgaagtaggtctaaaagtccaagacgcccatcaccaactgcccggggtgcaaactgtgatgtagaacttttgaagacaacaacaagagatcgtgaagaacttaaatgcatgctggaaaaatatgagcgccatttggcagaaattcagggtaatgtcaaggttcttaaatctgagagagacaagatcttccttctttatgaacaggcacaggaagaaattacccgacttcgacgagaaatgatgaaaagctgtaagagtcctaaatcaacaacggcacatgctattctccggcgagtggagactgaaagagatgtagcctttactgatttacgaagaatgaccacagaacgagatagtctaagggagaggctaaagattgctcaagagacagcatttaatgagaaggctcacctggaacaaaggatagaggagctggagtgtacagttcataatcttgatgatgaacgtatggagcaaatgtcaaatatgactttgatgaaggaaaccataagcactgtggaaaaagaaatgaaatcactagcaagaaaggcaatggataccgaaagtgaacttggcagacaaaaagcagagaataattctttgagacttttgtatgaaaacacagaaaaagatctttctgatactcagcgacaccttgctaagaaaaaatatgagctacagcttactcaggagaaaattatgtgcttggatgaaaaaattgataactttacaaggcaaaatattgcacagcgagaagaaatcagcattcttggtggaaccctcaatgatctggctaaagaaaaggaatgcctgcaagcatgtttggataaaaaatctgagaatattgcatcccttggagagagtttggcaatgaaagaaaagaccatttcaggcatgaagaatatcattgctgagatggaacaggcatcaagacagtgtactgaggccctaattgtgtgtgaacaagacgtttccagaatgcgtcggcaattggatgagacaaatgatgagctggcccagatcgccagggaaagagatatcttggctcatgacaatgacaatctccaggaacagtttgctaaagctaaacaagaaaaccaggcactgtccaaaaaattgaatgacactcataatgaacttaatgacataaaacagaaggttcaagatactaatttggaggttaacaagctgaagaatatattaaagtctgaagaatctgagaaccggcaaatgatggaacaacttcgaaaagccaatgaagatgctgaaaactgggaaaataaagcccgtcaatcagaggcagataacaataccctcaaactggaacttatcactgctgaggcagagggtaacagattaaaagaaaaagtagattccctcaacagagaggttgagcaacacttaaatgcagaaaggtcttacaagtcccagatttctaccttacataaatctgttgtaaaaatggaagaggagcttcagaaggttcagtttgaaaaagtgtccgctcttgcagatttgtcttctactagggaactctgtattaaacttgactcaagcaaagaacttcttaatcgacagctggttgctaaagatcaagaaatagaaatgagggagaatgagttagattctgctcattctgaaattgaactcctgaggagtcagatggcaaatgagagaatctccatgcagaatctagaagctttgctggtggccaatcgagacaaagaatatcagtctcagatagcacttcaagaaaaagaatctgaaattcagcttcttaaagaacacctttgtttggcagaaaataaaatggccatccagagtagagatgtggcccagttcagaaatgttgtcacacaattggaagctgatttagacattaccaaaagacaactaggaacagagcgctttgaaagggagagggccgtacaagaacttcgccgccaaaattattcaagtaatgcttatcatatgagttctacaatgaagccaaatacaaaatgtcattcaccagaacgtgctcaccatcgatctcctgaccgaggcctagatcgatcattagaaga

SEQ ID NO: 31354 - DNA, 3878 bp, Homo sapiens
  source 1..3878: mol_type = unassigned DNA
agaaggaggggcgcgcagggatcgcgcctagtctctccgcctgcggagccgtggggtcccggcagcccgcaggagtgctaagtaagggtccttcagggcgggaaccaggttccaggcagggacgcaggctacgttcgaataaaagtaccgaaggtcataaggccccagttcagatgggacttccccgcgtgacagcacagagataacggccagccctgggcgaaggttaccaccaaagaatatgattttggtctaggggctccagtttctgaagctgaaaactaccagaatactctccagctagaacaagaagtgagaaaccaagatagattcatctcgacactgaaattacaggcatttggatacctttgtgatagaaaaggcccttttcttcatccattgatggtttgatagtgggctgggaaggaaagctgtgttcctccacattaggcagcaaatacttgattgatttgatatttagcttagtcaaattgaagatctcaaacagacaaatcatggcttggaagaatatgttaggaaactcttggatagtaaggaggtggtaagcagtcaagtagatgatttaaccagccacaatgagcatctttgtaaagaattgattaaaattgaccaactagcagagcaactcgaaaaagagaaaaattttgtggtggattccgccaacaaggaacttgaagaagccaagattgatctcatttgccagcaaaataatattatagtattggaagatacaataaaaaggcttaaatctacttgattcctttgtcaagactttggaagcagacaaagatcactataagagtgaagctcaacatttgagaaagatgatgcgaagtaggtctaaaagtccaagacgcccatcaccaactgcccggggtgcaaactgtgatgtagaacttttgaagacaacaacaagagatcgtgaagaacttaaatgcatgctggaaaaatatgagcgccatttggcagaaattcagggtaatgtcaaggttcttaaatctgagagagacaagatcttccttctttatgaacaggcacaggaagaaattacccgacttcgacgagaaatgatgaaaagctgtaagagtcctaaatcaacaacggcacatgctattctccggcgagtggagactgaaagagatgtagcctttactgatttacgaagaatgaccacagaacgagatagtctaagggagaggctaaagattgctcaagagacagcatttaatgagaaggctcacctggaacaaaggatagaggagctggagtgtacagttcataatcttgatgatgaacgtatggagcaaatgtcaaatatgactttgatgaaggaaaccataagcactgtggaaaaagaaatgaaatcactagcaagaaaggcaatggataccgaaagtgaacttggcagacaaaaagcagagaataattctttgagacttttgtatgaaaacacagaaaaagatctttctgatactcagcgacaccttgctaagaaaaaatatgagctacagcttactcaggagaaaattatgtgcttggatgaaaaaattgataactttacaaggcaaaatattgcacagcgagaagaaatcagcattcttggtggaaccctcaatgatctggctaaagaaaaggaatgcctgcaagcatgtttggataaaaaatctgagaatattgcatcccttggagagagtttggcaatgaaagaaaagaccatttcaggcatgaagaatatcattgctgagatggaacaggcatcaagacagtgtactgaggccctaattgtgtgtgaacaagacgtttccagaatgcgtcggcaattggatgagacaaatgatgagctggcccagatcgccagggaaagagatatcttggctcatgacaatgacaatctccaggaacagtttgctaaagctaaacaagaaaaccaggcactgtccaaaaaattgaatgacactcataatgaacttaatgacataaaacagaaggttcaagatactaatttggaggttaacaagctgaagaatatattaaagtctgaagaatctgagaaccggcaaatgatggaacaacttcgaaaagccaatgaagatgctgaaaactgggaaaataaagcccgtcaatcagaggcagataacaataccctcaaactggaacttatcactgctgaggcagagggtaacagattaaaagaaaaagtagattccctcaacagagaggttgagcaacacttaaatgcagaaaggtcttacaagtcccagatttctaccttacataaatctgttgtaaaaatggaagaggagcttcagaaggttcagtttgaaaaagtgtccgctcttgcagatttgtcttctactagggaactctgtattaaacttgactcaagcaaagaacttcttaatcgacagctggttgctaaagatcaagaaatagaaatgagggagaatgagttagattctgctcattctgaaattgaactcctgaggagtcagatggcaaatgagagaatctccatgcagaatctagaagctttgctggtggccaatcgagacaaagaatatcagtctcagatagcacttcaagaaaaagaatctgaaattcagcttcttaaagaacacctttgtttggcagaaaataaaatggccatccagagtagagatgtggcccagttcagaaatgttgtcacacaattggaagctgatttagacattaccaaaagacaactaggaacagagcgctttgaaagggagagggccgtacaagaacttcgccgccaaaattattcaagtaatgcttatcatatgagttctacaatgaagccaaatacaaaatgtcattcaccagaacgtgctcaccatcgatctcctgaccgaggcctagatcgatcattagaagagaatctttgctacagagatttctgacacctgaaatgattcttcacatccctgagaaaggtcaaagttacaaactgatttttttttttttgctacatgagtgcatttatcttttaaatgcttggcaatgttaaatgtatttattaactttgtgtctctgaatctctgttctaatgtgccatgttgcagtgatctgagatgacttataaaaacaaaaatgtatatggctctttctatccatgcagtgatagtgagtgtaaaatctgcttacttcactattgaacactattctgttcactatctggagtaaataaagaagcttattaaaacagggaaaagtgtttttacaaaactgctttcctttcctttcttggtatctcaaataattggttggttaattttttttctttgtgatttgtgttttcatggctggaaaatctgtgccaaaatgggtacaacttactgatactggtctgggatctgatattccattttggaaccaaccttacatgaattccatgccataatctgatattgaagcagcagaaagtaggagtgttgtcagggttttaaaacctatagtattgtaccactcaaagactaagtaacatacatattctacaattgtgtttactactactgcttttagaaaggtaggtgatggtatatctgtcaagaatgtaagattttattaaaaatctttatttttaataagttttctttcaagtactgcaatcaacttaattgcgattttattttattgtctgtggcagctgtctgtaatctggagtaataagataagtgatgtttccttcctcccccaatttcctaaatctcttaccttatctatccataggctttgatgtaatgttcatattagagcctgaatgctactgtattttactgatataaactatttgtattcttgccattttaataaaaaaaggcttgtcattaatagta

SEQ ID NO: 31355 - DNA, 3036 bp, Homo sapiens
  source 1..3036: mol_type = unassigned DNA
caggtatctaacctatctttgtatttttggaatttaatatagttcctgacataatcattgttcaatgggtctaattttttttttcctttaaaggcatttggatacctttgtgatagaaaaggcccttttcttcatccattgatggtttgatagtgggctgggaaggaaagctgtgttcctccacattaggcagcaaatacttgattgatttgatatttagcttagtcaaattgaagatctcaaacagacaaatcatggcttggaagaatatgttaggaaactcttggatagtaaggaggtggtaagcagtcaagtagatgatttaaccagccacaatgagcatctttgtaaagaattgattaaaattgaccaactagcagagcaactcgaaaaagagaaaaattttgtggtggattccgccaacaaggaacttgaagaagccaagattgatctcatttgccagcaaaataatattatagtattggaagatacaataaaaaggcttaaatctataattttagatactgaaaaagcacaaaataaatctccttctagacttgattcctttgtcaagactttggaagcagacaaagatcactataagagtgaagctcaacatttgagaaagatgatgcgaagtaggtctaaaagtccaagacgcccatcaccaactgcccggggtgcaaactgtgatgtagaacttttgaagacaacaacaagagatcgtgaagaacttaaatgcatgctggaaaaatatgagcgccatttggcagaaattcagggtaatgtcaaggttcttaaatctgagagagacaagatcttccttctttatgaacaggcacaggaagaaattacccgacttcgacgagaaatgatgaaaagctgtaagagtcctaaatcaacaacggcacatgctattctccggcgagtggagactgaaagagatgtagcctttactgatttacgaagaatgaccacagaacgagatagtctaagggagaggctaaagattgctcaagagacagcatttaatgagaaggctcacctggaacaaaggatagaggagctggagtgtacagttcataatcttgatgatgaacgtatggagcaaatgtcaaatatgactttgatgaaggaaaccataagcactgtggaaaaagaaatgaaatcactagcaagaaaggcaatggataccgaaagtgaacttggcagacaaaaagcagagaataattctttgagacttttgtatgaaaacacagaaaaagatctttctgatactcagcgacaccttgctaagaaaaaatatgagctacagcttactcaggagaaaattatgtgcttggatgaaaaaattgataactttacaaggcaaaatattgcacagcgagaagaaatcagcattcttggtggaaccctcaatgatctggctaaagaaaaggaatgcctgcaagcatgtttggataaaaaatctgagaatattgcatcccttggagagagtttggcaatgaaagaaaagaccatttcaggcatgaagaatatcattgctgagatggaacaggcatcaagacagtgtactgaggccctaattgtgtgtgaacaagacgtttccagaatgcgtcggcaattggatgagacaaatgatgagctggcccagatcgccagggaaagagatatcttggctcatgacaatgacaatctccaggaacagtttgctaaagctaaacaagaaaaccaggcactgtccaaaaaattgaatgacactcataatgaacttaatgacataaaacagaaggttcaagatactaatttggaggttaacaagctgaagaatatattaaagtctgaagaatctgagaaccggcaaatgatggaacaacttcgaaaagccaatgaagatgctgaaaactgggaaaataaagcccgtcaatcagaggcagataacaataccctcaaactggaacttatcactgctgaggcagagggtaacagattaaaagaaaaagtagattccctcaacagagaggttgagcaacacttaaatgcagaaaggtcttacaagtcccagatttctaccttacataaatctgttgtaaaaatggaagaggagcttcagaaggttcagtttgaaaaagtgtccgctcttgcagatttgtcttctactagggaactctgtattaaacttgactcaagcaaagaacttcttaatcgacagctggttgctaaagatcaagaaatagaaatgagggagaatgagttagattctgctcattctgaaattgaactcctgaggagtcagatggcaaatgagagaatctccatgcagaatctagaagctttgctggtggccaatcgagacaaagaatatcagtctcagatagcacttcaagaaaaagaatctgaaattcagcttcttaaagaacacctttgtttggcagaaaataaaatggccatccagagtagagatgtggcccagttcagaaatgttgtcacacaattggaagctgatttagacattaccaaaagacaactaggaacagagcgctttgaaagggagagggccgtacaagaacttcgccgccaaaattattcaagtaatgcttatcatatgagttctacaatgaagccaaatacaaaatgtcattcaccagaacgtgctcaccatcgatctcctgaccgaggcctagatcgatcattagaagagaatctttgctacagagatttctgacacctgaaatgattcttcacatccctgagaaaggtcaaagttacaaactgatttttttttttttgctacatgagtgcatttatcttttaaatgcttggcaatgttaaatgtatttattaactttgtgtctctgaatctctgttctaatgtgccatgttgcagtgatctgagatgacttataaaaacaaaaatgtatatggctctttctatccatgcagtgatagtgagtgtaaaatctgcttacttcactattgaacactattctgttcactatctggagtaaataaagaagcttattaaaacagggaaaa

SEQ ID NO: 31356 - DNA, 2485 bp, Homo sapiens
  source 1..2485: mol_type = unassigned DNA
gcgcaccgggcctgggggcgagcgggacggaagcaaagctggggcgccggggaggtggaagacgagccccactccggttaccaccaaagaatatgattttggtctaggggctccagtttctgaagctgaaaactaccagaatactctccagctagaacaagaagtgagaaaccaagatagattcatctcgacactgaaattacagattgatctcatttgccagcaaaataatattatagtattggaagatacaataaaaaggcttaaatctataattttagatactgaaaaagcacaaaataaatctccttctagacttgattcctttgtcaagactttggaagcagacaaagatcactataagagtgaagctcaacatttgagaaagatgatgcgaagtaggtctaaaagtccaagacgcccatcaccaactgcccggggtgcaaactgtgatgtagaacttttgaagacaacaacaagagatcgtgaagaacttaaatgcatgctggaaaaatatgagcgccatttggcagaaattcagggtaatgtcaaggttcttaaatctgagagagacaagatcttccttctttatgaacaggcacaggaagaaattacccgacttcgacgagaaatgatgaaaagctgtaagagtcctaaatcaacaacggcacatgctattctccggcgagtggagactgaaagagatgtagcctttactgatttacgaagaatgaccacagaacgagatagtctaagggagaggctaaagattgctcaagagacagcatttaatgagaaggctcacctggaacaaaggatagaggagctggagtgtacagttcataatcttgatgatgaacgtatggagcaaatgtcaaatatgactttgatgaaggaaaccataagcactgtggaaaaagaaatgaaatcactagcaagaaaggcaatggataccgaaagtgaacttggcagacaaaaagcagagaataattctttgagacttttgtatgaaaacacagaaaaagatctttctgatactcagcgacaccttgctaagaaaaaatatgagctacagcttactcaggagaaaattatgtgcttggatgaaaaaattgataactttacaaggcaaaatattgcacagcgagaagaaatcagcattcttggtggaaccctcaatgatctggctaaagaaaaggaatgcctgcaagcatgtttggataaaaaatctgagaatattgcatcccttggagagagtttggcaatgaaagaaaagaccatttcaggcatgaagaatatcattgctgagatggaacaggcatcaagacagtgtactgaggccctaattgtgtgtgaacaagacgtttccagaatgcgtcggcaattggatgagacaaatgatgagctggcccagatcgccagggaaagagatatcttggctcatgacaatgacaatctccaggaacagtttgctaaagctaaacaagaaaaccaggcactgtccaaaaaattgaatgacactcataatgaacttaatgacataaaacagaaggttcaagatactaatttggaggttaacaagctgaagaatatattaaagtctgaagaatctgagaaccggcaaatgatggaacaacttcgaaaagccaatgaagatgctgaaaactgggaaaataaagcccgtcaatcagaggcagataacaataccctcaaactggaacttatcactgctgaggcagagggtaacagattaaaagaaaaagtagattccctcaacagagaggttgagcaacacttaaatgcagaaaggtcttacaagtcccagatttctaccttacataaatctgttgtaaaaatggaagaggagcttcagaaggttcagtttgaaaaagtgtccgctcttgcagatttgtcttctactagggaactctgtattaaacttgactcaagcaaagaacttcttaatcgacagctggttgctaaagatcaagaaatagaaatgagggagaatgagttagattctgctcattctgaaattgaactcctgaggagtcagatggcaaatgagagaatctccatgcagaatctagaagctttgctggtggccaatcgagacaaagaatatcagtctcagatagcacttcaagaaaaagaatctgaaattcagcttcttaaagaacacctttgtttggcagaaaataaaatggccatccagagtagagatgtggcccagttcagaaatgttgtcacacaattggaagctgatttagacattaccaaaagacaactaggaacagagcgctttgaaagggagagggccgtacaagaacttcgccgccaaaattattcaagtaatgcttatcatatgagttctacaatgaagccaaatacaaaatgtcattcaccagaacgtgctcaccatcgatctcctgaccgaggcctagatcgatcattagaagagaatctttgctacagagatttctga

SEQ ID NO: 31357 - DNA, 1502 bp, Homo sapiens
  source 1..1502: mol_type = unassigned DNA
agtcgcggggatgagctctgggcaggacggcgggccgaggagcccggggagggacccggagctccaggttaccaccaaagaatatgattttggtctaggggctccagtttctgaagctgaaaactaccagaatactctccagctagaacaagaagtgagaaaccaagatagattcatctcgacactgaaattacagattgaagatctcaaacagacaaatcatggcttggaagaatatgttaggaaactcttggatagtaaggaggtggtaagcagtcaagtagatgatttaaccagccacaatgagcatctttgtaaagaattgattaaaattgaccaactagcagagcaactcgaaaaagagaaaaattttgtggtggattccgccaacaaggaacttgaagaagccaagattgatctcatttgccagcaaaataatattatagtattggaagatacaataaaaaggcttaaatctacttgattcctttgtcaagactttggaagcagacaaagatcactataagagtgaagctcaacatttgagaaagatgatgcgaagtaggtctaaaagtccaagacgcccatcaccaactgcccggggtgcaaactgtgatgtagaacttttgaagacaacaacaagagatcgtgaagaacttaaatgcatgctggaaaaatatgagcgccatttggcagaaattcagggtaatgtcaaggttcttaaatctgagagagacaagatcttccttctttatgaacaggcacaggaagaaattacccgacttcgacgagaaatgatgaaaagctgtaagagtcctaaatcaacaacggcacatgctattctccggcgagtggagactgaaagagatgtagcctttactgatttacgaagaatgaccacagaacgagatagtctaagggagaggctaaagattgctcaagagacagcatttaatgagaaggctcacctggaacaaaggatagaggagctggagtgtacagttcataatcttgatgatgaacgtatggagcaaatgtcaaatatgactttgatgaaggaaaccataagcactgtggaaaaagaaatgaaatcactagcaagaaaggcaatggataccgaaagtgaacttggcagacaaaaagcagagaataattctttgagacttttgtatgaaaacacagaaaaagatctttctgatactcagcgacaccttgctaagaaaaaatatgagctacagcttactcaggagaaaattatgtgcttggatgaaaaaattgataactttacaaggcaaaatattgcacagcgagaagaaatcagcattcttggtggaaccctcaatgatctggctaaagaaaaggaatgcctgcaagcatgtttggataaaaaatctgagaatattgcatcccttggagagagtttggcaatgaaaacagtgtactgaggccctaattgtgtgtgaacaagacgtttccagaatgcgtcggcaattggatgagac

SEQ ID NO: 31358 - DNA, 2421 bp, Homo sapiens
  source 1..2421: mol_type = unassigned DNA
caccgccaccgcccggtccaggcccaagcccaggccctgcgcggagcggagcggcgcggcgtccacccgggcccagccagccggcgcggcgggggcgggtccaggatcttcggcggatcttccattctcagggcgggagccggagtccgggcgcccgggatcgggctgggcccgcgcccatggcaagcgcggcctgcccgggccctggggaccctgccatgtgaggcaggcccgggctgggggcccggccatggccggggaacggcccccactgcggggccctgggcccgggcctggagaggtgccgggggaggggcccccggggccggggggcacgggcggaggcccgggccggggccgcccctcctcctaccgggctctccgcagcgccgtgtctagcctggcgcgtgtggacgattttcactgcgcggagaagatcggggccggcttcttctctgaggtctacaaggttcggcaccgacagtcagggcaagtcatggtgctgaagatgaacaagctccccagtaaccggggcaacacactacgggaagtgcagctgatgaaccggctcaggcaccccaacatcctaaggttcatgggagtctgtgtgcaccagggacagctgcacgctcttacagagtatatgaatggggggacattggaacagctgctcagctcccctgaacccctgtcctggccggtcaggctccacctggccctggacattgcccgaggcctgcggtacctgcactccaaaggtgtatttcaccgcgacctcacatccaagaactgtctagtccgacgggaagatcgaggcttcaccgctgtcgtgggtgacttcgggctggccgaaaagattcctgtgtatagggagggggcaaggaaggagccattggccgtggtgggctccccatactggatggctccagaggtgttacggggtgagctgtatgatgagaaggctgatgtctttgccttcgggattgtcctctgtgagctcatcgcccgagtacctgcagaccctgactacctaccacgcactgaggactttggcctggatgtgcctgctttccgaactctggtgggggatgactgcccactgcctttcttgctcctggccatccactgctgcaacctggaacccagcacccgtgcccccttcaccgaaattacccagcacctggaatggatcctggagcagctgcctgagccagccccactcaccaggaccgccctgacacacaatcagggctctgttgcaagagggggtccctctgccacgcttcccaggccagatccccggctttcccgaagccggtcagacctcttcctgcccccatcaccagaatcaccccccaactggggggacaatctgactcgagtcaaccccttctcactacgggaagacctcaggggtggcaagatcaagctcttagacacacccagcaagccagtcctgcctcttgtgccaccatcaccattcccatccactcagctgcccttggtgaccactccggagaccctggtccagcctgggacacctgcccgccgctgccgctcactaccctcatcccccgagctcccccgccgtatggagacagcactgccaggtcctggccctcccgctgtgggcccctcggctgaagagaagatggagtgcgagggcagcagccctgagccggaacctccagggccagcgccccagctgcctctggctgtggccacagacaacttcatcagcacctgttcctcggcctcccaaccctggtcccctagatcaggacccgtcctcaataacaatcccccagctgtggtggtgaactccccacaaggctgggctggggagccctggaaccgggcccagcatagcctgccccgggcggcagccctggagcggacagaaccctcgccacccccttcagctccccgggagcccgatgaggggctgccctgtcctggctgctgcctcggccccttcagctttggcttcctgtccatgtgcccccgccccacaccagctgttgcccgctaccgcaacctgaactgtgaggcgggcagtctcctctgccaccgagggcaccacgccaagccacccacacccagcctgcagctgcctggggcacgctcttagcagtggagcccgtggtctcaggcctccaactttggccttcaggacaccctgtaagaacagagcacacttgctggacagtgccagttccagatgggctgaccggctcttctccccgtgtaggggagccccagcatggactcaagggacagagcacttccagtcgaccccccggctcgcgttcccgtggggatcactgaaccagacacagcattgctgacacatgagactaacacgtgcaattatttaaaaagatttcaataaaactgcctggctggctccgggccgcccct

SEQ ID NO: 31359 - DNA, 2505 bp, Homo sapiens
  source 1..2505: mol_type = unassigned DNA
agcggagcagccgccgcccgcccgcccgcccgcctccgcccgcggcaagccagcccgccggcgccccggagcgctgccgccaccgtcaccgccaccgcccggtccaggcccaagcccaggccctgcgcggagcggagcggcgcggcgtccacccgggcccagccagccggcgcggcgggggcgggtccaggatcttcggcggatcttccattctcagggcgggagccggagtccgggcgcccgggatcgggctgggcccgcgcccatggcaagcgcggcctgcccgggccctggggaccctgccatgtgaggcaggcccgggctgggggcccggccatggccggggaacggcccccactgcggggccctgggcccgggcctggagaggtgccgggggaggggcccccggggccggggggcacgggcggaggcccgggccggggccgcccctcctcctaccgggctctccgcagcgccgtgtctagcctggcgcgtgtggacgattttcactgcgcggagaagatcggggccggcttcttctctgaggtctacaaggttcggcaccgacagtcagggcaagtcatggtgctgaagatgaacaagctccccagtaaccggggcaacacactacgggaagtgcagctgatgaaccggctcaggcaccccaacatcctaaggttcatgggagtctgtgtgcaccagggacagctgcacgctcttacagagtatatgaatggggggacattggaacagctgctcagctcccctgaacccctgtcctggccggtcaggctccacctggccctggacattgcccgaggcctgcggtacctgcactccaaaggtgtatttcaccgcgacctcacatccaagaactgtctagtccgacgggaagatcgaggcttcaccgctgtcgtgggtgacttcgggctggccgaaaagattcctgtgtatagggagggggcaaggaaggagccattggccgtggtgggctccccatactggatggctccagaggtgttacggggtgagctgtatgatgagaaggctgatgtctttgccttcgggattgtcctctgtgagctcatcgcccgagtacctgcagaccctgactacctaccacgcactgaggactttggcctggatgtgcctgctttccgaactctggtgggggatgactgcccactgcctttcttgctcctggccatccactgctgcaacctggaacccagcacccgtgcccccttcaccgaaattacccagcacctggaatggatcctggagcagctgcctgagccagccccactcaccaggaccgccctgacacacaatcagggctctgttgcaagagggggtccctctgccacgcttcccaggccagatccccggctttcccgaagccggtcagacctcttcctgcccccatcaccagaatcaccccccaactggggggacaatctgactcgagtcaaccccttctcactacgggaagacctcaggggtggcaagatcaagctcttagacacacccagcaagccagtcctgcctcttgtgccaccatcaccattcccatccactcagctgcccttggtgaccactccggagaccctggtccagcctgggacacctgcccgccgctgccgctcactaccctcatcccccgagctcccccgccgtatggagacagcactgccaggtcctggccctcccgctgtgggcccctcggctgaagagaagatggagtgcgagggcagcagccctgagccggaacctccagggccagcgccccctgcctctggctgtggccacagacaacttcatcagcacctgttcctcggcctcccaaccctggtcccctagatcaggacccgtcctcaataacaatcccccagctgtggtggtgaactccccacaaggctgggctggggagccctggaaccgggcccagcatagcctgccccgggcggcagccctggagcggacagaaccctcgccacccccttcagctccccgggagcccgatgaggggctgccctgtcctggctgctgcctcggccccttcagctttggcttcctgtccatgtgcccccgccccacaccagctgttgcccgctaccgcaacctgaactgtgaggcgggcagtctcctctgccaccgagggcaccacgccaagccacccacacccagcctgcagctgcctggggcacgctcttagcagtggagcccgtggtctcaggcctccaactttggccttcaggacaccctgtaagaacagagcacacttgctggacagtgccagttccagatgggctgaccggctcttctccccgtgtaggggagccccagcatggactcaagggacagagcacttccagtcgaccccccggctcgcgttcccgtggggatcactgaaccagacacagcattgctgacacatgagactaacacgtgcaattatttaaaaagatttcaataaaactgcctggctggctccgggccgcccct
